United States Patent Application Publication US 2022/0102000 A1 - sequence listing, part 6

SEQ ID NO: 1061 - DNA, 4295 bp, Unknown
  16S sequences of unknown bacteria
tgcccatggccaggatgaaggggactgtcatcgggcccgtcgtcacgccgccggagtcaaaggcgatgcagagaaaatccggatccgtgaaggcggccaggagaaagatcagcgcgtagcagcccagcagcagccagcggagattcgcgccggtgataatccggtacatgcacagggacatgaacagcccgacgccgatgccgacggtgacgagcaggacggtgctgctgatatgcgggaccgtctccgccaggacctgcaggtcgggctcggccacggtgatggcaaagcccagcaggaagctgacgccgaggatcaggggcaggtttttcgttttggtcagcgcggtgccaatcttcgtgccgatgggcgtcatggattgctccgcgcccaaggagaacaggcccatgccgaggatcagcatcagcgcgccgatgagaaacgccaaaagcagctgcggctgcatgggcgtcaaaaacaggcagagcaggccgactaaaatcaggatcggcaggacggagaccgcggactcccggatcttttccgccagctcggttttggtggcttccatgttggtcgcatggtgttgtatgcgtcgtttgataggcgtacctcctttttgcgtgtttgggatttaaactgtttgcgaaggggcaatctcggtggcagcgccaagcagcttgcgctgcagggccaggtattgctgcagctcatccggttccaatgccgccaggagctgttgggcgcaggcggctgcctgggcagccctggcttggagcagagcgcggcctgctggggtcagggagatgcggatcttgcgctcatccttgggctcccgggcccggaggaccagacccttgctctcgagatggcgcaccagcgccgcgatgcgcgcagtgctgacgtgcatggcgcggctcagctgcgtcgggcaggcggggccgcagtctgccaggtagcgcagcgcgaggctctcgccccgggccatttccgccaggggcgcaaggccgggcagatgggaaaagcacagctgcagtgccagaaattcctgcgccggggattgttcttccataacattggccctcctgcttgaaatactaacagtgttaataaaacaataccacaaaaccggccaaaatgcaatccttttccgccgcgctgcctggaaaaaccgccggagatgcgagaacgcccaggataggcgaagagtgcaggaaatgcatatttttttcgagaaaatgcttgacaaaatacgagatcgcccgtataatataaaagctgcatgaaatgcagtaccgccgttgtaagcatgattttaccggcggggaatgatgctgttatagctcagtcggtagagcgcatccttggtaaggatgaggtcgccagttcgaatctggctaacagctccatacttttgccgcttgaaacaggccgtttcaagcggtttttacttttttacataacttattttgtttctaactcgttcggaaccgcattgatgaagtcctgcgcatctattgtggagcagccggatttaatgccgtattacccgccaaaacgtgccctgaaacgtggcattgaccttgcgtggggcaagaagcaaatcaccgccagcgtgacaagctccatcctgcagggaaagagcatcaagggcatggcggatgatctgcagaagcggattaccaccatgaaccgcgacagtgccattcgcacggcgcggacagccgtcacgggcgcgcagaacgccgggcgtatggacagttacgcggcggcggagaagatggggatcaagctcaaaaaagagtggctggctgcggatttccaacatttgaagtataatgagcctgaaaagtggaattttgtaaaactggataaaaagcggcgcgatgcacttagagcgcacccggaacgcgcattgcctggggagaaaaagactgctgcaacagaaaaatttacaaaatatctattttatcccgataacccgcagggctgggcgaagggggctgcgttctcctctcgacttggctataccgccgataattatgcagatctccgccgcgagattatctctggggcgagaagatatccagctgttaataaaggcaataacggatttggagtcaggtatgagcaaaagatggtgctgtatggaaaaaccgggaacccggccaatgtaactgttggttgaatctacaaagatagcgtggcccgcatgacaacagcatacatatcggaggtgtgatgttatgagagttaaacagtatgacaccgtcttactgaaagacggaagagaggcggtcattgtcgaggcgtttgaagggaaagcgtttattgccgatgttggtagtagtgaaaaggactgggagacaatcgacataaaaattgaggacatagaacgcgtcctttgaatcgttacacgaagagcactatgcaatccgcatggtgctttttctatgctcgaaaggagaagaaaatgaaaaataaagagtcaaaactcgtgaaatttttaccgtgcctgattcgctggtttacaattgccctggtcgcgctgcgggcgcctgacgtgattcattggccctggtacgcgctttttagcccgctgtatgcatacggcgtgtttgtcgtgctatgtgctgctatagtcggaatttcggcggtgaaagatggacgttgagatcatcgaccacagcgcagaagtggccgcgacattggaggaagcgctgcagcgtgggctggaaaagtgcggtctgacggcggaagggtatgcaaaaaggctctgcgacggctttaagcacgcaaccggaaccctgcgcaacagcatcacccaccaggtcgacaccggaacgcagacggtctatatcggctccaacctcaaatatgccccatatgtagagcttggcaccggtaaatactaccccggcggcaggccgacgccctgagtgtaccaggacgcgcacggcaattggcattacacccacggtaaccgtgcgcagccgtatctcaagcctgccgtcgcggatcacgcagcccaataccgcgcgatccttgaggacaccctcaaggacggataacagaataggaaacgcaaagccagctgctgacaaatgtcagcggttggctttttgctttggtaaaacccgcgaaggacagcggtttttataaaactcaaagggcgaagaaccgacccccgaagaaaaggagagtaacacaatgagcattaccagaaaattgctgaagggcatgggtctgaccgacgaacaggtcgacaccatcatcgaggcacacaccgaaaccgtggacggtctgaaagctgatgtcagcaaatataaggccgacgcgggaaagctggcgggcgttcagaaggaattggacgatctaaaggcggcaggcgatggcggctataagtcgaaatacgagaaagaacactcgaattttgaggcttttcagtccaacatcaccgcgaaggaaacgaaggcggcaaaggaaaaggctgtccgggctttcttcgaaagcaaaaacatccagtcaatattcgcccgttcaattccaaaagatctcgtaatccttctgcgtcttgtgcgaaagtacgatcctatattagactgtacgatccttctcttacctattctatactgtgtaaacagaacaactcccgaaaaccgcatgatcaagcggttttttcactctatttttgcaatccgttacaaacgggatgcgtttcacgtgcaaacggatgcaattcgatgccgttccgcgtcccttcactgcgccctgcgtgcacttgaagcgcggctgcggcgacgcgcagcatgcaatgatattgtataaatactcgctgaaaaagaatgaaaaatcgctgcattttctgattttatcagttgacaaacgggcgggaagccagtataatagtctagcaatgcgagagtgctggaataggtagacaggcacgtttgaggtgcgtgtggctaatgtcgtgtgagttcaagtctcatctctcgcaccaagatcggcgatgtttttcggaacatcgccgattttttatcatgatcttggactgtgcaaattaaaaacaatctgtgaaaaattgaaattacagttgtaatgccgccgcaagtattataaaatagacatacagtgtggaaacaaagacaaggagtgttactatggcacaaccgaagtatcatcgtgttctattgaaaatcagcggcgaggccctggcgggggatgcccaccgggggctggattttgacgtcatcggcagtgtctgcgatgtcgtcaagcagtgccgggagttg

SEQ ID NO: 1062 - DNA, 6125 bp, Unknown
  16S sequences of unknown bacteria
tatcaccgttcctgcatacttcaccgacgcacagcgccaagcaacaaaggacgcaggcaaaattgcgggacttgaagttaagcgtattataaacgagcctaccgctgcggcgctggcttacagcattgataaggaagacgaccagaaggttatggtttacgacctcggcggcggtaccttcgatgtttccataatcgaaatgggcgacggcgttcaggaagttttagcaaccgcaggtaacaacagactcggcggcgacgactttgataagcgcgttatggattacattgtaaacacctttaaggcagagcagggcatagacctctcgggcgataagatggcaatgcagcgtattaaagaggctgccgaaaaggctaaaatagacctttcgggtatgtcctcaaccgatattaacctgccgtttataacggtggacgattccggcccgaagcactttgaaaccacccttacaagggctaaattcaacgagctgaccgccgatttggttgacgctacaatgggtcctgttcgtcaggcgctttccgattcgggacttgataagggcgagataaacaaggtgcttatggtcggcggttcttcaagaatacccgctgttcaagaggctattaagaactttatgggcaaagagccgtttaagggtatcaaccccgatgagtgcgttgcaataggcgcggctttgcaggcgggcgttttaggcggcgatgttaagggcttgctgctgttggatgttacgccgttatccctcggtattgaaacaatgggcggcgtttccacaaaggttattgaccgcaacaccaccattccggctaaaaagagccagatattctcaaccgctgccgacggtcagacctcggttgaggtacacgttttacagggcgagcgcgaatttgccaaggataacaagaccctcggcgtgttccatctcgacggtattgctcccgctccgcgcggaatcccgcagatcgaggttacctttgatatagacgcgaacggcatagttcatgtatcggctaaagacctcggcacaggcaaggaaaacaatattaccattacctcaaacaccaatatgtccaaggatgatattgataaggctgttaaggaagccgagcagtatgcagcggaggataaaaagcgccgcgaggcggttgacgttcgcaacaacgccgatcagatgatttatcagaccgaaaagaccgttaatgagttcggcgataagctctctgccgatgaaaaggctaagattgatgccgctaaagaggctcttaaggaggcactcaagggcgaggatattgaggctgtaaaggctaagcaggaagagctgcaaaaggagcttttcgcggtaagcgagaaggtttacaaggctgctaacccgcagggcaccgaaaacgcacagccgcagggcggcgcgcagaacggcgatccgaatgtttatgaagcggattacaccgatgttgacgacaacaataagcagtaagcgctaagctgcattttgacttcccccttaaaaaggggaagtcttcaacatataatttgtaggagaaattgctttggctgacgataaaagagattattatgaagtcctcggggtggataaatccgtatccgatgacgaattgaaaaaagcctaccgcaaagcggcaaaaaaatatcaccccgatttaaaccccggcgataaagaggcggagcaaaaatttaaagaggtaaacgaagcgtacgaggtgctttccgataaggaaaagcgcgcgcgttacgaccagttcggccatgcgggagtagacccgaattacggagcgggcgccggcggctacggcggcgggtttaccggtgatttcggcgatttgggggatatattcagttctttcttcggcggcggtttcggcggcggcaggcagaataatcccaacgcgccgcgccgcggaaacgatactgcggctgccgttaatctttcatttgaagaggcggcaaagggctgccgcaagaccgttaaggtaactaaaatagataactgtaaggaatgcggcggcagcggcgccgaaaagggctcaacccccaagacctgcccggtttgccacggcacgggtcaggtttcggctacgcagcgcaccccgttcggcgtaatgcagacccaaaaggtgtgcgataactgccacggcaggggcaaaataattgataagccctgccacacctgcgcgggtaagggcagaataaggcatacggtcgatcaaacggtggatattcccgccggaattgacgacggtcaggttataaacctgcgcggcggcggtgacgcgggcgcaaacggcggacctgcgggcgatctgcgcataaacgtaaatgttcgtcctcacccgatctttgagcgtaacggctacgacgtttactgcgaaatccccataacctttgcgcaggcggctttgggcgacgaaatagttgtcccgactcttgacggcaaggtaaaattcaccattcacgagggaacacagccgggcgatgagttcaagctgcgcggaaagggaatacagcgcctaaactacgccggaaaaggtgacgaatacgttaaaatcaccgttgaagtgccgcgcgacctttcaaaagcgcagaaggataagctgcgcgaatttgacagcgtgacaaacgaaaagaattataaaaagaaaaagagcttttcggagaaaattaagagctttttcaatgaataaaaggttataaaagtcggcagaggttatttttatatgcttttgccgattttttactgattaaaggaaaaaacaaaaatgataggactcggaacaattataaacagcggcggcatagtgcttggcggggttataggcggccttgcgggaaagctttttaaacccgagcagcaggaatcgcttaataaggcctgcggaataagcgtgatttttatagcgattgccggcgcaatggagggaatgcttaaaataaataattccgagataagcagcggtaaatctatgcttgtggttctctgcttagcgctcggaacggttatcggcgagctgataggaattgaaaagggctttgtgcgtttcgggcagtggcttaaaaataaaacggggaacagcaaagacgcaacctttgtaaacgcgtttgtaacggcttcgcttaccgtatctatcggggctatggctattgtaggggcaatacaggacggcttgcgcggggattactccacccttgcggtgaaaaccttgcttgactgcattattattaccgttatgacatcttctatgggcaaggacgccgcattttccgcaattcccgtatttgtttttgagggctgtataacgctgctggcaaggctggtttcacccgtaatgaccgatacggcgctttgctatttatcgcttataggctcggttcttattttctgtataggcgtaaaccttgtttggggtaagaagttgaatgttgcaaatatgcttcccgcggtgcttttggcaatcggggcggcgtatttgccttggaatttttaaggagcagttgcaatgtacgattatataataagacctattaaagcagaggacgatatgaaaattgcgaaaattattcgcgataatttagagcgctttcatcttgatattccgggtaccgcgtattttgataaagagcttgactcattgagcaaatattataatgccttacccgaaaagcggagatactttattgtagcagacaatgacggcggcgttataggcggcgtgggtattgccgaattcggcgggcttgataattgcgccgaaattcaaaagctctacctttccgacttagcaaagggcaaggggcttgggaaaagcttatgcaaacagccgaggaatttgcggcgggagtcgggtataagcggttgtatttggaaacacattccgatttaaaagccgcgatagggctttatgaaaagctcggatttcatcgtatagacaagcccgaagccgtgctccacggcactatggataggttttatataaaggagcttaattatgaataagcaggaaatatataactatcttaacgccgaaaatatagaatacgaaataaccgagcataaagcggtttacaatatggaggagttggcagagataaagctgccgcaccccgaggcggacgcgaaaaatctttttgtgcgggatgataaacggcagaattattaccttataaccgtaaagggcgaaaaacgggtgaatttgaaggactttcgccgtgaaaacggcacgcgaccgctcacctttgcatcacccgaggaattatcggaaatattggggctgataccgggcgcggtaacgccgctggggcttttgaacgataaggaacaccgcgttaaattctatttggataaggattttacggatatggactttataggcgttcacccaaacgacaacacggctacggtgtggctgaagcctgcagaccttataagtcttttaaagaaaaaaggcagtgaagcatgtattttttaaaggagataatatattatggtaaagcatataattctttggcagctatccgacagcttaacggaagaggaaaaggtgaaaaccgcgcataacgcaaagcagaatcttgagggcttaatcggtaaaattgaggggcttaccgatatttgcgtaataacgggtaagcttgcaggctccaatgcggatatgatgctcgacagcactttcacatcggaggaagcacttaaaaactactccgttaaccccgcacatgttgcggttgcggatacctatgtaaggccctttgtaaagtcgcgcagctgcattaactatgaaatctgatttgtgacccgataatatacaaatattagccgataagaaattgaccgccgttcctaaaaaatattataattaatgaaaaggaacggtgattttttatggaaagaaaaactgaagcacaaagactccgcgcggttgagagctttaataccgcaggggagtttataagctgcgagccatacggcaacggtcatataaacgatacgtatttggtggtctgcaaaacaggcagcgggaataagagatatatactgcaggcggttaataccgatgtcttcaaagaacccgaaaagcttatgagcaacatcgaaaaggtgactgcgtttttaagaaaaaacggctgcggcgagcgcgagaccttaagccttgtcaaaacgcgggatgacaagccgtattttacagacggcgatagcaactgctggcgtatgtacgattttattgaggattcgatctgtcttgagctgcccgagagcaatgaggacttttaccagtgcgcggttgcgttcgggaaatttcaaagatttttgaatgatttcccggtcggcgagctttacgaaacaatacccgattttcacaatacccccaagcgctttgcggattttaccgcggcggtttcaaaggacgcgctcggcagggctgcaaatgtccgtgaggaaatcgaatttataaaatcccgccgggatttttaccctgtgcttatagacaatgaaaaggcagggcttctgccgcgcagggtaagccacaacgatacaaagagcaacaatgttatgcttgacagcgtaacgcgcaccgcgctttgcgttatcgatctggacacggtaatgccgggctattcggtgacggatttcggtgattccatacgctttggggcaagcaccgcggcagaggacgaaaaggatctttcaaaggttcatttcagccttgaaaagtttaagacatatgcggcgggctaccttgacggctgcggcggaatgcttaaaaatgaagaaataatgctgctgcccgagggcgccaaaatgatgacgattgaatgcggaatgcgctttttggcagattacctcgaaggggacacatatttcagaacggcataccccgagcacaaccttgtgcgctgccgcacacagctgaagctcgtttccgaaatggaagaacagtgggacgaaatgaaaaacgcagttaaggaattttgcaaataaaatctgtttggctgttaaacgatatatttgataaattaataaaatatagcgcggcggtgttatggtacaatagataggtaacaaaaaaagaagaaaattcatctcaaatatg

SEQ ID NO: 1063 - DNA, 15150 bp, Unknown
  16S sequences of unknown bacteria
gggtccggtcggttgaaacagttgcataggaaagctggcgatacggcaaaagaacagtattttatcgctgcattgcaaacacgtaaatttggatttcgtggatggtgtagttacaaaaaacaggaaaaaacagtaattctttagctttaaaaaatcaggttttgaaggtttcaatcttgcctttgtataaatggtagacaaccgtttgacagcgtgaaatatccatggaataatgaatatgataaaatttccggtcaaggaaaggagcggtaaaatgaacacaacaggacaaagctggatcgttctgaataacggtgtaaagatgcctcaatttggcttaggcgtttggcagacagaaaatggcgagcaggtaatcaatgcagtgaaatcagcggtagcggcgggttatcgggccatcgatacggcagcagcatacgaaaatgaagcgggcgtaggccagggcatcaaggagtgcggaatagcacgggaagagctgtttattacttctaagctgtggaacagcgaccagggctacgacaatacgctgcgtgcgtttgacaaaaccatggatctgcttggcctagatgtgttggatctatacctgatccattggccttgcccggatcatgataaatatgtggagacttggaaagcatttgaaacgctgtataaggatggccgtgtacgtgcaattggtttaagcaattttatgcaggagcatgtgcaaaagctgcttgacacctgtgaaatcaagccgatggtggatcagattgaatgccatccgttcttgacgcagacacagatgcaaaagttcctttttgagaatcagattgctatgaccgcatggagcccgttggcccatggcgaagtattcggcaatgaaacgctgcaaaagattgcggataagtacaacaagaacattgcacagatcgtcattcgctgggaattgcaaagaggcatcatcaccattccgaaatccatcaacccgaaaagaattgaggagaatattcaggtatttgatttcattttgaattctgaggatatggtggccatcgatatgttaaatcaaggccgtcatacgggccctgatccctatacattccataaaatgtaatgaaaaaagcagccgaacggctgctttttttgcagggcaaaacaacataaaactgtgatgtgcctcatagatatagaataagtattttaggaggcgtcgacagtgcagaatacctatgataatcaggcgcaattattgggcaccatcgtacaggacccgttatattcccattcactgtatggagaaaacttttatacctttgctttgcatgtcaaaaggctatcagatactgcggacgtattgccggttacagtctcggaacggatattgggaaaggcaaaatccggacaaatcgttcgagcgtatggccaggtaagaagctataataaggtaatggcgggaagcagccggctgattttaacggtatttgcaagacgtttggaatttatctctcaagcgacagcatgccataatgaaatctcgctgtgcggatatttatgcaaaaagcctacttataggaaaacaccgtttgatagagagattacggatatactgcttgctgtgaaccgagcgtatcacaaaagcgattatttgccctgcattgcatgggggaaaacggcacgctttgccgcgcgtttagaggtaggaacccatattcgattgaagggccgaatgcagtcacgcgcgtatgaaaagacctatccaacgggggaaaccaccatcaaaactgcatacgaaatttccattgcgcaattggaggttattacggacgagtgataatttacgccgtttttgtgctttaataaagtaacgtatcatggtataatacaaaaaaacgtttgggaggattcgcatgccagccaattccaatctaaagtccaaagaaatggacatgctttgccaagcgcttcttcaattggagacggtagaggaatgctatcagttttttgaagacatttgcaccatggcggagatgcatgccctaagccaacgtttacaagtggcaaaaatgctgaaggataaagtgacctatcaagaaatcagccggcttaccggcgcttccacggcaacgatcagccgtgtgaaccggtgtgtggcctatggcagcggtggttatgggctagtgctggaacgcctgaacgcacaaggcgaacaataatggtttgaaacgattttggcgtacaaaggccagctttgtgcgcctttttcttgggttatcgtaggaggaaatatggatttatccggtttaaatcaaaaccaaagagctgctgtagaacaaacggaagggcctttgctgatcttggcgggggcaggcagcggaaaaacgagaacgcttaccatgcgtacagcgcatttgttggagctgggcgtattccccagttcgattctttgtattacgtttacaaataaagcggccaacgagatgaaggatcgtgtggaggaactggtaggcccggcggcacagtctatgtggatctgcacatttcatagcatgtgcgtaaggattttgcgcatgaacgcagatgcacttggctataccaaaaactttaccatctatgataccgatgacgtacagcgtttgatcaagcagatagaaagagatctggacattgatgaaaaattttgcccggccaaagcggtagcgtccgccatctcagacgcaaagaataagatgttatggccaaaggactatgcacagcgtgctacgggcgatatttggaagcagaccgtggcagaggtatatgctgaatatgaaaagcgtttgttagcgaataacgcatttgattttgacaatctgctgggaaaaacagtagagttgtttgaaaagcatccggacatattggcgtattatcaaaatagatttcgctatgtgcatgtagacgagtaccaggataccaaccgggcacaatatttattggtaaaatacattgcggcccatggcaatgtctgtgtggtaggggatgacgaccaatccatctatggatggcgtggggcggatattcgtaatatccttgactttgaaaaggattttcctggtgcaaagctgattcgtcttgaacagaattaccgttcgactacaccgattcttgaggccgccaatgccgttatcagccataacagtggacgaaagggaaagaccttgtttacaacccgggaagggggcgcgcccgttacgctccatcgctgtatctccgagcgcgaagaagcgatgtttgtggcggataccatcgatgatttgctggcggattaccggctttcggattttgctgtgctttatcgcaccaatgcacagagccgtgctttggaagaggaatttatgaaaaagcagatcgcgtaccgggtggtaggcggcattaaattctatgaccgcagagaggtcaaagatttagtagcctatttgaggtttctgcaaaatccccaggacagcgtcagtttgttccgcatcctcaatgtgcccaagcgcgggatcggggcgacaacggtggaaaaaatacaagctgccgcccaggcaaacgatgcgttcgcttgggacattgtcatgaatgccagccggcatattacgccgaaacgcacggcggacaagctggaaaagtttgccaacgatatgatgcagcttatggcggccggggtgctgctggcgccggaggaatatgtacgcaaggttttggatgataccgggcttctgctgcagtatcaggaagaaggaaccgaggaagcgctggcacgcgctgaaaatatgctagagtttatcacggccatccaggaattcatgcaaagcaatgcggatgctacgttggctgattttcttgcaagcgtggccctggtcatggatacggatgaacaggtggagaccaatactgtaactttaatgacgctgcatagcgcaaaggggctggagtttccggttgtatttttcatcggcctggaagaagggatctgtccgcatatccggtctatgcagaatgaagaaggcatcgaagaagagaggcgcctttgctatgtcggcattacgcgcgcgatggataggctgtatatgacgtatgcgatgagccgtggtctattcggttcgacaaaccataatccaccgtcgcgatttttggacgagcttccggaggggttggaacgcaacgatacggccagcggtgttatgagtccatatgccgacctacccaaacagcacgtgatgaaggcccccgttttgacgaaaagagcatccaagcccgtcatcacgaaaccggacccagccttgatggagctaaagccgggagaaagggtgcatcatcctgcatttggcggtggagaggttctttctctgtcgggaaaaggcgacggattggtggctgaaattgattttggaagcaaaggtatcaaacgcattgccttaaaatatgccgcaatgaagaaggaaggataatggaacagcgtttacaaagcattgtggatcagcttaatgagtatgctgagcaatattatcgatatgataaccctaccgttacggacggagagtatgatgccttgtttgatgagcttttagcactggaaaaacagacagggatcattttaccggattccccgacaaggcgtgtaggcggaacgcccattcaggggttttcgcagcatgcgcatttgggaaggctgtggagcttggataaatgtagaagcaaagaggaagtcgttgcctgggaacagcgtatacagaagctgcatgatgccgaggcgggcctgcctccgcttcgctatgcgctggaatacaaaatagacggtttaaccatcaatctgacgtatcaaaacggtaggctggttcaggcggccacgcgtggcaacggcgttgtgggcgaaggcattttggcccaggtacaaacgatacgatccattccgctaaccattccattcgatggcaccatggaagtgcagggcgaagggttcatgcccctttcctcttttgacgcctataataaaacggcagaagagcccttaaaaaatgcacgaaatgcagcagccggcgcgcttcggaatcttgatccggcggtaacggcagctagaaagctggatgcttttttttacaacataggatatattgagggcaaagagctttcgagtttaccggagatgctggctttcttacaggagaacggcttacaaatatcgcccaaagtgcagtattttgacagtgccgtagaagcctacgaccaggcaatgaaaatggcgcaaagcagaaaaatggaggattttttgacggatggtatggtcattaaggtctgtgattttgcgacccgccaagtgttggggcagacagagcgctttcctcgctgggctatggccattaaatttgaggcggaagaggccattaccaccgtgcaagccgtgcaatggcaggtaggtagaacagggaagctaacgccactggcgcttttagagccagtggagatctgtggagctacggtgaaacgggcaacgctgaataacgtaggagatatccaacgcaagcatgtaaagattgggggcagggtgtggatacgccgaagcaacgatgtaattccagagatcatgggcagcgtagacgataacgggcaggaaatactgccgcctgagcattgcccgttctgtggggcggaggttgtggaaaagggagcacatctattttgcagcaataccgtgggctgtaagccgcagctgttggcggccttagctcactttgcctccaaagggtgcatggatatccaggggctaaacgaaaaaacgctggagacattcatggatcagctgggcgttcgataccctgcagatttgtatcggttgacggaaagccagcttttgggcctggaaggctttaaggaaaagcgggcacagaatatcgttcgcgcgatacaggagagcaaggattgccgactttcccagcttttggtagccattggcatacccaatgtgggcaaaaagacggccaaggatttggctgcgctttatcctacgatagaggcattggccggtgcttccacagaagagctggaagcgatttatgatattggcagcatcgtggcacggtcgatcgtggattattttgccgacaataaaaaaagacatcagttggaagatttgttggcctgtggggttgtgccgcgcggagaaatgaaaaaggacgacgaatcgcaaggattgctatccggagagaccatcgtctttacgggttcgctatctcagatgacgcgaaaccaggccaaagaacaggccgaagctttgggcgcggttacgacagacagcgtaagcaaaaagacgacgctcgttgtagccggagaaaatgctggcagcaaattgacaaaagcacagactttgggcatacgcatattaacagagcaagcgtatttggatatgatttcacagcactgacgatatagaagggccgtgataagatgagaatgggaaaagaatggacaaagcaagcgttttatagcaatgcgccaatacgggacgagatagtgttgcgcccaacggcagaaaaggactgcgctgcgctgcgccttggcccaaggctttgcgttgcgtccacagaatctgtggctttggagagcaaggagttgggatacctgctggcgcaatgctgctgcaatgagattgctgccagcggagcagagccgattggcctgagcgtatcactctttgtgccgaagagcatggaagaggcaaaaatcgagcgtatcatggagcaaataaggcaatgtgctgatgcgctccgtgtagaggtcattggcgggaatgtagagaaaagcgatgccgtgacacgcctggtagcgagcgcggtgattatagggagctgtccggaaagccgtctggttgcaacagatggtgcgcagctaggagacgacctggttttgaccaagtgggcaggtatggaggcaacctatcgtatggtaacggactatgcgtctgtatccatgcagcatttgggcacggaaggttaccacgtttgtcaacagctgaaaggcgaactttccgctataccagccggcttactggccgccgagataggtgcccatgccgtctatcatgctacaaaaggcggtgtgctaggcgctgtacatgcgctgtgtacggcatctagatgtggcgcgtatttgatagaacagcatattccggtgctggaggaaacagagcagctatgtcatgcgttttccttggatgcgcttcgtttatcatctgctggatgtcttcttattgcatgcgagaacggcaggaatatggtgcgttctttacaggaaaaggagatacctgctgctatcattggccaggtaaagtatgcggataacgggcttaggatacagtgtatggatgggatgataagggagatcgccccgcctggaacagatgagttttaccgctttgctgagcatatggcggaaacagaggtttcgttgaatcagggttgatgtttatggtataatgatccatcaaggggacggaggaattcaaatgcagagcatgactggtttcgggcgtggctcgtttcaattggaggggcgggaagcgaccattgaaataaaagcagtcaactcccgatatctagacccaaatttccgcatgtcgcgcaacgtgagctttgtggagccaaagttgcgcacagctttggcggaggccttgcatcggggaaaagttgacctatacatttcctacaaaaatacaagagaggatcgggcggaggtcctggcggatgtggctttggcacagtcctatcaaaaggctattgttacattggcgcaggcgctggaaaagcagcccgagactacgctatggcagatcgctgcgttaccgcaagtcctgcagctatccgaaagcgaggaagatgagcaggctgtgtgctatgtggtagagcaagctttttcacaggccattggacaactgaagacgatgcgtaaaaaagagggtgaaaagctctgcgaggatttgcttacaaaggcaaaggcagtggatgtgctggtttgccgtatcgatgcattggcgccacaggtagagcaagcgtctaaagaaaagttgttggaaaaaatgcaggaatacacacaagcggatgaaacgttaaagcagcgcgttgtaatggaagctgcattgatagcggaaaagcacgcaattgatgaagaactggtgcggttgcacagccatattggccaattttgtcaaagtgtacgatccgaaggcccggtagggcgaaaattggattttattgttcaggaaatgaaccgtgaaatcaacaccattggcagcaaagccaacaatgcggagatcacgtccctggtaattgcggccaagagcgaattggaaaagatgcgcgaacaggttcaaaatgtagaataagcgaggaagagtgtatggcgattcgattgatcaatattgggtttggtaatatcgtttctgcaagcaggatcatagcaatcgtttccccggaaagcgcccctatcaagagaatcattcaggatgcgcgggagcgaggtgtgttgatagacgcaacatatggccgaagaacccgtgccgttgttgtgatggatagcggacacatcattttatccgctgttcagcctgaaacggtagcaaaccgattaagcgaccgtgaaacagaactggaggactgagtgtggtcatgaaaaaacgtggaacgttgcttgttgtatcaggcccgtcaggagcgggaaaaggcactttgatccaggctgttctaaaaaaaagaccggaagctatggtatcggtatcggccacaacgcgtgcgccgcgccccggggaaaaagaaggcattcattatttctttgtcagcaaagagaaatttgagaaaatgattcaagagcatgcctttttggagtatgcgtgcgtgtttggtacaacctattatggcacgccgcgggcctttgtagagcaaaagcttgcggaaggaaacgacgtgattttggatattgatgtgcaaggtgcaatgaatatcaagcaagcgatgccagaggctgtgcttgtatttatcctgccaccttcttaccagattttacggcaacgcctgacggatcgaaaaacggaatccgatgagcagattgagcgccgtttacagaccgcgaaaaatgaaataaaatatatcaatcactatcagtatttgctgataaacgatacagtgacggatgccagtgataacctggatcatatattgcaggcaagccatctgtatgcaacgagtgaaagaaaagacgcgcttttggcgcattgggaggaatagaaatgatcattgacccgcctatcaacgaattgttagacaaagtggaatgtcggtattctttagtggttgtggtatccaaacgcgcacgccagctggtgtccggggacgctcccttgattgatatcgatcctgatgaaaagccggtttccattgcggctaaggaaatgtacgatggaaaattgaatgtagataatggcttcggagagttctaacgatgtcttgcgtagtattgggtgtaacggggggcatcgctgcgtataagagcgcggagattgcatctcagctgaaaaagcaagggcacgatgtatatgtgattatgacaaagcatgcaaccgaattcattgcgcccttgacctttgaaaccctaacgaatcatccggttgtggtggatatgtttacacgggaaacaccctgggaagtagagcatattgccttggcaaagcgtgcggatgtttttttggtcgcgcctgccagcgccaattttttagggaaatatgcaaatggcattgcggacgatatgctgaccactacggtgttggcaaccaaagcacccgttgtcttggcgccggcgatgaataccaatatgtggagcaatgcaatcgtccagaaaaacgtggaagcgctcaagtcttttggcgtttccatggtaggcccgggtagcggttatttggcatgcggagatttaggccaggggcgcatgagtgagccggaagagatcgtggaagcggtgcatgatgcgctggcacaaaaggatttgaatggtaaacgaatcttggtaacagcgggtcctacgcgggaaacggtagaccctgtacgctatataacaaaccacagcagcggaaaaatggggtttgccattgccagggcggccaaacggcgcggcgcagcagttactttgatccatgggccagtggccttgcctttgccttatggcgtagaggaatgtgctgtgataagcacgcaggatatgctggaagctgtacaggacagatttttagattgcgatctattgattatggcggctgcccctgcggattttacgatgcaagaacaaagcaaccgcaaaatcaaaaaagtagatgggcagccaatggtttggcagctaaagcaaacacaggatattctgggtgctttgtcatccaaaagaaacggacaggttgtggttggttttgcagcagaaaccaatgatgtacagtcctatgcgatggacaagctgcaaagaaaacggctgaatatgattgtggccaacgatgttacgcaaaagggcgccgggtttggtgcggataccaatattgtcaccgttgtccatgaggatggacgaatctgcccgcatgatattgcgcccaaggaggaaattgcagactttattttggaccaggcaaagctgtatctgaaatagcttggatagcccttaaaagcacctttggtgcttttttcttacgatatagtaaagggaggaaagatttgtacgcacaggttatcattgatattgcacatgccaaggtagatcatgtgttttcctaccaagtgccggaagacatggaaattgcgccgggagaccgcgtattggtgccttttggaaagggcaatacgccgaaggaaggatacatcattgacatatctgaagaaactgcctaccgggcgggaaaaataaaaaccatcttaaaaaaagaggatactttttctgcttttctccctgaacagattgaactggcaaaatggatggccgtttcctatcattgcttcatggtggatgctttgcggctgatgattccagcgcagctgcgcggccagcgcgtcaaagaaaaaagaatagaggttatatccttggcaaaggatatggatttgcaggcaagcatggcgcttctgcgaggggaaaacggaggaagaaaggccccggcacaggcggaaacacttcaactgatcagccaagtgggaaagattgctgccccagagctgtacgaatactttcccggagcacgctctgctctggtacagcttaaaaaaaaggggtatgtttgttctgagcatgtggaggtgcgccgcgcaccttatcgaagattgggggaagccccaaaaaagaagcaagtgctaaccccctatcaaaagcgtgccgtggaggagatcgtatcctctctttctgcgcatgaggggcgctatctgttacatgggattactggaagcggtaaaacagaggtgtatttacgtgccattcaggcggcgatagagagtggcaaagggtgtatcatgctggtgccggaaatttctctgacgccgcagatggtctcaaggtttcgaggatatttgggggaaaatgttgccgttttgcacagcaggctttctgccggagagcggtatgatgaatggaagcgcattctaacgggacaagcacgtatggtaattgggccaaggtctgctgtgtttgctccggtatatgatctgggattaatcattatagatgaggagcacgaacaatcctaccgaagcgagcataaaccgcagtatacggcccacgaggtggcagaaaagcgttgttcgctgaccggagctacgcttgtgctggggagcgcaacgccctctgtggtaacatatcaccgttgtatgaagggggatatccaatatctttctctgccagaacgggcaggagggcaaagccttccccatgtgtatgtatcggatatgcgggaggagttgtccagaggcaaccgttctatattcagcggtgcgctatcgcaagccatggaagattgcttggcgcgcaacgaacagatgatgctgtttatcaaccgccgcgggtactccacttttctgatgtgtaggggatgcggttatgtggtgcagtgcgaagattgtgatgtatctatgacataccatcgtacggactatcgcgagatgcttagatgccattactgcggaaagacggaaacgccgccctccctttgtcctatatgcggtaagccttatctaaagcagtttggaatcggcacacagcaagtggaagagcaggtgaaactgcattttcccagtgctcgtatattgcgtatggatgcggacaccacacaggaaaaggatgctcatctaaagatattgcaggcatttgcacaaaaacaggccgatgtgctcatcggtacacaaatgatcgccaaggggcatgattttgaaaatgtgacgctggtgggtgttttggcggcggatagctcgctgtatgtaccggattaccgcagtgcagagcgtacctttcagctcattacccaggtggctgggcgcgctggtagaggaaccctgcctgggaaggtcatcgtgcagacctatcacccggatcattttgcaatacaggcagcggtaaaacaggattatcgacaattttatgcgcaggagatacagcatcgaaagaccgctcagtttcctccgtatgccctgtttatcaggcttttgttccgaggtgcgcaggcggcggtgaaaaaagcatgtttggatagcgtagcaacgctatccgcatactttgccaaccagcacatgcagcccttgcaatttgactatggatctgcgccaattgcgcgcatcaagggagagacgagaatgcagattttgctaaagttggatctgccccatatacaaaatagacaggtggaaaagatctatcgcttgtttgatgggtgcgtttttgaagactgtaccatgatcatggaaacggatccgccaaatttgctttaatcatcggccaggccgtagagatttatggtatactatacagttagaaaggagcgtgcttttttcaatggcaattcgacagatcattaccgtagaaaatgaaaacttacataaacaatgcaaacccgtcaaggaagtggataactatatctgccgcctactcgacgatatgatggagacaatgcaccatgccaacggcgtagggcttgctgccccgcaggtaggtgtgcttcgcaatgtatgcgtcatcgatgtggatggccagcagtttgaattgatcaatccggagatcatagaggtagcgggcgaaaaggaagatgtagaaggatgcttgtctgcaccgggccgctgggcgatggtaaagcgtccgcagcgggtgaaggtgcgtgcgctaaaccgtaaaggagagcttgttgaatatgcggcggaagaccttttggctagggctttttgccatgagatagaccatcttaaaggtcaggtctttttagatattatggaatatgaagtagagccggaggaggcgtgatccttgaagcttgtttttttcgggacgccagcgttcgccgtgcctgttttacaggcagtgcacagtgcagggcatgagattcttgccgtcgtgacccagccagaccgcccaaggggcagaaaaaaggtgttgacgccgccggaagcaaaagtctgtgcgcaggtgttggggctttccgtattgcagtttgaaagaatcaaacggccggaggctgtacaagcattggcgtctttggacgccgacgtctgggtgaccgcggcgtatggacagattttgtccaaggagttgctggatctgccgcccaaaggggtcatcaatgcacatgcgtctttgctgcccgcctatcgcggcgccgcaccggtgaattggtgcttgatccatggggagacaaagacaggcgttacgacgatgtacaccgatgtgggagtggatgatggggatatgatcctacagcaggaagaatgtatccgccccgaggacacggcggagagcttgttggggcgcctttcctgtatcgcggcagagctaatggtacagacattggcgctggtggaaaaagggcaggcccctcgcacgccgcaggatgaacagctggccactcggcagcccatgctctccaaacaagatggggccttggatttttcacagagggcagaggcagtgggcaatcgtaccagaggggttacgccatggccaggcgcgtttgctgccttagatgggcaaatctataaatttgctgagccttatacggcggagggttgtggagtgcccggcacaattttaacagcggatgaaaaaaacggcctgttgatcgcttgcggcgaaggggccataggttttaaacagatccaggcaccggggaaaaagaaaatggatgccagagattttctccgtggccaccacctggatacgtctaagaggtttggagaatgagtgttcgcgctggagagcgtgctgcggtagaaatattggagtatatggataccgagcaagcgtatatggggcaggcactttcagaagtattgcatagaaaaaacctaacgggggctgatcgtggtactgcggttgctttttctaagctaacggtggaaaatcgtcaggccgtcgattttgctctgatgcaattgaccaagctgaataaggctgggcgcaccgtcaaaaacattttgcggttgggcgcagccaggattttatttggcaataatacagaagcgcaggctgtgcatgcgagcgtagaactttgtaaagcgttcggcaagggcgcgcaaggaaagtttgtcaacgctgttctgcgaaatttggcccgccaaaaagaccagatcccatggccggaagagcaaaacgatcccatgggtttttattcggtccggtatagttggccaaaatttgccgtagagcaggctttttccctattgggggcagagcaggcatgtgcatttttgaagtatcgtgcgccgcagcccacaacagtgcgcatcaatccatccaaaacgacgagagaagagatagaggctatctttaaggctggcggaattacagctaaaaacatgtgggcagacccaagagcgtatgcgttggaaggggccgaaaatataccggctatggaggcttatcggc

SEQ ID NO: 1064 - DNA, 14818 bp, Unknown
  16S sequences of unknown bacteria
tatgaaatgatagagtcgggagtaatagaaaaaacagcgatggtcttcggtcagatgaacgagccgccgggagcaagaatgagagttgctcttactggtcttaccatggcggaatatttcagagatgtcgagggtcaggacgtactcctctttatagacaatatattcagatttacgcaggcaggctcggaagtatctgcgcttctgggcagagttccgtcggcggtaggctatcagccgacacttgcaacggagatgggcgctttgcaggagagaattacatcgaccaaaaagggctcgattacgtctgttcaggcagtatatgtgcctgcggacgaccttacagaccctgctcctgcaacaacctttgcgcatcttgacgctactaccgtactttcaagagccattacggcgctgggcatatatcctgctgttgacccgctggattccacttcaagaataatggacccgctgattctgggcgaggagcattacaatacggcaagaggtgttcaggaggtgctgcagagatacaaggatttgcaggatataatagcaattctgggtatggatgaattatccgaggaggataagcttgtagtaaacagagcaagaaaaatccagagatttttatctcagcctttcagtgttgccgaacagtttacgggaactccgggcaaatatataccgcttaaggaaaccatcagaggctttagagaaattctcgacggcaggcatgatgagattcctgagcagatgttcctgatggcaggcggcattgatgaagttgtagaaaggtatgaaaagagtcatggctaacagcgttaaacttgaggtgataacaccgtcaaagctgttttacagcggagaggtcgagcttgtaatcgtaacaactctgacaggcgatgagggatttatggcaaatcactcgtgggcgaccaagcttttggatgtgggcgagctttggattcaggaaaaaggcaagacctatgatgaattcaaggtggctgctgtgtcgggaggctttatagatgtcaaggagagcattgttatctttacagatgcggccgaatggtctgaggatattgatatggaaagagttcttagcaaaaaggctactgttgaggactggataaagcacagggccgaatatgaggatcctgccaatatcgaaaaggccagaatagagcttgccaaggaaataaacagaatgaaagttgccggaggcggcaaacgcagaagataaatgacaggcggggtgtattgatatgccccgcttatattaatcagagaaggaatttcagatgaagttccgcatagggagcggctgagatatttgcctacgggactgtggtcagagttatagagaagcagatttaaaatcaggtatgggagatattgaccccatactgttttttaagcctatttcatacaggagcagctgcagtccatacagtctgcttctttttcttcctgtgtctttgttttgaagagggctttgactggtctgagcatatgaaaatatccggacataaatttgataatactctccattttcttctctttaagagcatttataagggagcttgcataggtgcagccagactcattgatggagtaataattccacttgccctctttacggcttgtaacaagtcctgagtcgcataatattttcatatgatgtgaaagtgtcggctgcttgattttaagatcgtcaagcaggacgcaggcgcactgctcgccatcgcaaagcagttcaagaactctgactctgctctcatctgtaaaagccttaaacactcgcatatattctgaattcataacagacctccgtatcggtattgataatacaagtatatatcaatgtattgaaaaaaattaataacatatatgaaaaaagagtacgcataaagcatactccgaataccttgcttatctgacatagacctttggaagcctctgaccgaaagcgcagatgatttcataattaatagttcccgtagccttggcaatatcatcggcaagaatagtgtttttgccgtcgctgcccattactataacctcatctccgactttgacatcgggcacatcggttacatctatcatgcactggtccatacagatgttgccggcaagcggcgctttaacaccgttcactataacctctcccttaggcgcatacggtcttgggtagccgtctgcataaccgagggcaatagttgctattttgctcggtcttttggatataaattctctgccgtagctgacagaaaatccggccggtacgtctttgagatgtgatatcgttgcttttaccgacattacaggctttagtgaaagactgcttttgtcgacctcatctgacggatagcagccgtagagtataattccgggacgtaccgcatcgaagtatactgacggaagctccattaccgaggcgctgtttgcaaaggttctcataggaatttctatgcctgcggctataagcttgtcgtaaaattcattgaagcactgttcctgctgacgtgagaatgttttgtcggcagagtctgctgtggacatgtgagaaaacagacccgctatcttaaagtttggaagctgtgaaatctctttgatttcagaaacggcgttttcgtcccatgttagatagcctattcgtcccatgcctgtatctgcggcaatgaagcccgatacggttttgccgacttcggtggcagtctttgaaattgctctggcgttttccagactgcttataacaggggtgatgtcgtattcgacaagtacgtttgaataaaagttgggagtcaggctcagggatataatctgctctgttgcgcctgcctctctcaaaacgatagcctcctgaagcgttgatacggcaaatgtgtcaacaccgtttgctctgagaacctcagcgaccttgacagagccgtgaccgtagccgtcagccttgacaactcctattattttggtgccgcttcccagcttggctttgatattctttatgttataatccagattggataaatttatttctgcccatacaggccgtatagcttctttgtacattagtactctcctgtaaattttgtattaaaaaacactatttattctaacactgcaggggcttttgttcaatattgatggtaaaaaaaccggattaaatatccggcttttgaaatcaaattcgctccataccctcgctgctgcccagagagtgcttgactctgtcggcttcctctgcggttttggcgtcattccacatatccatagtgcctacaagatagcctgtaattcgtctgatacgttcgaaaggtacctgtgtgaatttgtagttaagatctgcaaaatccccatctatattaatatccagggattccagttttctgttgtatttgttctgaagataatcaacatatgccattgcctcatcgtgaggggcattgcctgtaatttgtacgctcataaaaaatccctcctaagattaatttgtatctgtaagtatatattctactacatatactacattttgtatcgaaaaaaacaaaaaaacattaaaaaaacaatatatagataaaagagtctgaaatttaaaaatgctcaaagacttgaaaaatacatataacctgtggtattatttataggtaaatctgctcccgtagctcaggggatagagcgtcggtttcctaaaccgtgcgtcggaggttcgaatcctctcgggagtgccaatctcaaaccgcttgaaaacattgatatttcagtgatttcagcggtttttgttttgcttgcaatttacatcaaatgtaaatttatatcacgttttggtgcgttttggtgctatttggtacgacatcacctacgacactttttgaagagtttattattttggcagcttcaagtatagtcgaattgtcggcgtgcgtgtatatatttgcggtcagagatatatcactgtggcccatcagatattgcgctgttctgatatctattcctttcttctgcaagtcagtacaatatgtgtgcctcagattatacggcacgaaatcctctgccaaaggataaggcgggagtagctggtttctataaaccgtacagcccatagatatattcagctctctgtataacctctcacacagtctgcgataagatgtctgattgtacttcttgcctgctccggtagtgcacagataatcgaatttagacgcatttttaatcttctgatatagagcatcaggaataggcacaagacggtctgcattgtccgttttagtccctctgatgtgcagcaccggctgaccctccagtacctttatatccatacctttaacttctcttgcctctgacggtctgcagccacagtaaagcataagaagaaacagtataaacctgctgtctgtatcgcataccttaagcagatgataccgctcgttgtctgtaattgatctccgatatgttttagttcctgccggctttgttattttttcggcaggatttttcagaataagttcattatcaacagctttactgaatataaagttgagagtttggtgtacttcatttatttgtctttttgaatttcctgcctgtagattgagtacattttgacagtgcagaggttttacctgtttcagttgcatatcgccgatgtgctcaaggatacagtggttcatacgctgtatgtacttttctcttgttatgtctgcttgatttgtcttatatgtttcaaccgctttgatggcccaatcgcgaaccttcattgtatttgaaacaacaactttaccttcctccaagtctcgtatcttattcgccatttttataatgacgtcctgttcgctgttacctctgactttgtaccgcttgccgtcaaaggtaaaatctttagtatattttttagacattgtattcctcctaaaagtgagcgcaaaaatacacccttaattgacttttcagagctacatatgatacaatgtttctgcttattggttgtatgatatgtactccaattgacattaccctctgttggcgcagggggttttgttttttatataatattctttgaacgatagtttatagtcagagcccattaaagttttgcaaagaaagggcaatttcagtttttaaggcctctgagaaatcattttcataaatgatagaagaaataattttgtgcaaaagttccttattaattgcaccgctggcaacgtggatactgacattttccatttctcgtataaaacgtgaaagaataaatacgtaaccgttgtaattgaggaaagctatggaagctgcgagtgctattcgtttgtttccgtctgtaaagcaatgatactttccaaaagagtaaaaaaggtatgtaagtttgtcctctatttcgggatagtataagtcgttttttacttgctctagtattcctttcaccttgccagtgtcaagaactccagcaaaacctccaccgctgacctcaacaactttggaataaatctgaattatgtcgtcataagatagataatacatatcaatactccttcaaccttataaaaacatctctggcagcctctaattgctcttcgatagaaacacttttttcaccaatgaatttttcatattcatcgcttgaaagtgggtgtatgtactcttcaagcttttgatgaagtgcatcacgaaaagcaagatctctgcttgccattttggagcgtacatcgtatagaaatggtgcgtttctagggtgtgtatgatatttttcaaatatttgtcgtgtttctttttgtgttagctttctgcccttctcctcatatgcgattttcagttcatatgcaaggcctgattcataagatgctatcaaagttaaaacctctgaatacattgtatcccgcaacggttcatttttactgagttttaaaatttgacgatattcatcagctttttccgcaaaaatatctgtatatattttattagtaaagattccatatttgattgaccccatgtcaacatagaggtctaaagcgtcggtgaagtcttttctgaaattattttcgcgcagccatgaaataagaaaatcagaatcacgttgatttatatattttgtcttgccacccgaacgttggttcataacatcaataacgatatcaagaattgcattacggagttcttttgcgacatcgctgtctgagagcaacatgcctatgtctaaaaaagcccgaaaggtgaaaattgaaaggattgtggttttggtaccgacatttatgtcggtaccaaaagaatctttattatcgtttttaaattgaattaagtcacgaccagataatgtacgatatccgttcctcgtgagttctgttcgataatctgaaatgtaccgttcaacagtacgagtatcaacttcaaaataactagcaatcatatctttggtaaaaacgatttcgccgtcaaatgacaacgctttagggttgagttgttgctctagaatagaaagagcatatttgttatttaaaatattttgacgtgctacatctgatgtgtttaaattattcataaccacaccttcctttcttattcacttgcagcagcttttttgccttgctctgcagctttcttgtctagtttctctctatcattgtttttaagatattcctcataccgctggtcctgctctctgttcttttcaaaattgcttgaaaaaccatcagatgaattcgaataattatttatcggtgatgtattgtcattatcatctgatatgtaaatacatttgtcacagagcttttcatatcggtctttgttttcgttataaaagactgtagtgcgatttccgcaattattgcaataggcttctatattgtttttttcttcaggcattgagaactgatatatattaatgcctatagataatacaagaagtgcagcagcgacaatgagcagaattttgtatatatgattattgttatgtacagcttcctgtgtaacttcctgtttttcttcttgcacctcagcctgtataggctttatgtcagcgtattttttatgataactcatattaaaattcctttcttaacccaatgttaaatatttacaacatacaaagagtatgcaagcatagcaagaatagcagctatagatgatagtaaaacagttcttttgctacgctttgacatatcacaatcacgaacaaataagtatctacgtttttcaaaatagactatgttaagaattgcaaatatggcagagccaataaatttgtttataatgtactgctgagagtaatcataatcaatattaacaaagatagcgttagtaataagaattatcatatttattttgtaagcaagtggtttgaattttcgtaagttaatcagcagatatatattggcggttaatgaagctgctacaaacaaaaaagcacatataaatatataaaaagaatagtttacatcgtgtccaatggataaaatcatttgtatatatactacaacgtcaaagacaccccataaacatgctccggtaagggttatattcttataaaaccagaaccatctcaaaggtggtgtttttgtttctacaacttcttcatcatacttatgctttgctggtgactctattggcaccggattagtttcgacatattttctgtgataactcatatcacaccttccttcttatttcaacgacaatacctaatatgcgtatctctggttcctcaggaccgtaagggtaaaactttggcgtgtattcaggatttaaaggttgcagcataattccgtcctgctgcttaacgactttcttaagagtagcctcatatccgtttacatatacaactgcatcttggccacattcgcagtctggctgcagctttacgataacagtatcatcttctatatatttaggatacatactgttgcctttaacctttagaccaatatacctgtcgcctctgtctatccactcctgaggtacatcttcccagtcaacaatatcttctacagcttctataggaattccagcaggaacagagccgtagactttaatgcggttggattttgcgtttgagtcaggtgaaaattcggtgtcatctaataaatcaacaggggctacgtgtagtgcatctgcaagctttttcaatgtagtgcgtggtatattaacaacacgtcctttttcatatttgttgattgctgccttttgcacgccgaccaattcaccgagttgttcttgtgataaaccttttgctaatcgaaaggttcttatcttatctgctgttttcataatattttttctccttgtatcttgattataacataaacttttaaaaaaacaagaaaaaatatcttgacaagacatttgctaagtgttatattgtttgtatcttaataagatacaaaagaaaggagaagaatatgaactcacgattattaaaagggatgataaaaatgtatgacggttcacagtcagtccttgcagaagctatgggtttaagcctttcacgattgaatgcgaaaataaatgaaactggagcacagtttaatcagacagagattgcattaattcgtgaaagatataaacttacggagcagcaagtgactgatattttttttgcaaactaagtatctcaacaagatacaaacaaccaaaagagctacatatgaacaagttattttaaaggagaaaagtagaggtaagaaagatgatgaaaccaaagaaggtcaatgaattcgaggttggtgataaaatcagaacttatggctatgatggcacagtaactgaagtggtaacagaaaactgtgacgatatcgaatgtacatacctaaaaataaaattcgatgataacagtggacttacaggtacaccatatgacggcggatggtatggcggtcgtaacaacttggtattttatggtggacttgaatagtaaacattaaaaaccgtatgaaaggagatgatttctatgattggtgaacaaataaagaaaaggcgtatagaactgggattaacacagaaggaacttgcagaaaagctaggttacaaatcaaatacgactatcaacaaaatagagttaggcataaatgatataagtcagagcaaagtcatagagtttgcaaaagcactgaatacaacccctgcttacattatggggtggactgtgcgagatgaagatgtagtcaatagaacattgggcgaaataataaaagcatatcgtacagaacagggtatgagtatggatgacttttcaaaggcaagcggaataagcaaagcatatatttctgttcttgaaaagaataagcgtcccggttcgtgtaagccggtagagccttctgtgaagtgtgtgaagcaggcggcgaaagcaatgggagtggattttattgaacttatacttgccatatctgaggaatgaaaggagaaatagctatgagagcaaatgaaacatgggcgggtgcgctctactcaatgggcgataaggaaggctgcctgaaagacagaaaactgtttgtcgaaaatcttggtgagctgctgtcacagacaaaccaccgggttataggggcagaactcgatgataacgggattgttaaagttttctttgttgggggtatatacagaaaagtaaacgtgaatatggacagctatttaggcattatcaaagatgttttgaaagtgttttaggaaaggaggaacttatggacatagcttatgcaaagaagaaggctgaagctttcagaaagagagctgaaacggccgaggaaaattatcaggtatcaggtgaacagaaataccgccgggcgcagatagagtatgaactgatagcggatgctattgatgctcagatcagaaacgatgatacgctgaatgaactcgcaggactgagagcagcaatcaacagacaagctgcagaagccgaaagcctgctgcacagcaatgccactgcggaagagctgaaagtagcattgaaaaaccttgttgctacagcagctctgctgtgtcggtaccaagaaaagtattaggaaaggagaacagctatgaacgacataaaatttgaaattacggcgcacctcggagttcttacagaatatccgtcagggtggaagaaagaactcaatattgtcaaatggggtgacaggcagccggtgtttgatatcagggactgggacgaggagcatctgcgtatgtcaagaggcattactcttacagaggaagaagcaagaaagctgtacaatctgatgaacgacctgatgaacataacacctgtataaaaagaaaacccgaagcaaaagctccgggataagaactgggaggttcttaattgaacaagaattatatcacttgaattatatcacgaaagtggagaaaggaaaaggtattttatgaacagacaggagcttattaaagatatgaaagccttcagcggttccggctttataaccagacaccagctgatggagtatatgggttataaggacccgcacaagatagatcactatcttcgcgatctggagtcaattaaaaagagatattttatccctgatgtggcaacacagctgcacaatgccctgagctgatgttatgggcagggctaaaagaaactacagaaagcggcggaagatagaaagaaacactacgctgccgaaagaccggacaaagcttgttatacgcaagctcaggaaggcgaacaagagatgtgtaaatgagaaaggatatataagatatgaaaatcttaaagacaacagcaaaggcattgatcctgtcggcatttatccttgcgataggaatgctgggaaagattgatattgcagatgagattgcaacagaacagttttataacgagcttgcagcgcagacacagtatcttccctgaggcagagcctgtaaaggtcctgacaaaagaagatgtgcagacggaagcatattatgacagccttgagtatctcgcggcgtgcgtggaagcagaagccggcaatcagggttatacaggcaaaaggcttgtggcctgtgtgatattaaacagagttgaggcagaaggtttccctgacagcattgaggctgtcataaatcagagaaatcagtttgaggtggttgcctgtggcagcatatatgccgttgatattacgcaggaaacctttgaggctgtaacagcagagctggagcagagaagcaacaaagacattttatatttcagagaggggagctaccacagctttggtactccgatattaaaacataaagaccattatttcagtggcagatagaaaggaaaagtaatgcatatgataacgaaattcaaagcgggtgaccataaccagtggcttgcactgagacacgaatatcttggaggctcggatgcagctgcagcatgcggacagaacccatatgagagcccttattcattatgggcaaagaaaacaaacaagatgccggaatttgaaggcaacctgataacggaagtcggaagtttccttgaggactttgttgcaaagtattttacaaagatgtcagggcttaaagtccagaaaagcaattatacatggttcaatgacaaatacccttgggcttgcgcaaatatcgacagatttattgttggcggtaatgcaggacttgaaatcaaaactacaaacagttttgagaacgcagcaaagttcagaaagtctgaaataccagcaacatggtttttccagtgcgtacattacatgatgatcactgaaaaacacacatggtatctggcggccttatccggcagccggaacttctacatattctgcatcacgcttgatgaagatctagaacagccggaatggtgtgacagccttgtaagaattaccgaaaacgatattgcggaccttgcagatatggaaaaagagttctggagtcatgttgagaacaacacagagcctccggtagacggaagcgatgcaacaagcgaagcaataaacgctgtttatcctgacagtgacggaagcgatatagaccttggctttatatccggcagtctgatacagctttcggcactgaaagaacagattaaggagttgacacgatttaaaaatctgcaggaacagaatatcaaaacgtttatgaaaaccgctgagaagggacatcacgcaggttatacagtgacatataaggtacagggcaggacaagctttgattataaagcgctgcttaaagattttccgaatatgggctttgacaagtatatgaaaactactgagtcaagagtgctcagagtaaataaggaaggagaatagtaaaatgacaaacgcaatagcaaaggcaaaagaggcaaagcttgataagcctcagaaaacattgagagattacataaagagtatggaaggggaaatcaagaaggcgctgccgtcagtattaactcctgagagatttacacgaatgatgttatcggcagtatcaaatacgccaaagcttccggaatgtactccaaagtcattccttgctgcaatgatgagtgcagcgcagcttggccttgaaccgaacactccgctgggacaggcttatctgatacctttcaagaataaaggtgtgctggaggtgcagttccaggttggctataaaggtcttattgaccttgcatacagatccggagaggttgatattattcaggcgcaggcagtacacgaaaacgatgtatgggaatgcgaattcggaattgatccaaagcttaagcatatacctgcagatacgaacagaggcgaggtggttagatactacgcaatgttcaggacaaagaccggcggatacgggtttgaggtaatgtctgtagatgatatcaaagcacacgcccagaaatattcacagagctttaacagcagtttctcaccttggaagtcaaactttgatgctatggcgaagaaaacagtgctcaagcagtgcctgaaatatgctccgatgaaaagcgatttcgtaaaagcgattgcgagcgatgagactataaaacacgagctgtcagaggatatgtattctgtgacagatgaaacagtttatgaagatgctatagaagctgaggcagaagttatttcagaagaagttgaaacaggagaggtgaaagacggtggaaaagatgattaatatggaaaaggtgcttaatattgtgcaggtgaaacacgaaggtaatgacaaaagatatacttttgcagttccgttaggtgtggaattgaagaagggagacccagtgcttgtggcaaccagatatggtgatgttatggccaaatgtgtgacagatagcaggcttttacctaatggagtgattgatatgattatgcagggaaaaacggttacaggcaccgttttgggtaaatacgaatacaaaagttttgaccttgaaatagggttttgatgaaaaggaaggtgaaatgaatgaataactatctggcaggcaatatcaacaaaggcagctttgatgaggtaagacctataaatgcaaacagactgctgtacctgctttccggtgacagaaccgtatacagcaagagagcgattattgatttggttaacagctgtcctactctggtgactcaggttaccagagaggatcttgaaagatttgcgcagaactcaaaggtaaacgtaggaggtaagataagtgacagatagcaaaaaaggaatgattgatgtaatagagaatatgatcgcagaagaacttgaagtagcgaacaagagcttccctatgttcgcatcgtggcacgagggctatgcggtgcttaaggaagaagtggaagaggctgcagagaacatagagctcataaccgaggaaggtatgatgtatctgtggaactctatccgcatgaaagacgttgatgaagatgcaagggtagcaaatatcgaaggaataagaaaactcgctgtagaagctatacaggagcttgtgcaggttgctgcaatgtgtgacaagagcttaaagagtatggaaaaagacatacctgcagatgaggtggaggataaagagaatgaataacgtagtcatcatcggccggcttgtaagagatccagaaatacgatatacgcaaaatcagatggcggttgcgaattttacacttgcaatagataggccctttaaaaagggtgatgaaaaaaagaccgattttcccagagttactgctctgggaaagactgccgaggcctgtgaaaaatatctttttaaagggagaatggttgctgtaagaggtaggattcagacaggcagttacaagaataaaaacggcgatacagtttatacaacaggcgtgcttgccgagcaggtaaagttcatcgaatggggcgaaaaacagcctgatgatgcagataatatggcggcacttccggacggatttgaagaaataaatgacgaagatgtacctttctaaggaggtagaaaatgagcaaaggaaactggataaaactaaaccgaagcatcaggaaacatttcctttgggattttacaaaaccactgtatcttatggcgtggattgacatacttatgtcggcaaattatgcggacaaaaaggttgttgtgggcgattctgttattactgttcctagaggctcatttgttacaagtctgagaaaactcgcgacacagtggcagtgtagcaaggatacagtgaaacgtatattaaccatacttgagagcgacagtatgattacctgtaaggcagacagtaagcataccattataaccgttgaaaattacgcattgtatcaagatgttcccgacacagacaaggacactaataaggacacgcagcagacagtgacaaggacacttggcagacacttggcagacagtgacaaggacacgcagcagacagttgccggacagtcacaaggacaaaaagaagaaaataaa

SEQ ID NO: 1065 - DNA, 32759 bp, Unknown
  16S sequences of unknown bacteria
cccggcgggggcgaaacagtgcgcctgaagctctccgacggcaagggctacgagttcatcaacaagatcgtgggcggcgccattcccaaggaatatatcgggcctatcgatcagggtatccagggcgctatgcagaacggcgtgctggccggctacaatgtggtggatgtgaaggtcactctgtatgacggctcctaccacgaagtggactcttcggaaatggcctttaagatcgccgcctccatggccttcaaggaagccatgaagaaggccgatcccgtgctgatggagcccatcatgaaggtttccgtcatcgtgcccgaagagtacatgggcgatgtcatcggcgacctcaactcccgccgtggccagatccagggtatggaagcccgcagcggcgcccagcagatcgacgcctttgtgcccctgagcgagatgttcggttatgctaccgatctgcgctcccgcacacagggccgcggtcagtacaccatggaacccagccactacactgaggtgcccaagagcatccaggaaaaaatcatcgccggcaaataagtatttgcaatttatgtattgcattgccgctgtttttaagataaaatgggcttattgcagggcgattcaatatgctttttagaataccgcactattaaggaggagagttcaaatggctaaggctaaatttgaaagaacaaagccccatgtcaacatcggcaccatcggccacgttgaccacggcaagaccactaccaccgctgcgatcaccaagtacctgtccctgaagggccaggctcagttcgaagcctacgacatgatcgataaggctcccgaagagagagagcgcggcatcacaatcaacaccgctcacgttgagtatgagaccgatgcccgtcactatgcccatgtggactgcccgggccatgctgactatatcaagaacatgatcaccggtgctgctcagatggacggcgccatcctggttatcgctgcttccgacggccccatggctcagactcgtgagcacatcctgctggcccgtcaggtgggcgtgcccgctatcgtcgtgttcctgaacaaggccgaccaggtggacgatcccgagctgctggagctggttgagatggaagttcgtgagctgctgagcacttacgagttccccggcgacgaagtgcccatcatctgcggctctgccctgcaggctctggagagcacttccaccgatcccaatgctcctgagtacgagtgcatcagaaacctgctggacgctgttgacagctatatccccactcctgaccgtaaggctgatctgcccttcctgatgcctgtggaagatgtgttcaccatcaccggccgtggtactgttgctaccggtcgtgtggagcgcggcgtgctgaagatgagcgaagaagtggaaatcgtcggcctgatggacgctcccaagaagaccgttgttaccggcatcgagatgttccgcaagctgctggacttcgctgaggctggcgacaacatcggctgcctgctgcgcggcatcaacaagaccgacatcgagcgcggccaggttctggccaagcccggcaccatccatcctcacaccaagttccatggccaggtttatgttctgaccaaggaagagggtggccgtcatacccccttcttcaacaactatcgtcctcagttctatttccgtaccaccgatgttaccggcgtcatcactctgcccgaaggcactgagatgtgcatgcccggcgacaacgtggagatggatgttgagctgatcacccccatcgctatcgaagagggcctgcgtttcgctatccgtgaaggcggccgtactgtcggttccggcgttgttaccaagatcaacgagtaatttactctttgttctttcaagagccatggcttttgccatggctctttttttgtctgaaaaagcaatataaagcagaaaaaagaaatatttcgtgattgttaaaaatatgtgtaaaatatggggaaaaatgccctataagatattaaacagccattaaattgttaaataaatagcaaaatacatgaaaatatgcacaaaaataagaagagaaaattggctataaatttgcaaaattataaaaaataacaaaggaaaaagaagaaaaatattgatatattgcgccggatagttgcccattgagaggggtatggctataatagacaaggaatcggggggaagtttcccccaaagaaaacggaggacattttcgatgaaaaacaccatgaagagactgctgggcggcttgctgctgggcagcatgatggtcggtctgggagcgggctgctccaaggactccggccagtcgggcggtggcggcggcgtcacccatgataaggacaccattattgttgcaaccatggccgagactccttctgtcagcccctatgctcacaatgcttcggcgggttacatggtcaacctgctcaactacaccagcctgctgcgtctggacaacgatctgaatccccagcccgatctggcggaatctttcaccaacatcgaccccacctgctgggagttcaagctgcgccaggatgtgaagttccacgacggctccaccatggaggccgaagatgtaaaggcttccatcgagtatggtaagactttccccgacggctctctgtacaatgattccatcgaatcggtggaagtgatggatgagtacaccgtgcgcattcatacaaagagcccggatgcttctctgctgtttaacctgacccagcatgccaacgccatcgttcccaaggaactgatcgacgccggcaacgacttcaacgagaaccccatcggctgcggcccctacaagtttgtggactggaagcgcggcgatcagctggagttcaccgcttttgaagactactacctgggcgctcccaagatcaagaatgtgatctggaagatcattcctgaaggctcctcccggaccattgctctggaagccggcgaagtggacatgatcatggaagtggaaagcatggatgtggagcggatcaaggagaaccccgatctggccgttctggagtacactcccgccaacatgaactggatcatgctgaacaatgaagttcccggtctggacaatcaggatttccgtcatgctctgaactgcgccatcgataaggaaagcgttgttaccgttgctctgaacggtctgggcaccgtgggcgagactcaggttccccccaacctgccgggcaccagcactgagaacaccgacagctatgatgtggagaaggccaaggaatatgtggagaagtccggtgtggacccctctagcattgacttccccatcatctgctctgacgacaccaagaagcgtgctgctgaagttgtccaggccaacctggctgagatcggcgttaccgccaacatcgaaagcatggacctggctacctacatgagcaccgtggccgaaggcaactatgtggctgctatcggcggttacaccatggccgacaccatcacctacctcaacggcgtgtaccacagcaagtccatcaacgctgccaacaagagccgtctgaacgatcctgagatcgacgccctcatcgaccaggccacagctactgctgatgctgccgagagagaggccatcacctctgagatctgcgccaagctgaacgccatctgcacccaggtgcctctgtatcagcctctgtctttgagagcttacaacgccaacctggagaatgtggaaatcgacggcgccggtgatgtgcgcatcgaaaacttcagctggaaagagtaatcttttctcaaaaaacaaacgttaccccgtttgtaaagaaaacccccggacgatggtccgggggtttttgcatgttgaaaaagtggtaaaagccactttttcgagtttttgcaagggtctgcatgcacgccttcggcgtacactggcctcttgataagtgaaaaaagccacgcacaggtcgtggcttttttcggattggtgaagggtagggcaaatgatcctttttcgttatgtaggtttctggacagtctgaacccccggacgatggtccgggggtttttttgcaagtgttataggagaccctccagagccgaaggatgggtcccttccaatgtaagtcgcagccgttccaacttctggctccgattgccgcctccccgctggatggcgatggagtgggcgatcagattgatcaccgtaagcacaggcacgaaagaattgtacagagtgcctcgggccatgggacaatagatcaccgtatggctgaagggaacgatgggggaggccggggaatcggtaatggccactaccttggcctctttggccgctgccagctgcgtgactgctcccagttcgttcagataccgggggaaggtgagggcaaccagcgtggtgtgttcatcgatggtattcatatggccttccagtgaggtgctctcttcaggattgaccaccacggcccgcacacccaggacccccagccgataggagagcacttccgtcatggtacggctgatgccccggcccatgagcagagtgtaatcggcgctgtggatggcctgggccgccttcataatggggcgcagatccatagcatccataaaggtgtacagatgctgccgttcctgctggcagatgtgtcccagaagctggagattttgctgttgagagcgctggaaatcctgggtggaggctatattttccggagagcagaacacctcataggactggcggtattcccgccggaaatcggagtaaccggcaaagcccagcctctggaacaggcggagcagagtgacttcggtgcagcctaccttttggctcagctctttcagggggagatagcatacttcccctggatggtcgcgtatatatgtgacgatctgcttctgtttgcgggtgagcatccaatccgccgggtcgaaattctggtcgaacaaaaccgaaagatcgatcaaacccatcagcccctttctttgtgaaaagtatagcatactttccactaaaatgtatagtgcaaaataataaatttaaaaatgcactaaaaatccgtttaatacattgtataactttacaaaattgctaaaaggggctttattttttgtaaagtttatgataatctctgacataaagatatagtgttagtagataaaagcaaaggaacagaagggggcggaggcatggagcaagaccagacggaggcaaaaccgcagaagaagcgcctgggagacaacctgggccgaggagaacacagagataggagagaaggttatgctgaagaaaaaatggatgtccctgattgcgctggctttggcctctgtgatgttgctcagcgcctgcgccaaaaatggcggcaatgaccagaaagacaacaacgatgacggcggcggaaccagcaccggtggtgaagtggtgaaagacgccaatgagctggtcatcggcacctacatgccggtcaccaccctggtaccctggaagaccacttccgacggcgacggctatatcctccgtcagatctaccacacactggtggaaatggatcaggattccaactttgtaccctctttggctacagagtgggaatgcagtgaagacggcctgacctggactgtcaagatccgtgacgatgtatattggcagacgggcaacggcctgtttgacgaaaaggtcaaggtcactgcggaagatgtgaaattttcctacgagtactatctggacccggccaatggctcggtgcgttacaccgaactgtccaacactctgaaagagatcaatgtggtggatgagcagaccgttcagtttgtgacaaacgacattgatgtgctgtgggagtacaagatgtatcagaattacatcatcccccggcaggccgtggagcagaactgggattttgaaaacaagccggtgggctcgggcgcttacaaatttgtggagcatgtgatcgactcccaggtagtgctggagcgcaacgacgaattctataaagaacccgctttggataaagtgatcttcaagatcatctccgacaaatcggtttccgccatcgcattgcagaaccaggagatcgatatgtccctgtcggtgcttcccaccgaagtgggcaacatcgtaaacaaggactatctggagctgagagcctcggaagtaggttcttaccgctggatcggttttaactgtcagtatgagttcttccaggatgccgagctgcgccgggctttgaccatggcggtggatatgaacagcgctgtggaagccatcttcaaaaacgacgccggcgtcaccctggccaagcgggcttacggccccatctcctatgaacgccccggcggcaacgaggagcggttcaaggccgtgtgcatcgagtataatccggaagaagccgaaaagctgctggatgaactgggctggaagaagggttccgacggcatccgtgccaaggacggacagaagctcagctttaccctccaggtaggcaacaacgacagcaaccgtgaaaacctggctgtggtggtctcctcccagctgaaggccatcggcgtggattgcaccgcccagaccgtggagtggggcactcataccgatgatatcaagaacggcaatgtgcagatgtacatcctgggcggctattccaacctggatggcccctatcgtctgatgcataccagcgacaccatgagccccaactgcggctattccaacccggaagtggatgcgctgctggatgaagcctggcggaccatcgacatcgacgaacgcagcgaactgcagacccaggccgctgagatctttatcgccgatgctcctcatattttcggctatttcgaatacacccagatgggcgtgagcaaagcggtcaccgattttgagcaggccagcgtctatcgctccctgtgcaacgagttccgcaatgtgggcgtcaatcacaaataaagcaaacaaaccgtcagagcaaccgtgagagaaccggggcaggccctgtcaggcaccctgacagggcctgtttcgtaaagaggagaacgctatgtggacttatattctgagaagactattgcaagccattcccacactgctcatcatctctctgctcattttttctctgctctatgtcacccccggcgacccggtggacctgatcctgggcacagaagacggcaccgtctccgaagaacagagagcggtggtggaagagcagtggggattggataaaccctttttggtccgatatgtggattttgttgtgaatgcctgtaaaggcgacctgggcacctcctatgccacgaaccaggatgtgttcgacagtgtgatgacccgcatgcccgccacattgaaactggccgctttctccatgctgctggctcttgtggtttcggttccattgggcatcttggccgctctcaaacacaacagcatctgggattctttggccacggctctggccaccgtgggcgtgtccctgcccaagttctggttcggcctggtgctgatgatctttttctccctgcgtctgggctggctgccctccaccggttccgctgaactcagtgagggcctgggcaccttcctcagctacatcattatgccggctgcttctctggctttgggcatggctgctacccagacccgtatgatccgctccagcatgctggatgtactaaaccaggattatgtgcgctatgcccgcagcaaaggtttgcgggaacgggtagtcatctggggccatgcgctgaaaaatgccatgatcccggttatcaccgtcattggcggcgaagtgggcggcctgctgggcggtgctgtggtcaccgagtccatcttctcctggcccggcgtagggcggctgatgatgaactccatctccaagcgtgactatcccatgatccagggcatcaccctgatgctttgtatcagctatctgctggtcaatctgtttatcgacatcgtctatgcctgggtggatccccggattcgcctggataaaaaatcctaaggagggcctgttatgcgggataaaaagaaaaaagtcgaccctgtgcaaaagggcgcccctggggagatcggtctggaatccttgcccgtcaccacctattggaccgatgtggtacgcagattccgtaaaaacaagatcgccgtggtgggactggtgatgctgctgatcatcgtcattctctgcgccggcgctcctctctttacaaagtatgaccccattctggatatggacttgctgaatcagctaaagccccccggatcggaaggccatattctgggcaccgacaacctggggcgtgatatctggagccgtctgctgtacggcggacgcacttcggtgctcaccggtctgacggtagccctgattaccggcgtcatcggtgttgtcatcggccttgtcagcgggtattttggagggatcgtggagaccattctcatgcgcatgaccgacatcatgctgtccttccccttcctgatcatcgccattgccattatggccgcgttgggttccagccaaagaaacatcattctggccctggccattgtgggctggccccgatttgcccgtctgacccgcggccaagtgctggcggtgaagaactccgagtatgtggagtcggccaaggtggcaggcttcggcaatgcccggatcattttgaatcacattctgcccaactgcatgggccccattatcatccaggccactttggctgtgggcagcgccattttgtcggcggccagcctgacttacctgggcctgggagccgatgctgcagctcccgactggggcgtcatgctcagccagggtcggcagtatctccaatcggaagcgtatttgaccatcatccccggccttgccatttcggtgacggttttggccatgaactggatcggtgacggcctgcgggacgccttcgaccccaagatgagaaagtaggtgcaaagatgacaggcgaaaaattccttgaagtgaaaaatcttcgcacatattttgataccccggaaggcatggtcaaatcggtggacggtgtgtcattttccatcaaccgaggggaaacattggctctggtgggagaatcgggctgcggcaaaacggtgacttctttgtcccttatccggctgttggccgacaccgcccgggtccaggccgactacatggaagtggacggccagaagattctggagctgacaaaggacgaagcccgcaaactcaggggttccaagatctccatgatctttcaggagcccatgacctccctcaacccggtgtaccgcatcgagcggcagctgggcgaggtgttccggctccatgagcccaatctgaccaaggcgcaggtttttgaaaaatcggtggagattctgaaaaaggtgggcgtgcccaatccggcggaacggctgaaggtctatccccaccagttgtccggcggcctgcgtcagcgggtgatgatcgccatttctctggcctccaatccccagatgctcatcgccgacgaacctaccaccgccctggatgtgaccatccaggcccagatcatcgatctgatgaagcagctgcagaaggatctgaatatgtccattctgctcatcacccacgacttcggcgtggtgtcccagatcgctgaacgggtggcggtaatgtatgccggcaagatcgtggaagaagggccgctggagcagatcttcgaagatccctggcatccctataccaaacttctgatcctgtccatcccgggcatcaaggtgacaagaggcgggcggctggaatccatctccggcacggttcccaatcctctgcatttcccggaagggtgccggtttgcccctcgctgcccctatgccatggacatctgtcacaagcaggccccggaagagctggtggtaggaaaacggagagtgagctgttttttgaagcggggtgaaaatacgaatgaataatcaaaattccattttgaaaatagatgatctgcaagtgcactttcccatcaaagccggtctgatgcagcggaccgtgggcgtggtgcgggcggtggacggcgtcagtctggacatcaacaagggcgagacggtgggccttgtgggtgagtccggatgcggcaagaccaccatcggccgggccattgtgcggctgaaccagcccaccggcggcagcatcgtctttgaccaaaaggacgacatcctgaagctgaaaggcagcgagctgcggcagctgcggaaaaagctccagatcatcttccaggacccctattcttctctcaacccccggcagacggtgaaacggctcatcagcgaagtgctgacggtgcagatgggcatgagccagaaggaagcctttgataaaacggcagagctgctcacggctgtgggcctgagcccggtgtatgcccagcggtatccccacgaattttccggcggccagcgtcagcgcgtggccattgccaaagccattgctttgcagccggagttcctggtgtgcgacgaagcggtatcggctctggatgtgtccatccagtcccagatcatcaatctgctgatggatctgaaggaaaactacggcaacatgacctatctcttcatttcccacgccctcaatgtggtggaacacatttccgatcgggtggtggtgatgtacctgggcaagatcatggagacggccaccacagaagagctgttcgatcatccccagcatccctatacccaggctttgctttcggccattcccattttgtccggccggaagaaaagagagcggatcgtcctcaaaggcgaggtgccttcggcggccaatgtgccccctggatgccggttccacacccgctgcccctatgcggaagagcggtgcagccaggaggagcctcagctgcgggaagtggcccctgggcatcaggtggcctgccataaaatataaagactgtgatattgaaagagggcgatctgctgagatcgccctctttttgcaaagtgcagacaaaagatggaaaagatgataaaataaccaggaggaaaaagggaaattgataaaggtgggggaaatatgaattcattggacaaggcgagaaaagcatctcaggtcatacgggaaaaattattggaacatgggggacaagcaactgtaaattcggtacagggaaaagcttatgtgattcgagatgcaggggatgggaaatcgtttctttgccgccagcttccggttacgccgccgtatcgttatgaagtatttgatgttgtggtacagcggctgcaagaaagtggaggaaaagcacggaagggaaatgggcggaattatcgtctgggacaaggcagatgtacggaggacaccattgtgggggcaataggaaagtattattggggaaagcaggagggagattcggtattcgatccggtttttgttcttgctgcggtgcttgagtgggcggatatcacttataatggccggggctatctggaactaatgggagattcagaacaatgggattaaaatatggatgttccctgagtatttgaggaaaagggagaagaatgtgtgcagaaaattgaaatataaaaaaggggcacagaaacaaaagtctctgtgccccttgaggatatgcaatgccggagggcagcatatcagttttgctgctccttgtattttcgtttggtagccatgccgccgcgaatatggcgttcggccttgttttcctccaaaacggctttgacctgctcataaagctgatggtttgtcagccgaagccgctcggtaacatccttatgtacggtagacttggaaatgccgaaccgctgagcggcctggcgtacggtggcattgttatgcacgatatatcgggccagctcggcacaccgttcctcgggtagacctttcaccctctttgccctccctctcttttcgtctttacctcattctatgcaggcaggatggggtttcattcttttctttgaaagggagcacagggatggtctttgactttttccgggtgtatactaagtcttaggagggatttggatgaagattgttttattgctcttttctcagtttgaaactttggatgcctttggcccggcggaagtgctgggccggcttcccggctgtcagatcgtgtgtgccagtgtccaaggagggatttgccgcagcgcccagggagtgccggtgatgacggtgcccctcagcgaagcggaaggagaggtgctgcttcttcccggaggtatgggtacccggcccttggccgaagatcagaacttcctggatatcctggcccggcagggagcaaaggcgcaatactgtttgtcggtgtgcaccggttcggctttgctggcccgctgcggcctgctagacggcagacgggccacctccaacaaaaaatcctttgcctgggtaaaaaagcaaggggagaatgtgtgttggcagcctgcggcccgctgggtggaggatgggaagttctttacctcttccggtatttccgcagggatggatatggcgttggggtttgtggcccagctctatggacggcagcaggctctggccattgcaaaggatatggaatacctgtggaatgaagacccccatcgggatccctttgccaaaagagaatgaaaaaagagacggcggaaagccgtctcttttgatgtttgaggggtttattccacaatagtgaccagctgtgccgcctggacccagtccacatcggcactgaaggcttcggcaatggcacgcaccggcaccatggtccggtcgttcatgatcttggcgggcacatccagggcgatggcctggccgtttttatacagaatgttctgaccgatggtcagccggatgtccaccccattgcgggaagcgatgacggtgcgggtggcgttgtcccattccaccgtggcgcccatggcttcgaagatggagcggaggggaaccagggtgcggttgttgtccagcaccgggttctggccgtatgcgccgaaggagatgcgcttgccctggtagatcacctggatgcgggaatccaccgaggggtcgatcttatagctgacattgaaggtctggcagtccttttccgctttggagccggcagcgcaatagaccaggcagtttttggaggtggtggaggcgctgaaatcggcagtggagggcacgctgatctcctggatgctgtccgagttgacgccgaagcaatcggtgacgccataggggatgatcagggaagtgatgccggtgtggtcaaaggccgcctccgacagggtagtgagagaagtgggcagatagacgcttttcagagccgtgcagtattcaaaagcgtagcgattgatgctcttcaggccgtaggacaaagtgaccgactgaaggtttttgcagttttcaaaagcaaggttgccgatggtggtcacgctgggaggaatggtgatctcccgaagggctgtattccggaaggcgttggtgttcagcagttttaccttggaagggatctccaccgactggagagccacgcaatcctggaagcagtccatggggatctccgttagattggcggacagatggatcgactgaaggtttttacattgccggaaagcgccgatgctcagtgtggtgacgctgtccggcatggtgacgctggtcaggccggatgcccggaagccttcgtagccgatctccgtcaggccgctgggcagattgatgctgcggagattgggggtatcgtaaaaggcttcgtcatcgatcagccggatggtggagggcagggtgacgctttggagggtatcgttcatgcggaaggatttctggccgatgacggtgacagggacgccgcccagggtgtcgggcaccaccacattgccgccggcgcctacatattcggtgattttggcttcgttaccgctgagggtgtactcaaaatctccctcttttagggcaaaggccgacaggcaggtgagggccagcaaggcgcccagcaccaaggcaaagcggaaacaatgtcttgcttttttcatagtgatccttctttcctgttaaaaattagggaatttctctgtttttattatattcttttgggtaggggtctgcaagtgcaaaacaggaaaaaagaggatcttataagattgtagtgtggggttcctggattgaacagtttccgtgattgattagaataaaaggatgaaaaaggatagaaagacctcttgcaaaaggcggccgcttggtgcatgatagagacgagaggtcagacaccatggaccagcaagagaaaggatgaaggtgcaatggaagaaaaatggacacagaccgcaaaggaactggaagatgcgctttgggagatgagccgcaccatccatcagaatccggagttgggatttgaggagcacaaggcccagagcctgtgtgccgatctgttggaaaaagagggattttcggtggaaaaggggacaggaggcgttgaaaccgccttcaaggcccggttccccttgggcaacggccaaggtccccgggtggcctttctggcggagtatgactgccttcccggcctgggtcatgcctgcggccacaacctgatcgccggggcggcagtaggggccggtatcctgctgcgccgcctggccggggatgtaaacggagaagtggtggtcatgggtaccccagcggaagaagggggcggcggcaaggtcatcatgctggaaaatggggcctttgacgatgtgggctatgccatcatgatgcacccttccaccgagaacctggtgggccggggcggacgggccacagtgaagttcgacatcgctttccacggcaaaggctgtcactccgccggcccggaaaagggaatcaacgcgctgaatgccctgatcctgcttttcaacgccattgacaatctgcggccgctgctgcccaccgacaccaatatcaacggcgttattctggatggtggcaaggcctgcaatgtgatccccgactatgcccatgcccagttcagcgtccgggtgcgcacccaggcggaaggggaagtggtgatggagcatctgcgccgggtgatccagggtgtggagcagcttaccggcgcccgggcggagtatgtgctggagccggggtatgccgagcggtatcccaatgaccacatcgagcgggagatccagaagaccctggaagagctgggagaagaggtggaacgggcgccgctgatggggcgttacggttcttcggatatcggcaatgtgacgctgaaaatgccggcagtgcacacctatttcaaaattgctcccaaaggtgtggccagccatacaccggagtttgagaaggcatccaataccccctatgcctatgagcagatgatgaaggccgctctggcgatggcccgggccgcaagccgcatcctgtccgatgaagagttccgcagccaggtggatgaggaatttgcccagcagaaaaaggcccgggaagaagcaaagaaacaggcgtaaatcccctgaaaacagaaaaaggcccccgcttcatggaaatctttccatgaagcgggggctttgagcgtgtcgaaaaagtggcgaaagccactttttcgaatttttgcaagggtctgcatgcagccgattggccgctttcagcagtcaatcggccacactggccccttgaaaggtgcaaaaaccggcgcacaggtcgccggtttttgcaaattggttcaaaatggggcagagacttttcagtcttgcgtttttttccacagtctgaggttttctttttacagaggttcgttgtcctcttcctcttcttcggactgggcgtcttcttcctcgtcttcgtcctcaggacggacaaagtcatcttcgtccaggtcttccgagggctgcacggccccggcggcggggtggacggggatcacataatcctccggatcgggctcttccatgggaggcacagagtggcccggctcctgacggatcatttcgttcagctcgtcattctgacagcggatcatctgccagagcttggccccggccagggccaggccggcggaagcggcggcaaacaaagcgaatttggttttctttttcataaccgttcctcctcggtcagcaaggtaaaattatcacatcagcggggcgaacatccgcagaagagcccggcccgtcttgatataccagggcgcccggcggcagtcggccagagagatgatctggcaccggcgcagagtcttggtaaaatcatcccgcacatcttccactgtgtcggtgccatagagaagcacaccgcattcaaagtggaggtacaggctgcggtaatccatgttgatggtgcccaccacacaccaccggtcatccaccacaatggttttggcatggttgaaaccgggggtgtattcatagatccgcaccccggcctgaagcagcgtggtatagttggcccgggtgacggcgtggacataccatttgtccggaatatggggggtgatgatgcgcacatccacgccccgcttggccgccgccgtcagggcggtgaccgtttcgttgtcgatgatcagatagggggtgttgatatagagataccggttggcgctgttgatcaggtggagatagacggtctccgataccggctccccatccagagggttgtcggcaaagggctggacgatgccgccggagtggacttcgggaaagacggggaaaaaggacatgatgtcctccttgctgccccgcaggtaattccacatggaaaggaagatcaccgtcaggttccaggccccggggccttggatcagaatggcgttgtctttccagtggccgtattttttccgggcgttgatgtattcgtccgccaggttgatgccgccggtgaaggcggtgtggccgtccaccactaaaatcttccggtgatcccggtggttgaaatgggaattgagcaccggcaggaagggattgaacacacagcagcggatgcccatctgctccagagtgagatcgtaccggtaaggcagggtcatcacacagcccagatcgtcatagatcatgcgcacatccaccccttgggccgccttttgccgcagaatctccagaatctcgccccacatttttccgtcttccacaatgaaatactccaggaagatatagtgctgggcttttcgcagctgggccttcatgttttcaaaggccagttcgcccagggcgaaatatttggtgtgggtgttttcacacggaggacagtaggcgtatttctgcacatagcgcatcagtccggcggcggagggggcccgggtcttgacccgctgaatcaaggggtcgttgttccgcaggctgttggccatctgcctttgtaccgactgcatcttctgccgactccaccggcccatgtggttgccgcccagcagcaggtaaaacagcccgccgaacaccgggaaaagcaaaatgggcacgatccaggcgattttgtacgccgggttgctctggccgttgacgatgatgagcaccacgatcagactgatgaccagggacagggcatagaaatagacgaaatagctgccaaaagataaaatcacaatggccaggaataccgcctggaccagaatggatacgcccaccagggttacccgcatggtgagcagcttcagcagctttttcagcaggttttttaagataacgccccacctcctttggcggcctgacgctttttctcgaaaaaaggtcgaatgtatcataacacaccgggggaggggaaaaagcaatagattgtaaattctccctcccccaagggttggttactggcagagtttctggagaaccgccttgagcaggtcataggtgcgggcaaaggaatccagctccatatgctcttcgggagaatgggctccttcgctgttgcagctcatggtcaccatatccacgccgggcattctcttttggaagatgccgcattccaggccgccgtgggtggccaccacttttccctcttttccggtgagggccttgtagcagtccagcacggtctggcggatgggggagttcttttcgatctcccaggattcgtagtcgtcgtgatggcgcaccgacgcccccagaagctggcccagaatgtccagacgggcggccatatcctgacggtaggcgtcgttgctgctgcgcatggagacgatgcacttgcattccttttctccggtgtgcacgctggcaaaattctccgaagccaccacccggtcattcatggtcagatcccgcagctgaggaccgcagggcagcatcaccatcaggcgcatcagctgacggctctgctggagggaagcggcctgatatgttccggccggttctgccgtgatttccacccggaaatccttatcggccggcatcagctgagaacggatttcttcttcggtctgcttgaccagagcctgggccccatccagcttgtcctggggcacaagcagcacagcatcgcattcccggggaatggcgttgtccttgtcaccgccctggcaggactggacccggcactccatttcttccatcagacggcggaaaatccgacccatgagcacattggcattgcccagacccatgtggatcagtccgccggaatggccgccggacagaccgcggatggccagacggagcagagcaccatttccctcttccatggtcaggggcagggtgaagtcggtgacctggccgccggcgctgccgcagcagaacacaccttccgggccgcagtccagattgatgagacggcgggcatggagacggctgtaatccaggttgtgagcgccgatgagccccacttcttccgaagcggtgaagacgcattccaaaggaggatgcaccagggtgcggtcttgcaggatggacatcatccacgcaacggccacgccgttgtcagcgcccagggtggtgcctttggcccgcaggatattgccttccaccaccaactggatgggatctttcaaaaagtcatggtccacatcccggttcttttcgcacaccatgtcggtgtggccctgaagcatcaggggaggcaggttttcacagccctgagagccgggctttgtgatgcacacattgaagtgttcgtcccgccaggcttccagtccctgctccttggcaaagtccagcaggtactggctgatggcttcctcatttcccgagccacgggggatgcggctgatctcctcaaaataccggagcgccattttgggctcccggccttccagcagatattccatggtatttcctcctctgttttgtgttaaaccaaagggacaggcccttttttccattatataaaaaaaaacctttcttgtccacgctttcccctcttgacaaaagggagaagttcgcataaaatatgaactgtactaacacacataatacagataacacaccttgggaaaggagggtacggattgatcaccatagattataaagaccggcggcccatctatgagcagattgtcagcagcatagaagacctggcggtacgaggggtgctggagccggacagtcagctgccatcggtgcggcagctggcggtggagctttccatcaaccccaacaccatccagcgggcctattcccagctggaaaagaccggggtgatctattcggtcaaaggcaaggggaattttgtggcggccgatcccaaacggctgcgggaggaaaaaatggaacagatcttgcaggagatggagaagctgctgcgtcaggctctggccctgggcgtcggacgggagcgaatggaaaactggctgcacagcctgctggagaaggaagaaggagggaacaaggcatgataacggctaccgatgtaaccaagcgtttcggcaatatcctggcggtggacgccgtgacggccgagatccgggaaggcagcgtttttgggctgatcggctccaacggcgccggaaaatccacctttttgcgtatggtcgcaggtattctccggccggacagcggcagtctgatggccgatggcatggagatctatgaaaacccccaggtgaaggggcgggtcttctacatttctgacgaacagtacttttattcaaacgccacccctcgggagctgcgggatttttacgccagcatctatccgggctttgacaaaggccggttccagactttgatgaagggcttcgaccttcagatggagcggaagatcaacaccttttccaagggcatgaaaaagcaggtatctgtgatctgcggcatttgttccggggcggactatcttctgtgcgacgagacctttgatggactggaccctgtggcccggcaggcggtgaagagccttctggccggagaggtggccgagcggaatatgaccccggtgatcgcttcccacaatctgcgggagctggaggatatctgcgatcatgtagggcttctgcaccggggcggcattttgttcagccgggatctggaggatatgaaattgggtatccacaagcttcagtgcgtgttccaggagccggtggagcggggggactttgcgcccctggaagtgatgagctttgacaagcggggcagcctttttaccattacggcccgctcgtcccgggaggaactggaggagaaagtccagtccatgggcccggtgttttacgaagtgctccccctgtctttggaggagatctttatcagcgaaacggaggtgcagggctatgacatcaaaaagcttctgttctaaagaagagtcccggctgctgcggatgatgacaaaggaaaaaatgcgccgcagcctgtgggccatcagcctgtgtaccctggccttcttcttcatgctcacagtacccaccatcatgggaatacagcaggggctggagcggcggaagctagacccccaggccatggaatccatctattccatgctgagtaccatcgtgggccggcacaatgtgtttgtcaccctggccaccgtggccatggccgtgcttttggcggccgtcagtttccgctatatgcacaacaaaaagcaggtggacttttaccatagccttccccttcgccgtccctggctctttttgtccaatttcctggcggggctgtttgggttcctgtttgcctatctgctcaacctggtgctgtctctgggcatcatcttctgttccggcttcggtaaggcgctgagcggaccgcaggtgctgggaaccatggcgctgcacctggtgtttttcctggcggtttatgccctttccattgcagcccaccagctggcgggcaccacggccaccggacttctttgcaacgggtttttgctggcactgtttccggcagccctggggctgaccatcgtctatggtcagctgctgtaccgccattggtatctgcccgatgagatcttcaaccgcctgggacagtggctttcccctttgtggagctactttaccatgtccttttcctacaatgatcccatccgggcgggaatggtactttattggcttctgtgggcactggtgctggcaggcctggggatgttcctctatacccgccgtccttcggagagtgcgggaaaagccgtggcgtttgctcgtccggccgccgtgctcaaatatatcgccgtgattctgtgcaccctggccggaggcgtgctcttccgtgtgatcggtgtgggcctgggctggcagatcttcggctttttctgcggcgggattatttcccactgtgtgctggaggtcatctacaacctggacttcaaaaagatcttctgccacatcaagggtctgggaatctgcggggtgtgctttgccgccttgtatactggctgccatatggatctttttggatatgacaagttcctgcccacggcggatcaggtgaaggctgtgagcctgatgagcaatgagaatgaggattatgtgctgagcgtggatgaaacccagctggacactctgtaccggcagacctaccgccagccggagaatatccaggccgctttggagctgtgtgcctccgccattgaaccggcctcagaggaaagcggctgggatggagcccgaatctgggtctgctatcagatgaacagcggccggaaggcctaccgcagctactttgtctcctcccgggaggcgtttttggaacaatgggccgtcctttatgacagccgggagtataaagaaaattactatcccatcttccaggtggaggacaatgaactgcaaagcgtaggctgctggcagggcgaaggggattacaccggctttgtgcggaagcaggagcaggcggctgcgctggccgaggttctgcgggaagagactttgaatctcactgtggagcagctgaagcatcaggcgccggtggcgatcctggaatggggggacgatcccgattacggaaaagaaggcaattacagccacatggtcacccagatgccggtgtacccctccatggaaaagacgctggcccttatggaagagtacggcatctatcagccgggggccgtgctgaatctggatgaggtccagggcgtatggctgtggagctgggataaggaaggcgctcatactttggatctggaagaggacatcgacatcgcgaatgtccaggacagcggcgatggggatgtgtatgtcaccgataaagagcagatcgctcggatgctggaaaaggcagtcctcaccgagctggccgacaagaacccctattttgaagaagattctgtgcgggcccggtttgttttggatgaaaacatgggttacagtgtggactgtgtgttccccgcaggagagtttcctcttcaaaagaagtaaataaggctgaaaacacaaaaaacgcaggcatttgcctgcgtttttttctgtcttgtctatttatttgatgccagccaaacgaaggatcacatggccggcgatcatcagcccggccaccgaggggacaaaggacaggctgccgggggtctggcggcggcccggcggaggagcctctccgccggagaggggagtcaggggcttttcatcggaccagagcacctccagatggaagatgccccgggctttcagttccctacgcatcacccgggccagagggcataccgaagtctcgctgatatccccgatgcggaagcgggaggggtccagcttgttccccgtgcccatggaggcgatgaggggaaccccggcccgctgggcctcctcggccagaagcagcttggaactcaccgtgtcgatggcgtccacaatgtaatcatattcgctcagttggacttgatcccgggtctccggtccataaaacagacacagggcttccacctggcactgagggttgatgtcctggatgcggcgggccattacctgggcctttttctggcccagagtgctatgaagagctgccagttgacggttacagttgctcagggccacttcgtccgggtctatgagggtgatgcgccccactccggcccgggccagggcctcggccacataagagcctacgcctcctacgccaaagagcaaaacggcggattgttccagttttttctgggattcctcccccagcagaagcatctggcgggaaaagggaagatcggtcataacaaaagccctcccgggtatttttttttttatgataccccattttcggggaaaaaggcaaggtttcagactgccgaaaaacggaccagcctggagggggcgtttgccctacccttcatcaatctgcaaaactcgaaaaagtggcttttaccactttttcgaaaggcttgcttattgggccggttcccactccttggcccggcggaggaaggtctggtaggaaatgcccagggagagggcggcctggcgggaggaaatgcctccttgacgccacagatcggccaaggcaggaaaattttccggcagttccatccgctgagggccgaagtggacgccccgggattgggcggcaaaaatcccttcccgctggcgtttgcgggtgttttcccgctcggtctgggccacataagaaaggagctgcaaaacgatatcggcaatgaggatgcctgtcaggtccttgccccggcgggtgtccagaaggggcatgtccagcactaccacagcggcctccttgcttttggtgattttccgccactggtccaggatctgggaatagttccgccccaggcggtcgatgctggtcaccaccagggtgtcctcggctttcagcttgcggatgagtttctgataaagagggcgggcgaaatcctttcccgattgtttttccaccacaatattcttttgttccacaccgaagtccagcagagccttgatctgccgggcttcgttttgttctctggtggaaacccgggcatagccatagatctttccgttcataatgagagcctcctataaaaagatagttggttccattttagcgaggcccgaaataaaaaagcctgcccatttggcaggttttgcaaagggaccgttacatattgtatagtttttgtaacgaaaaaaattttttgaaaaaagacttaatttcccttttggggtgccgataaacatagtgtacggaaaaagaagaacatgaggataggctgttacaagttgcatacaacctgtaacagatagcgccaaggagggcttttttatgctgacactgggtctccgttcgggagaatacatcgtcattggggataacatcgtcatcaaggcggtgcagctggaaaaccaggtgcagctggccattgaggcccctcgggatatggctattctgcgggaagcggtgtatgaacagacccatcccacaccggagtgcattgtccgcctgcaggagcgggatcggaaaaagcgctccaaagccaaagcagccgctcaggccgaataattttgatttcttccattccgccgtccggtaccaacggcgggatggctgaaataaattgtgcggggggaaggatacccccggttaacacaccaataggaggaaaaaattatgcgcattcaacacaacatcatggcgatgaacgcctaccggaattattccaacaacaccagcgctctgagtaagaacctggaaaagctgtcttccggctacaagatcaaccgggccggtgacgacgctgccggtctggccatttctgagaagatgcgtgcccagatcaccggtctggatgtggctcagaagaacgccaaggacggcatttctctggtgcagaccgctgaaggcgctctgaccgaagtccatgatatgctcaaccgtatggtggagctggccgaccagtccgccaacggcacttatgacggcaccgaccgtgttcagctgcagaaggaagttaccgagctgaagaaggagatcaaccgcatcgccgattccgccaacttcaacggcatcaacctgctggacggttccatggctggcggcggcaatgtatccggcgtgggcatttccgatgtggctgctacggctggcgtcactaagacaagcgattttgcacagctttctggtatggaagatggcgacaagctgtcctacaccgtggcctggaaggatggcagcggtcaggaattctctgccacggtggagttgacctacgataaggcgaataaaaagttagtggctgcggatggtagcacatacggtgtggccgatactgacggtaaggcaactattcaggaacagcaggatgctatcctggctgagctgaagaagaacggcaacttcaactccacctttacagtgagcacggatactaatgctctgaagtttaccagcaatacagcgggtaccgctggtggccagatcacagcggtcagcctgaaacagacagctgccgacgatggaactgtaacagccattactaatggtggttccgtaggttcggttacagctgctactgatgccatgcagaagctggatctgagcaagctgactgttattgacgcaaagggcactactgttcccacagctgcagatcttgaaaaggctacctttgaaatcaatggcaagaaattcattctcgcaaagggaacttctgatctgaagaacctgaaaaatctgggttcggatgtgaatgtgattgagttggctggcgatgcctatgatgctggtgatgatggtgccaatgttgctactgaactgtctcgtgtcaccggtatggatttcagtgtgagcggcaatgatgtcgtttacaagggcgacaccaagctgtccactggtgagggcggtctgaccctgcagatcggcgacacttccgacagcttcaaccagctgaatgtcaccatcaaggatatgcacaccgcttccatgggcatcgacgccatcgatatctccgatcagaagggcgcccaggctgctgtggatgtgatcaaggaagccatcaactatgtgtccgatgtgcgcggtaccctgggcgctacccagaaccgtttggatcacaccatcaacaacctgagcgtcatggaagagaacatccaggacgccgagtccaccatccgcgacaccgatgtggccgacgagatgatggcttacaccaagaacaacatcctgatccagtccgctcaggctatgctggctcaggccaaccaggttcctcagggcgtgctgcagctgctgcagtaattccttctggaatacctcaggtaattacaccacaatggaaaggccggttcctcaggagccggccttttctctgaaatcatataaaggagcatcttcatggaacccatcccagtgaaaatccgactgtatcccgcctattatcccaagttccgctgcattgcccaggactgccggaacgattgctgccatgattggaacatctttttcagcaaaaaggattatctgaaaatcaaacgggcggaaaaatctcctcagctggagcagctgacagcccaggccatgggacgcattcccgatggggagcgcaccgaagaccgatatggggaattccatacccattcaggagcttgtcctttccaaaatgaggaggggctgtgccgtcttcagttggagctgggagaaggcgccttgcccaatgtctgccgcacattccctcgattgcacagatttacccccatgggacggcaggaggccctttccaccggctgtgaagcggtggtgcagcttttgtgggatgcgccggaagggctggattttgtggaagatcctctggaaaagcagcagtggaagggattgcagctgggagagaaatgggaccaatatcccattttccattcggcggtcatcgatattctccaggcccggcagttttccatcccccgccgcctgctgatcctgggtctgatgctggaaaaggctgcaaaggaatgggacaacctggatgccgcccgctggcagagtcaagtggaactgctgctgggagaccccttgctcacagagtcgttggaacagctgcccggcaatcagaaggcttttctggcggaaaatatgcgcaccgccgctctgatcgccgcaggagagggaagctttctgctcaagactttggagcaaagcggtgcattcttcaatagtggcacagacgcagcgccccatgtgcttttccaggaaaccttctttgaagaagcgtcccaggctttccgggaaacctttggtgatatcgattatttctttgaaaatctgctggtgaataccgcttttctcacggccgtgccatctttgaccgacccggagcagctttggaaaagctatgtgaccctttgcggtacttacagctttttccgcttcctcaccattttgtgctgcggcaaggaacctaccaaagaaaagctcttccagggtgtggtgctggccagccgagctttgcttcataacaaagaccgccaggctcggctgcgggatcaattcttccagacaggcagccagaccttggctcatatggccgtgctggtgaaagaataacagaatataaaaaagcgccccaaagggcgcttttttgctgttttttacagggactggaggatggtctgatagatcttctgagacagtgcctctccttcttccaccatcttctggccccgggctttgtaatcctccgccatggcggcgtctttcaaagaacccaggttgatgcacacattcagccaggcccccttcatggcgcagcccaggttgagggcggccacgcccagatcgctggcggcgttctggttgaatttgccttccatcctgtccaccaggtgcaaaacctgaaggcacagctccatggtttcaaagggaaccttggtggattccaccatgccctcggcgatcttctggctccgggcggctttttcctccggggtttccttgggcatcttgaaggcggcggaaaccaggttgaacgcgtcggtgtccttgtcgatggacaggatcagcttttcatacagagcctgggcctggggaatgatctcggccatcagctcgtcaaactcggcgtatttcttcttgccctgggtcaggcggcacaccatggcgcacagcgcagccccgttggccccgcacagggcgctgacactgccgccgccaggggcgggagcatcggaacccagcacatccacaaaatccttgatggtcagttcagccagtttcataaggcgttatcctttctcatgggccacccggccctttttgatgacggtgcggcacagattggagccgaaccggtagaggatcatatccagatcgggggcgttccagattaccaggtcgccctgtttgcccgcttccacggtgcccactttgtctcccattcccaccgaacaggcggcgttgagggtgacggcgcacagaacctcttccggcttcagcttgtagcgcagcagccccagattcatagcaaaaggcaggttgagagaagggcaggagccggggttgaagtccgaggcgatgaccaccgggatgcccagttccaccatgcgccgggccggcgcaaaggtcttgtccagatagaaggaggtggcggggagcagatcggcgatgaccccgcccttggccatggcctgcatcccctcttcgttggaggcgatcaggtgctcggcggaaagggcgcccacttcggcgctcagctgggcgccgccgatggcgtcgatctcgtcggcatggatgcggggcacaaggcccagggccttgcccgccatgagtaccttccgggattgcgccacatcaaaggctccggtctcgcagaacacatcgcagcaccgggccagcttttcttctgccacggcaggaaggattttttccaccagcagagccacataaccgtcgggatcttctttgtattcctccggcacggcatgggcgcccaggaaggtggcgtcgatgtccatgggatgggtctcctggagctttttgatcacccgcagctgtttcagctcgttttccaggtccaggccgtaaccgcttttgatctcgcaggaggtgacgcccatggagagcatttcattcagaaagccctcagaacgccggagaagctcttcttcgctggcctctctggtgtgacgcaccgtgcttaggatgccgccgcccatgcgcaggatatccagatacccggcccccgccagcttgagcggaatctcatgctgccgccagcccccaaagaccaggtgggtgtgggcatcgatcaggccgggagtgaccaggtttcctccggcgtcgatcacctgggcgccctgggccttttccatggggaaatcagcctggcttccggcataggtgatgatgccgtcttccatcagcacgcaagcctctgggatcttctccatctgcccctgcatttcaccggcatggacagaggagccctggggcgtgcacaaaaggccaatattctgtaccagtgttttttccatagaaaatcacccttagaggatgtggttttccagcacctgcttggaaaagtcgaagtcctcgatctgcatatagtattcggcggagtcgatgagggctttcatgggggtcagaccgatgatctcggtgcccaccacatggacgccccaacgggcggcctcagccttgaccagctccagcacacgatagaggggggtgcggttgaagtcggtcatgttgatggagacctgggcgatattccggtcctccaacatgacgcccagggccttgacgcagtcaaagccgccggagctgcggcggatgatcttgccgatcttgctggcgatgcttacatcggaagtgctcaggttgatgttgaaggccaccagaggcatccgggcgcccacggccaccacacctgcggtgggatggatcttacggccgccgaaatcgggctcccactcttcctgctgcaccttttccgccatgccttcaaactggcccttgcggatcttggccaggttgacacggtggggagcgctggcagaatcctcatagaggaacaccggcagaccgaagctgtcggagatcttctggcccacttccttgctgatggcgatggcttcttcctttgtcacatccttgatgggaatgaaggggatgacatccacagcgcccatgcggggatgttcgccttcgtgcttggtcaggtcgatcagctccactgctttgccggcaaggtcgatggcgcactgggccacggcggagggctcgcccaggaaggtgatgacggtgcggttatggctggggtcggaggaatagtccagcagggctacgccgggggtgttgcgcaccacatccacaactgcttcgatcacttcggtgcggcggccttcgctgatattggggacgcattccaaaattttagccatggtgattgttctcctttttctatatgtctctgaaatggtggcagaccggggtttggggcggaaactttccgccccaaaccagggaaagatgattacttgctttctttgatgacccgctccacaagggcttcatcggccacatagggcagggtgatatggccctttccggcgtagtttttgttgtattccacgctggtggacacagagttttcgtttctggcccagctgcggcgggcgacaccgcccatgacatcccacatcagggaagagcggatgatctcgtccacacgctcgctgccgtccagcaccaggccgaagccgccgttgatggctttgccgatgcccacgccgccgccgttgtgcagggcgcacaggctcatgccacgggctgcgttgccggcgaagcactgcaccgccatatcggccatcacattgctgccgtccttgatgttggaggtctcacggaagggggagtcggtgccggacacatcgtggtgatcccggcccatcatcacagggccgatcttgccttcccgcaccatctcgttgaagcgcagggcgatcttcacacggccctcggcatcctggtacaggatacgggcctgggtgccaaccaccagcttgttcttcttggcatcccgcacccatacccagttgtcacggtcctgataccggcggtcgggatcgatgcagtccatggccgcctggtcggtggcgtccagatcttccggcttgccgctgaggcacacccagcggaagggaccatagccaaagtcaaagagcagggggcccatgatgtcttccacataggaggggaagatgaagccgtctttttcgtcgatgccgtttttggagatctccttgacgccgctgtcatagaccgccttcatgaaggagttgccgtaatcgaagaaataggtgcccttattcaccagagccttgatggcttcaaaatgacggcgcagagtggcgtcgatcatcttgtggaagttttcacggtcgttgtggagcatatgggtgcgctcctcaaaggtaatacccaccgggcaatagccaccgtcataggcgttgtggcaggaggtctggtcggaaagcaggtcgatgtggatgtcctttgccaggcagtactccagcagatccacgatgttgccatggtaggcgatggagatgggctctttcttctccatgtactccttggcccactggaacacctgatctagattgtcgctgaccaggctgacccagccctgatcgtggcgggtcttgatgcggctttcgtccacttcggcgaacacgcccacggccccggcgatttccgccgccttgggctgagcgccgctcatgccgcccaggccggaggagacaaagagcctaccggccaggttgccctcagcggggatgcctaggaatttccgcccggcgttgaggatggtgttgaaggtgccgtggacgatgccctggggcccgatgtacatccagccgccggcggtcatctggccgtagttggcaacgcccatctcttcggcgatctcccaatcgtcgatgttgtcaaacatacccaccatcagagcattggtgaggatgacccggggagcgtccttcttggaggggaacaggcccaccggatggcccgattcgatgaccagggtctggtcgtcccgcagctcttccaggtattttttgatcagccggtactggagccagttctggcagacgctgccggtctcgccataggttaccagctcatagggatagagggccacttcgaaatccaggttgttgtcgatcatcacctggaaggccttgccctcgatgcagttgcccttgtactggtcgatcggcttgccgtggatttccccctgcgggcggaagcggtagccgtagatgcggccgtgctcctccagctcctgcgcgaactccttggccatctgtttgtggtggtcggggtggatgtagcgcagggcgtttttgatggcgagctccttatcggcctgggtgaggtgggattcgcggtgcggcgcacggcggatgccctcgacgaaggtcgggtattcgggaagctcatagtccagtttaatcatcattgcttcttccggtttgtagtccataaggtttacctcctgttttattttttctattgaaaatgggttttggtttacat

SEQ ID NO: 1066 - DNA, 24927 bp, Unknown
  16S sequences of unknown bacteria
tgttcggcaccacatccctttttggggtcaatatgggtttctgggcaggtatggcctctgttctgctgattgtgattctgatgaatgtggtgttctggagcataaagccataaaatccgggtcagatgcgatagctgctgccctgaatcctaccctgacttcccgcttatggagccggaaaagccggggagaacaaaaagagcggactgacgaaagtcagtccgctctttttcgtgaatcctataaaatcactgctatgaaggagtccggctcctcacacagtcagctctgataggctccggggattattcccactcaatggttgccgggggcttggaggtgatgtcatacacaatgcggttgacatgcttgacctcgtttacaatccggcgggataccttgtccagtacatcgtaggggatgcgggcccactcagcggtcatgaagtcgctggttacaacgccgcgcagggcaatggtgtagtcgtaggtacggccgtcgcccataacgcctaccgaacgcatattggtcagtacggcgaagtactggttgatctcacgatccaggccagccagatgcagctcctcacggaagatcgcgtcggcatcacgcagcagatccagcttttccttggtcagctcgcccagaacacggataccaaggccagggccggggaagggctgacgccatacaatgttctcaggcagacccagttccgaacccagggcgcgcacttcgtccttgaagagctgacgcagcggttcgatgatctccttgaagtccacatagtcaggcagaccgcctacattgtggtggctcttgatgacagcggaatcgcccacgccggactcgattacatccggatagatggtgccctgtgccagatagtccaccgagccgatcttcttgccctcttcctcaaagatgcggataaactcctcaccgatgatctttctcttgcgctcgggatcggttacgccagccagacgggccaggaagcgatcctcagcattgatgcggataaagttgatgctgccgtcgccgaatacagcttcgatctcatcgccttcattcttgcgcatcaggccatggtctacaaagatgcaggtgagctgacggcccactgccttggagatcagcgaagccacaaccgagctgtccacaccgccggacagagccagcagcaccttgccgtcgccaaccttggcacggatctgctcaatggcagtctgggcatagttcttcatggtccagtcgccggtggcgccgcacacattgtacaggaagttccggatcatggcagtgccgttttcagtcagggtcacttccggatggaactgcatgccatagagcttggcagcctcattgtacatggcagctacggggcagctgtcggtatgggcagcggacttgaagccctcgggcagttcatagatggtatcgttatggctcatgagcgcatttgcctcttcagccagaccggagaagatggtgcagtcagtatcaaattccaccggctttctgccatattcacggatatggcccggctttacagtaccgcccagagtataggccatcacctgtacgccatagcagatacccaggatcgggattcccatttcaaagatttccttttccagtctgggagcgccttcctcataaacactgctgggaccaccggtgaaaataataccgatgggcgcgaattcccggatcttctccagggacatattgtagggatggacttcacagtacacattgcattcccgcactctgcgtgcgatgagctgattgtactgaccgccgaaatccagaataaggaccttctgattttccatacgctaccttgcctttctatatggattcatactttcttttatttttacattttttgagggaaaaagcaaggtttttaccccgattccaaattctttgcgctttttatacaaagtgttccggacacaccgggatcagactgtgtcacctgtcgggcatcaggaggaaaaacaggggattttccctggaaattcccctgtgaaaattgtcagtttcccttgccatttttttgtgattttactataatgaaagaatagctcagactgattctgaatggtctggcaggataccaaacatttttgaggaggattcgatatgggcaaagatctggataaaacctatgatccccattcatttgaggatcgactttatgccttctggcaggaaaaaggatacttttcccctgtcgtcgaccatgacaaaaagccttacagcatcatgatgccgccgccgaacatcacgggtcagctgcatctgggccatgctctggataatacactgcaggatattctcatccggttcaagcggatgcagggctactgcaccctgtggctgcccggtaccgaccatgcttccattgctaccgaagccaaggtggtagaagccatggcaaaggaagggcttaccaaggaaggcgtaggccgtgaagaattcctgcgccgtacctggcagtggaaggaaacctatggcagccgcatcaacgcgcagatcaagcgtctgggcagttcctgcgactggagccgggagcgctttaccatggacgagggctgttcccgggcggtacgggaagtgttcgtcaatctgtatgaaaagggcctgatctatcagggtgaacgcatcatcaactggtgcccccactgcaagacttccatttcggatgccgaggtggaatttgaagagcaggccggacatttctggcacatcaagtacccgctcaccgatggcagcggctatctggaagtagccaccacccgtcccgaaaccatgctgggcgataccggtattgccgtcaatcccaatgatgagcgctacaagcatctcattggcaagactgccatcctgccgctggtaggccgggaactgcccatcgtcggagatgagtatgtggagatggacttcggtaccggcgtggtaaagatgaccccggctcatgaccccaacgacttcgaagtgggtctgcggcacaatctggaagtcatcaatgtgatgaatgaggatgccaccatcaatgaaaagggcggcaagtatgccggtctggaccgctatgaggccagaaagcagatcgttgccgacctggaggagcagggctatctcatcaagatcgaggattacaaccacaatgtgggcagctgctaccgctgcggcaccaccattgagccgatgatctccaagcagtggttcgtcaagatgaagccgctggctgagcctgccatcgaggcggtacgctccggcaagaccaactttgtccccgagcggttcgataagatctactacaactggatggagaacatccgtgactggtgtatttcccgtcagctctggtggggccaccggattcccgcctggtactgtgaggactgcggtgaggtgatcgtttccaaggaagatcccaccgtatgtcccaagtgcggcagcacccatctgcaccaggacgaggataccctggacacctggttctcgtcggcactgtggcccttcagcactctgggctggccggacaagaccgaggatctcgagtacttctatcccaccagcaccctggtgaccggctatgacatcatcttcttctgggtagcccgtatgattttctcgggcatcgagcacatgggggagactccctttgagaatgtgttcatccatggtatcgtccgggatgcccagggccgcaagatgagtaaatccctgggcaacggcgttgacccgctggagatcatcgaccgttacggcgctgactcgctgcggttcaccctggtcaatggcatcagcccgggcagcgatatgcgcttcagcgaggagaaggtgacttcttcccgcaactttgccaacaagctgtggaatgccgcccggttcattctgatgaacctgcctgacgccgattccctggagctgtccctgccgtccgagctcaccgctgaggacaagtgggtgctcaccaagtatgaccgcctggttcaggagaccaccgacgccctggagcggttcgatgtgggtgtggctgccggcaagatctatgacttcatctgggacatctactgcgactggtacatcgagctggcaaagtcccggctgcaggccggcggcgaaaccgctgataatgcccgccgtgttctggtgtatgtgatgaccggcgtgctgcagatgctgcatccgttcatgcccttcatcaccgaggagatctggcaggctctgcctcacgaaggggagagcatcatggtcagcaagtggcctgagtccaatccggctctgcgctttgacgccgaagaggctgactttgaaaaggtgatgaacctgatccgtgctgtgcgcaatgtgcgtgcggagatgaatgttccgccgtcccggaaggccaagctgttcatcgaaaccaaggtgccggagatcttccgtgccggtcaggccttcattgagcgtctggcctttgcccccgaggtggagatcggcgagagctttgatctgcccggcgcagcccaggccatcactgccgatgcccgtatcctgatccccatggacgaactcatcgaccgggagaaggagctggcccgtctggagaaggaaaaggctgcctgccagaaggatattgacttcttgtccggcaagctgtccaatgctggctttgtagccaaggctccggaaaaggtcatcgccatggagcgggaaaagctggccaaggcggaggaaaagctcgcccgcatcgaggagagcatccgcaatctgggctgatcctgacctgatacaacacaatttacacggcacagtcgttttccaatgcggctgtgccgtgttttttgcggaaatgggggaaggaaagatcacgctttacaaaacaggtgctccggtgtaagatgaaatcagaattttatgccggaaggcagggagagcgttatgacaggacaggaagcagtagactatatccacagcgcccggggccgggggaagaaggacggactccggaagatcaccgagctgatgcaccgcctgggtgacccccaggacaagctgcggtatgtgcatgtggtgggcaccaacggcaaaggctccaccacctcgatgattgcccattccctcacagcggcggggtacagaacgggaatgttcatctcgccgtttatcctcgatttccgggagcggatgcagattgacggcaaaatgatctccccggaggcactggcctcctgtgtggaggaggtgcgccgggaagcgaatcagatggcggcggagggcaggcagcctaccgagtttgagctggtctgcgccactgcctttgtgtggtttgcccgggagcagtgtgaggtggtggtgctggaagccggcatcggcggacggctggactccaccaacatcgtcagggataccctggcggcggtgatctgttccatcggcctggaccatgtggaggttctcggggatacccctgccaaaatcgcggcggaaaagtgcggggtgctccgcccggggattccctgcatctgctaccccgaccaggatctggacgccctggctgtcatcatggagaaggcggcagagcagaactgccggctgatccagggcaatctccgggcggtggaggtggagcgcatgactctggagggcaccgatctgcgctaccgggatctttcgatccatctgccgctggtgggacgctatcagatcgccaactgcgtcaatgcggtggaggccctgctggcgctgcgggccaggggcatgaatatcccggacagcgccattgtccggggcatcggcgagaccttcttcccggtgcgcatggaggtggtcagccgctgtcccactgtgatcctggacggcgcccacaacgaatcaggtgctgcagcgctgtccggttcgctggaggggctggtcaccgggcggctggtgatcctcatcggcatgatgaaggacaaggatgtgcgccacgccatctccaagacccttccgctggctgaccgggtgtataccgtggagccgctggacaatccccgtgccatgccctcggatgagctggctgcgctggcaggagagtactgtgccgatgtgcgctcctggggcaaggagctggacggggcttttgcagacgcctatgacagccttaccccggaggatacgctgctggtgtgcgggtcgctctatgtggcgtccgatctccggcacaccgcccggcggttctttgaaggccggggaatcccgcacagcccgcatctctgagttgcccacgggaatttttccctctgtcagaaaccgactcactttttatcttgaatcctctatcctttgggatagaggattttttattgcattttttgcgaaaggacggaagctatggctgtcacgctggaagtaacaaatgaggagatcactgcctatctcagcggtgagatcgaccatcacagtgcggtggaactgcgccgccggatcgatgaatcggtactgtccgggactccggaacggctgattctggacttttccggggtcacattcatggacagttcgggcatcgggctgattatggggcgctggcgtctgatgcaggaacagggcggacatctgcttgtacagggagtccccagatcgctgcgcaaggtgatgaaggtgtccgggctggacaagctcggcgtactggaagaaaaagaagaggtgaaacaatgaaaaagacaaacagcatgaagctgcagtttgtgagccggtcagccaatgagggctttgcccggacagcggtgtccggattcctggcgtccctggaccccactgtggaggagctggcagacatcaagactgcggtttccgaagcggtgaccaactgtattgtccatgcctatgccgaccggatcggcattgtttacatagccgccgatctctatgcggacggcagagtggtgatccgcatccgggataagggctgcggcattcccgatgtggaaaaggccatggaaccgctgttcaccaccggcggggaggaccgggccggactgggctttgcggtgatgcagagcctgatggacaaggtccgggtgcgttcccaggtggggaagggcaccaccgtcacattggagaggaggatcgaaagcagaggggatcagaatgaccgggacactgagtgagtccgcccgggaccgccagaagatgattgaggaaaacctgggcctggtgcattcctgtgcccatcgcttcaagggccggggcattgaatatgacgatctgttccaggccggatgcatggggctggtcaaagcctgcgatgcctttgatttctcccggggtgtgcggttttccacctatgcggtgccggtgatcctcggggagatgcgccggctgttccgggacggcggcactgtcaaggtgagccgttcgctgaaggaactctccctgcgggtggtgcggggacgggaacagctggcggtccggctgggccgtgatcccaccatcgaggagctggcagaggaactggggctcacccgggaagaagtggtggaggcgctcaatgtatcggcgccgccgctctcgctgaccgtgtcctcggaagagggggagacccagatcgacctgccggtacagtccccggaggaaaacctctcggagcggatggctctgcggcagatcctgggagagctggagccccgggatcggcagctcattattctgcggtactttatggacaagacccagacccagacggcggaacagctgggtatgacccaggtgcaggtctcccgccgggaaaagaaactgctcctcgccatgcggcagaaactcctgtgatattactactgcgatccacttacctcctgtcggcactgcggagtctttggctccgcagtgcttttttatatgcgggaaattgccaaagcggcatgattgtgctacaatttttctcatacatctaagtggaaaggcggcgggaaaatgcctgagatccgtattatcccctttacgccggaatatgccggcgaactgggacagctgcactggcaggtgtgggaggaaacctaccggggtctgatccccgatgcctatctggataccttcaccccggaaaagtggaccgaaaaagcccggcgggatacactgaccagctttcttctctttgcggatggggaactggcggggttcgccagctgttccgacccggcccgggaatcggtgccggtgccggaggcttcggagatcgtggccttctatctgctgcggaagttccagggccaggggttggcaggagcgctgatgcggtactgtctggacttctgcacccgaccgaatgtggtgctgtatgtgctggagggcaacgaaaaggccgctggattctaccgccacatgggctttgaaccgaccgggcgtatccagctggatcacacgccgtatggaactctgcgggatctggaaatggtctgccgccggaagagaaaggagaactgaccaatggaaacggaactgaatttccgatttgcagtgcgggaggataccccgctgatcctccagatgatccgggagctggcggattatgagaaactcctggacgaggtagtcgccaccgagccggtcctggaggagtggctctttgaccggcagaaggcggaggtgctgtttgtgctgaccccggaggggaaggaggcaggctttgccctgttcttccacaacttctccaccttcctgggccgggccggtatctacctggaggatctctatgtccgtccggaataccggggccgggggtatggcaagggactgatccgccgtctggctgccctggcagtggagcggggctgcggacggctggagtggtggtgtctggactggaaccagcccagcatcgatttctatctctcgctgggggcagagcccatgtccgactggaccgtctaccgcatcgccggcaagaccctcaccgacctcgccaccgaacccaaggcatagagaatgcccatcgtgcagccggggctgttgaagcggcccggcatgggctcctgctgcttatggaacgcagagcccatgtccggctggactgtctatcatatccagaacagaaaaagaaagccgtccggcatagccgggcggctttttgcatggtcgtatgggggtcaggcggcttcggcggaaagctccggttcatagagcgcatccagccgatcctctccgccgaacaggttgttgtactggaaggactgataggcatcgatcagcggggtgaagtcgttggtctccaggtggctgtaggcattgccctccgcatcggtatagccggggaagcagatggcaggcaggatctcctgcacgccccagaggaactcgccatagccggtggtttcgattccagccagacgcagcagctgctgtcccaggaagttcagactggtggtgggcagctccatctgcggcaggtcatagttggcccagatgagatagggaacttcatacttgcgcatgtattcctccatgctcatgccgtcatcgcccacattgtagaccagatccaggaattcctgctccaccgagggctgatggtcgccgaacatgagaatgatggtgggttcctcataggtggagaagtagtccaccagcatctggaacgcctcgtctgacttgttggcaagggtcaggtactgttccgccttggggaactgtccgggatagtcggtgacagtcacttcggcgggataatccgcaactgtatagctgccgtggttctgaatggtcacattgaacaggaacaggggctgacccggctccttctgctcaaactcccagatgatctgttcaaaggaggtggcatcgctgatgtagccgtgttcggtggtcaccggcacatccagatcctcctcgcatttgaagttgtcaaagcccagtttgggataggccagattccgctgccaggaggtgcgttcgccggggtgcatggcaagacagtcgtacccatagccggacaggatgctggcaagggattcgctgctctcgcccagatactgctggtaggggatactgcccgagggcaggaatgccatggaattgccggtgaggaattcaaactcactggcactggtaccggcgccgaataccgaggcataggcatgaccgaacagggcgccgctggcatcgatgtgatcggtcaggctctcgctgaactggacagtgccgaaattctcatagtctgcccaggactcattcataatggcgatgatattggggcgttctactgtggtgaggggctcggggtccacactgaccgtcttcatcagctcctggatgtagtccggggaggtgttggagggctcctccacctccatgaactggaagttccgcaggaaggcggtgaggacgccggaggtgcggtaggaaccagcctgatcccagacatcggtgctgacgccgaagcgtcccagggcgctggtattgaggatgggggtaaagcagagcagtgccatcagcaggcaggccagacgggccgggaggctctgccgcagacgcacccgaccgccggaccggatggagcggtggatcaggacagcgaagcccagcaggatagagagggcagcagccatctcccaggtgacatagagatcatagctgtctgccacagccaccgcagtgcgcagggctgtgaaatcccaggggaggatgggcaggccccggtagaggttgacaaagtagttggcaacgccccaggcaatgcaggccagatggacaatcaggctgcagagcagcaggcggttggtgagggcagtgagcaggaagaaggcagcgccgatgcagatatagttggcgagggtgactcccaggctgtgatcccagggcatgctgccgaatacgaactgcatcatatagaaggatgtcagcggggtaaagaagagtacaccccgtccgatccattttgcccgccgccagatccgggcaaactgcatatcattttgttccaaaattacaacaactccagatattttatgaattgaggctgttatgccgggcaaagccggcagggaatgctttcagtatagcataatccacagcaattctcaaaagaagcaccccgtatccgcgccgcaggcgaatacagaatgcctcggggtatgagccatgatgccatgaagtgtcagcagaatggcatcatcgcccattgggacgaatcatccggccataaaaacaggtataagagccgatttgctgctattataccatgaagcatcagcgaaatagtataattggccattaggacggaagcaggctacgcctgcgaatcgtccggccgtaaaaacaagtataatggctgacttgcggctattataccataaactctgtgattttgcggagaaatgtaaaaaactcttgcaataagttcaaaaatagtttacaattttcgcaatacaaggagaaaaaccggattgtttgttcacagtccggcggggaaactgcctgcggggaatgaattcttgccgggctttttatcgtccccggacaggaatttcaccgaacagggaaaagagaggttgaatcacatgaagctgctggaagaacggattcgccaggaaggtatcgttaaatcgggaagcgtcctcaaggtggacagtttcatcaatcatcagatggatgtgctgttctttgacaagatgggcgcggaattcaagcgcctctatgccgacgcgcccatcaacaagatcctcaccatcgaggccagcggcatcggtattgccatcattgccggcctgcacttcggcgtgccggtggtctttgccaagaagagccgttcctccaatatctcggacgatgtctatcacactgtgatccactcctacacccacaacaacgacaacaatgtcattgtatcccgggagtatctcagcccggaggaccatctgctcatcatcgatgacttcctggcaaacggctgtgccatggagggtctcatcgatctggcgcaccaggccggcgcaaccgtagagggtctgggcatcgctgtggaaaagggcttccagaagggcggcgacaagctccgtcaggaaggctaccgggtggaatcgctggcgatcatcgagtcgatggacgccgccaccggtgagatcgtgttccgggagcaggactgacctgccctggatctggaagggagagagcagcatggaaatccgccatctgaccccagcggagatcccccaggggctggagctggtccgggatgttttcctggagtttgaggcgccggactacccgcctgagggagtggaggagttcttccgctttctggacgacccgcagcaggcgtccctctgcttttacggcgcctgggacggaacggttctccggggcgttctggcagcgagggaggagcacatctgccttctgtttgtaaggcgggaataccatcgccaggggacagcccgtgctctgatcgaagcctattgccgggagcagaccggggcagttacagtcaattcctcgccctatgcggtggaggcctatcaccgtctgggattccgggatacagcgccccagcagacagtcaatggaatcacttttacgcccatgatccgggaagtgtgaccccgctcacagaaaaacagaccgggtttgtattaaagtagaggaaaacagggcaggatgatcctgtacccataagaccggtccccaccggacctctgaactgaaaggatgaatgacggatgcgtattacaaaggatacactgatcggcgatattctcaagatggatatgggcatggcccgcattctgatgcagaatggtatgggttgtgtcggctgtccggcttccgctcgtgagagcctgggtgaggcctgtgccgtacatcgtatggaccctgagaaggttctcagcgaactgaacgcctatctggacaatctgtaagccggcggccgggaatacccggacaatgcgggacaacgcagaaccatcaaagcagtccgaacgccggaagaaaggcattcgggctgctttttgcatcaagatacaagggagttgtggaaattatggcaaaagtacttctgatcaacggcagccccaacgagcatggctgtacctacaccgcgctgcatgaggtggagggtgtcctgcgccggcacggcattgaaaccgagatcctctggctgggacgcaaaccggtggcaggatgcatcgcctgcaacacctgtgcccggaccggacactgtgtctttgggccggagacctttgatgacaaggtcaaccgggtgctggacgaactggacagcatcgatgccattgtcgtgggttcgccggtctactatgccgcagccagcggacagatcacctccttcctcaaccggctgttctatgccggcggacgccggatggccggcaagctgggcgcggcagtggtctcctgccgccggggcggtgccgcttctgcctttgaccagctcaacaagtacttcactatctgcaatatgccggtggtatcctcccagtactggaaccaggtgcatggcaatacccctgaggaggtgctgcaggatgccgagggtctgcagatgatgcgcaccctgggcgagaatatggcctggctgctccggagcatcgaagccggaaagaaggccggtgttcccgctccgcagtatgagcccaaggttgccacaaactttatccggcgaggtgagtagaatgcgtcccatcgatccctattcctaccactgcggcgtcatggacagcttctgtgagattgtcggcgccggtgtcaagcccatggcactcagccatccgtttgcctcgccggaggaacgggctgagtaccgggagtatgccgcaaagatggcgggacagtacggcgtgctgctcgccgaggaggacagcctgccggtgacccctctcttcccggctggcgcctgtgagggggcgtatgtctttctcttcatcggcagccaggctgtccaggagcggtaccgggtactccgggaccgcacagcagaactgcgccgcaccgggcaatatgacctgcagtcccggctggaatcggcccgggaactgggcagactgctgggatatacacccgaagcagtggagcggatgatcgctgccaatctggaggcataaggggcagcgcctgttacacttgtgtaaattccataaaatagaaccgggttttctcacaaatattctcatggtttttgggcagtctgctggaaaaagatgattgaaaaatggcggaaaagccagtataatgaaaaaggcggatttcttataacagggtaggacgatccgcctttttcgttttgacaggcccggatcaaaccggcagcttgtccaggtaaaacaggttatcaagaacaggagagtagctatgaaaaaggtttacacaggcaagaccaagaatgtgtatgagctggaaaacggcaactacatgctcgaattcaaggacgatgtaaccggtgagaacggtgtattcgatcccggtgcaaacactgtcggcctgagcatcgagggcattggcaagtccaacctcaagatgtcggtacacttcttcgagatcctcaaggctgctggcatcaagacccactatgtcagcgctgatctggagaacggcaccatggaagttctgcctgccaaggtatttggtcatggtctggaagtaatctgccgcatgaaggccaccggcagctttatccgcagatatggcgattacattgaggacggtactcctctggacgcctatgtggaaaccaccttcaagaacgatgccaagggtgacccgctggtaaccgaggatggtctgatcgcactgggtgtaatgtctgctgagcagtatgactccatgcgtgccctcaccaagaagattgccagagttgtagcagatgagctgtccaagcacggtatggagctgtgggacatcaagttcgagttcggctacaatggcgacgaagtaatcctcatcgatgagatcgcttcgggcaacatgcgcgtctacaaggacggcaagatcgtagatcccatggatatgggcaagttcctgttcgcataatagctataaaaagatctccgttctctggcttcagccgggggacggggatcttcctgctttcagcgcgcagaaaaaaccgcgccgcatcggtcatccggacctgcggcgcggtttttgtttttattcaggggtcagcggtcgatccattcctctgcggtatcggcagtttcctggagaatgcggaagtattcactggcatgccagccatcggcaaccgaatgatggatctgcagggtcaccggcagcatcagacggccattctgttccgcagcctgtcccactgtgatgatgggcggcaggaaatcgccgtcggtatagagattcagattgatctcggtatagtgcagccaggggatcgaggagaagttatgtacattgggaggaaagttcccctggggctgtacgccgccctttttgccccacagggcaatatcccggcacatggcctcatagaattcccggaaggattcactgtacggggtgtacaggctggaaaacagcttggtttccggattccagacagtgtaggccggggaggtggtgtcataccagcccacctgaccttcgctgttgcggtcaaagcgcaggttgacaatggagttcactgcacgggcggacagccaggtcagacagggcgtcagccggagcgaccgggatttggctgcgtggtacaggacagtgatgtccacattggcagtgatgctgtaagtgcagcgggcgttgttcatatagtgctgatagtattcagcacggtcccaggtggcaaaatcaatggggtgaaacatagttggttcctccgtttcaggcggtttcgggtggataggctctcacagatcgaaaccgcctgacttgtttgtggaacactcgctttgacacatggcgattcacctcgtttcagacaggatacaggctcagacagacagagccaggaaagcgaaatagcttgccagcaccagagccggcgggataaagtagatggtcttgcgcagacggggatatttgcggcggcccttggatttgtagagaatgggcatggcaataaagatggcactggcaaggccgaagataagcagcagccaggtctggctggtggtgacatagagcgaaccgcctgcataggtgaggtccgccacagtgaggatggcaaagttgaagaggttgctgccgaggatattgccggtcatggcattgaagttgccgagctttgccagattgatggaagaggtcagttccggcagcgaggtggcaacacccagcagcagggcgccggcgagggtagtgccgatctggtatctggaggcaatggcatcggtggcataggtcagggcgatgctggcagccaccagtcccacgctgcacagcacaaagcggaagatgatctgcttcatggagagctggctgctggcgccgtcatcggaattggaaacgccgtcatccgcggacatggtgcgcacgccgtagaggtagactgccagcaggacaatggagtggatgctcacattgaagatggtgaattccagccccagtcccagcaccacaatcaggtagaggtagatggcagccaccagcaccagggacaggttgtgggaggcgccgatccgggcccggcggaagcgtttggggaaggccaggaagagggaggccagcacagcggtattgaagatgtcactgccgaggatattgccgatgaccagttccggctgaccgagcagggcagtggcggagatactggtgaagagttccggcagagaggtgatggcagccaggatcacgccgccgatgaaggcgccggagatgctggtgcgtttgtcgatgatgtccacataattggagagctggatggagaagcccatcacaattacagcgaggatcagatatccgataatgatcacagattatacctcccggtcatttcaaatggaagaaaaagtatatccttccgaagccggcgtctctgattccgattgtaacactgccgggaatggaagtcaaaccccagaatgccggagcagccgcagcagataattctggcgtttttccagggctgtgagctgatggatgcagcagtcgatgaggtcgctgtcctccgccatattgaagtggcagcgggcagtttccagctcctgctggaccagccggagttcttctttcggggaaaatggggtttcaatgggggtacaggtctgggttttcataggaaatacagcctccgttccttacagatggttccagaatactatattccagagtctgggggaaaagagctgtttttataccggtgagacaaaaaagcactcccggcctttccgaaaaggctggaagtgcttctgcatgcaaaaaggcgagcaaacaataagccgagttctgtatttgacaacaatctatctaatccgtatgttgccatacggctcaagccaccacatcggaacacgacgggccgccgtattgttcctgtcgggtgttgcttcggatagggtttgcagggccgtacagtctcctgcacgccggtgagctcttacctcgcctttccacccttaccgtgacaagtcacggcggtatatctctgttgcactttccctatggtcgcccacggctgccgttagcagctatcctgccctgtgaagcccggactttcctcacgcacagcctttcggctttgtgcccgctgttgtctcgtttactcgcattccatatcatagtatattttcaccgaaaagtcaaatctgtcctgaccggctttcccatgtatgcgattctgtgctatgataaacaggaacaggattttccgtgtgccgcgcggcttgatgaaacagggcggaaaaggcatgcatcggcgctgtgagtttccgccagagggtgcggattcccgggcttccggaggccccagtccctttggattcgtgtaatcccgcccctgatgaccgggctctgtcaggaaatcagggttatgctgtgcgcctcttataaagccggggcagcgtcatcatagaaaggagcagtcaagaatgctggaactgtgttttaatgagggagtgggcggcctgctgtcctactggcagagcgggaagcagaagatcctctgtctgggggacgatctctccatcggcccggttgccggagggccggacagtcaggagcgccgggagcagctggtgcggattctcggttctgacccctggggtgaactgcccgccggggagtggattgatgaagcctggcagcgctattgccggacctgggaacgcctacgcaccctccctgaggggaccgaggtgcgggtctggctggaccggaccccgggcagccggtgtgggttcctggcgtcagctgaagccctggccttccgcaaggcccgtgtgactgccgctctgctgcccgagtgggtcgcccgtccggatggtacggcagtggagtactccggctggggggaagccagtcccgaggagctggatgccctgctggaggactgctgccggggggtgccgcaggtgctgctgggcgggctttcccaccggtggcggcagctccaggaggaaaacgccccgctgcgggcagtgataaacgggcggctgcacagcgtgccggaggatttctatgacggaatgcttctctcccggctgccggaggctggacagaccatccggctggcagaactcctcgggcggacgctgggggagtgccagcccggcatcggggattggtggctggcctgtcgggcggacgctctggcggcagagggcaggttccgtctggaacgggaccccgggcgcttctacaacagccaggtgacagcgttataaacgaaacccctcccggaaatcccgggaggggttttgtgtatggggtcagctcctccggcggcggagggcggcgatgctgtccaccaggcactgggcagccagcgccagcgggaggaaggggtagacgttttcatcaaactgcatgaaatacagagccagtgccccgatcaggcagagcccgtttatccaccagagggaggcggaaagccggcggttcagttggcctcgccctgccagcagaagcccatagcacagatagtcggcaaacaggaagagccggcgggacaggacatcgaaggttttggcggtgtaatcccacaccagatagcggatctccggttccagccagatccaggccatacagagggcagagagcagcaggaacccggtcagcgggcgtgtgtatccggactgtttcatctgagtccacctccttgcggcagaacagttctttttatcagtttaacatgatgaagcggctccggtcaagataatgccggaaacgcaaaaaaagaggagcatgacgctcctctttttatataggttagggtttaagcctggggttctgctttgggaagttccttccgctccagaatctccatgaactcgtcgccggtgatggtctccttttcatagaggtactgggccagttcatccagcttccggcggttgtcagtgaggattttcacagccttttcatactgctccttgatgagctttaccacttccgcgtcaatgcgggcctgggtctcaggcgagcagctcagggaggtgtcgccgcccaggtactggttggtgaccgtttccatggcaaccatgccgaagtcgtcattcatgccgtagcgggtgatcatggcacgggccagcttggtagcctgctcaatatcattggaagcgccagtggtgatggagttgaaggccacctgttctgccgcgcgtccgccggtgagggtggcgatcttgttgacgatctcgtcacggctcatgaggtaatgctcgccctcgtccacctgcatggtatagcccagagcgccggaggtacgggggataatggtgatcttctgcaccggagcagagtggttctgcagggcagccaccagagcatgaccgatctcatggtaggccacaatgcacttttccttgtcagtgaggatggcgttcttcttctggtaaccggcgattaccacttcgatgctctcctcgaggtcagcctgagtggcagtcttacgaccgtcccgcacggcccggagcgccgcttcgttgacgatgttcgcaagctccgcgccggaagcgcccgaagccatccgggcaatcttgttgaagtccacatcgggctccagacggaccttgcgggcatgaaccttcaggatctcctcacggcccttgaggtcaggcagttccaccggtacacggcggtcgaaccggccgggacgcagcagcgccgggtccagagcctcaggacggttggtggcagccagaatgatgacaccggtattgtcctcgaagccgtccatttcggtgagcagctggttgagggtctgttcacgctcatcgttgccgccgaactgtccgtcacgctttttgccgatggcgtcgatctcatcgataaagacgatgcagggagccttctgcttggcctgatcgaacagatcacggaccttggaagcgcccatgccgacgaacatctccacaaactccgaaccggacatggagaagaagggcacattggcttcaccggctacggccttggcaagcatggtcttaccggttccgggagggcctaccagcaggatgcccttgggcatccgggcgccgatatccttgtactgggccgggtcatgcaggtactgcacaatctcggtcaggctctccttggcttcgtcctcgcccgccacatcggagaatttgatgccctcggaggatttcacatagatcttggcattgctcttgcccagaccgaacatcatggaattgggtcctccggccttatccatcatctttttggacatgaactgtccgaagccgatgagcaggatcagcggcagcccccaggtgagcaggaaatagagccacggggaagtttcctcaatgatctcgccccgggtggaaacaccggcatccagcaggcgctgggtgagctcggtatcgggcatcataccggtctggtagatggtagtgccgtccttgctggtaaagaggatcaggttttcctgggcctgaacctctgcggcgccgacatccccttcctccaccatggtgacgaaggtgttgtaatccacttcatggatctggcgtttgatcagccagggcatgaacaggaaattgaacagcatgagcagcagaagcatcaagccataataatagatgagtggtcgtttgggttgctttacttcattcataggtacggtccctcccgcaaagaattatgttatccaaatccgtcggtgcagcgcccggtaacaggaaaatcaacaacatggttatcattataatgtgtaaagatagcctttttatggtggaaatataaacaataaaatacagtttttaacaatttgtgaccaaactgccggagaagcccctccctggtacaatgcactgtgcttccgaaatatccagcagacgatatttcactttgaccgagaaaattcccgtgggaaagctgagttttgggagaatgtgaaatttttgctcactgctcttgcaaagcggggaagtgtccggtataatacaacttagattttaccagtgaggagcagatggctatggaaattaagaacgaatatctccgtgatctctaccgccgtgtggagaagcgtgaccccaatgaacccgaattcctgcaggcagtgggcgaagtgctgcagtcccttgcgccggtggcggaccgccgtcccgacctcatcgactggggcgtttttgagcgcattgtcgagccggagcgcatgatcaccttccgggtgtcctgggtggatgaccagggcaaggtgcaggtgaaccggggctatcggatccagtacaattccgccatcggcccctacaagggcggcctgcggctgcatccgtcggtgaacgcttccatcatcaagttcctgggctttgagcagaccttcaagaacagcctgaccggtctgcccatgggcggtgccaagggcggcagcgacttcgatcccaagggcaagagcgatatggagatcatgcggttctgccagagcttcatgaccgagctgtaccgtcacatcggcgaggataccgatgttcccgccggtgacatcggcgtcggcgcccgggagatcggctacctgttcggccagtacaagcgcatccgcaataccttcaacggcgtgctcaccggcaagggcctgacctacggcggttcgctggcccgtaccgaggccaccggctatggtctgctctacttcctgcgggagatgctccaggagatgaagcatgagccggttgccggcaagaccgctgtgatctccggttcgggcaatgtggcgatctatgcctgtgaaaaggcccagcagctgggcatgaaggtggtagccatgtccgactccgccggttatgtctatgatgaaaagggcattgacctcgctgtggtcaagcagatcaaggaagtggagcgcggacgcatcaaggcctatgccgagcgggtgcccggcgcggtttacaccgagggctgcaagggcatctggaccattccctgcgatgtggctctgccctgcgccacccagaatgagctggatctcgccggagccgaggcactggtggcccatggcgtcatggcagtgtgcgagggcgccaatatgcccaccactcccgatgccgctgagttcttccagaagaacggcgtgctgtttgctccgggcaaggcttccaacgcgggcggcgtatcggtgagcggcctggagatgagccagaactcgatgcgttacagctggaccttcgaggaagtggaccgcaagctggaggagatcatgaagggcatcttccatgcggcctacaccgccgctgaggagtatggctgctccggcgacctcattgccggcgccaacattgccggtttcctcaaggtagctgagtcgatgaaggcccagggcattgcctactgatgcctggaacttctgccggggatttgtaaagaaacttaaaacttgctggaaagaagcctgccgcaggtggacaaggcacacggtttgcattataatggaatcgtgtgaaaagtccacagtgcggtgggctttttctgtttcggaaaggggggcggaggcttgcgccgtattgattttctcatcacaccggctgaggacggcatgaaggtggagcagtatctcaaaaccgtgcggaagatgtccagccgggtgatcatctcgctcaagcaccggcccgaggggctgcagctcaacggcgaacatatccgcaccattgaccgcatccatgccggggacaccctttcggtaaccatggaggacaccccgcctgactatctggagagtgagatccgggtgccggtcctctatgaggatgaagatgtgatggtctacaacaagccggtggatatgccctgtcatcaggccaagacccaccagcaggacactctggcgaatgtctttgcccgggactgccgggagcgggggctcaccctgagctaccggtgcatcaaccgtctggaccggaacacctccggcgccgtggtggtggcaaagaatgcccatgccgccacagtgctgggcggggtaggccggggcggtatccaggtgcacaagcggtacacggcgctgctcaccgggattctgccctatgagcggggcatcatcgacgcaggcatcgcccgcattgacgaggagaccattaaccgcatggtggacaacgccggacagccagcccgcaccggttttgaggtgctgggctatggataccggcatacgctggcggagttttcgctctacaccgggcggacccatcagatccgggtgcacatgtggtggctgggctatcccctggccggggatgacatctacggctgggattttgatctcatcgggcggcacgcgctgcactgcgggcggatctggttcccgcacccggtcaccggggagcggatcgaagtcactgccccgccgccggaggacttcctggaggccatccgccgggcaggggtgcgccccaaggcggaatcggcccattttatagagaaaaaggtgatcttgtgagagttttgtttctgggcgatgtggtaggcgcctatggctgtgagctgctggaaaagcggctccgtgccctgaaaaagcagtatgccgccgatgtggtggtggtaaacggcgaaaattccgctgagggcaacggcatgctgccctccagtgtccgccagatctacgacagcggcgcggatgtcatcaccggcggcaaccacagcctgcgccgccgggagatctacaaggtgctggacgaggaggaaaccctgctgcgcccggtgaacttccatgccaatgccccgggcaagggagtctgtgtgctggactttctcaagtaccgctttgcggtggtgaacctccaggggcttgcctatatggtggaccatcaccgggaccccttcgccgccattgacgaggtgctggctggcctggatacccccaatatcctggtggacttccacgccgaagccactgccgaaaagctctccatgggcttctatctggatgggcgggtttcggctgtgatcggcacccacacccatgtacagaccgccgatgaacgcatcctgtccggcggcaccgcctatctcaccgatgccggtatgtgcggcagttttgattcggtgctgggcgtgaaaaaggagctggcggtggaaaagatgcgcacccagcttcccacccggtttgagaatgcccggggacagggaatcctgtggggctgcgtcatcgacattgacgaaaagaccggacgggcccggagtattgaacgggtcgccgaccgggtggaataaaaggggagagccatgaaaaaacgacttctggcagggacactggcactctgtctgctgctgtccggctgcggcgggttccgggacgtgtatgaggatatcttcggcggcgaaccggcttcctcc

SEQ ID NO: 1067 - DNA, 5493 bp, Unknown
  16S sequences of unknown bacteria
tgtgaatattatgctgatgagcccgtatgccgatgaggtcgcacaggttgtggttgaggaaggtgtcaaagtcgtaacgactggcgcgggcagtccggaaaaatacatggagcggtggaagcagtccggtatccgggtgattccggtcgtcgcttccgtggcactggcaaagcggatggagcgctgtggggcggatgcagtggtcgcagagggctgtgaatccggaggacatgtcggagaaagcacgacaatggcgctggtgccgcaggtcgttgacgcagtgcagattccggtgatcgcagccggggggatcgcagacgggcgtggtatcgcggctgcatttatgctcggcgcaaaggccgtacagatgggaacccgatttatcgcgacacaggaagcacaggtgcatgaaagctataaaaatcaggtgctgcgggcaaaggacatcgatacccgcgtgaccgggcggtcgaccggacatccggtgcgtgcactgcgcaatgaaatgacaaagcgctacctggagctggagcaggagggtgcatcgtttgaagagctggagcagctcacattaggaggactgcgcagagcggtcgtggaaggtgatgtgcggatgggaagcatgatggccggacagtgtgccggactggtgcgggagattcttccgtgcagtgagctggtgccgcagctgatgcaggaagccaaagcatgtatgaaaggaatccggatcgatgagtaaaacagcatttctttatccgggacagggagtacagacatctggcatgggtgcggatttttatcggaacagcgcatcggcgcgtgcggtatttgatgaggcctccgctgcactcggaatggatatgagagcgctctgctttgaaagcaatgaccgcctggatcagactgaatatacacaggcagcgcttgtgaccttatatctggcacagacacgtgtgctgacagaggccgggatcctgccggatgtcacagccggattgagccttggcgaatatgcagcgcttgctgtcagccatgcaatgcaggagcaggatgcgatccgtcttgtgcgcaggcgtggtattttgatgcagaatgccgtaccggatggcagtggtgcgatgtgtgcagtgctcggcatgaaggaagccgccgtagaggaagtgcttgcagagcgggaaggtgtgtttatcgcaaattataactgtcccggtcagctggtgatcaccggtgtgcgatcagcagtcgaggaggcggcggaggcgctgcgtgcatcaggagcaaggcggacagtcatgctcaatgtgagtggtccgtttcattcgccgcttcttgccggggcagcagaagagcttgaacgagaacttttacagaccccattttcagatccggatattccgtatattacaaatgtgacagcacagccggtaacggaaaaggaaccaatcagggcgcttctggcgcagcagatctgtgcgccggtgcggtggatgcagagcatgcagcggatgctggcagacggcgtggatacatttgtggaaatcggtgccgggaaaacactggcaggatttctgcgcaagctggatcggaatgtgaatgtctatccggtgacgacgtgggaagaagcacagattgtgatcgcaaagctggaggcccgagataagaagctgtggcgaagtgcataaaagaaaggaatcaaagccgtatgtcagaaaaaatagcagttgtgaccggggcttcccgtggaatcgggcgggcaatcgcctgtcgcctggcgggcgaggggattcgggtcatcattaattataatggttcagtggaacaggcagaacaggtgcggcgtcagatccgggaagcgggcggacaggcagaaatttaccagtgcaatgtggcagactttgcatcctgtgaaacgtttgtttcagatgttttaaagacatggggacgcatcgatattctggtcaataatgcgggaatcacgcgggacggactgctgatgcgtatggcggaggaagactttgaccaggtactggacacgaacctgaagggcgcttttcatatgatgaggttcgtatccaggcagatgctaaagcagcgatacggacggatcatcaatatggcatccgtcgtcggaatcgcaggaaatgcaggacaggcgaattatgccgcgtcgaaagccggtgtgatcgggttgacgaaggccgcagcgaaggagctggcatcgcggggaattacggtaaatgcagtggctccgggctttatagaaacggacatgacggcagcgctctccagtcaggcacgcgatgcggcagccgcacagattccgatgggacatttcgggacggcagaacaggtagcagagacggtggcgtttctggcttcggacgcggcttcttatatgaccggacaggtgctgcaggttgacggtggcatggtgatgtagaaccaggaggaaacagatgaaaaaacgggtagtgattacaggacttggagctgtgacgccgatcggtaatacggtggatgcattctgggatggtataaaaaaagaacagattgggattggtgcgattacaagctttgacacgtcggactataaggtaaaactggctgccgaggtgaaggattttaaggcagcagattatatggacgcgaaggcagcacggagaatggagctattttcccagtatgcagtcgcagctgcgcggcaggcatatgaggattccggactggatatttcaaaagaagatccatatgatgcgggtgtcatcatcggctccggtataggatccttacctgccctggagcgggaatatagccgacttctgacaaagggaccgacccgtatcagcccgatgtttgttccgatgatgatttcaaatatggcagccggaaatgtatctattcagcttggatttaaaggaaaatgcacaaacgttgtgacggcctgtgcatccgggacacattgcatcggtgatgcactgcgggctattcagtatggcgatgccgtgatgatgctggccggcggtacggagagctgcatctgtgaaaccggggtggcaggctttatgaacctgacagcgctttcgacggaaacggatccgatgcgggcttcgattccgtttgatcaggatcgcagtggttttgtgctgggcgaaggtgccggagttgtcatgctcgaggagctgaatcatgcaaaagagcgtggcgcaaaaatttatgcagagctttgtggctacggagcgaccgcggatgcgtaccatattacatcgccggcggaggacggagccggtgcggctcgtgcgatgcagcttgcaatgcaggaggcgggcattttgccatccgaggtagactatatcaatgcacatggaaccgggacacatcacaatgacctgttcgagacgcgggcgattcaccgggcgttcggggatgcagctcatcagctgcacatcaattcgacaaaatcgatgatcggtcatctgctcggaggtgcaggcggtgtggagatggtggcgacggtgcttgcaatccgggatggctggatccatccgacggtcgggacgaagagaacggatccggaatgtgatcttgattatacgattggtgcgccggtgcagatggaaatcaattatgcactgacaaattctctcggctttggcggacataatgcttctctgctgctgaagcgctataaaaaatgagaaagaacatccaggttggaggagaacgggatatggatacagaaaatctgatcagactgattcaggcagtgtcggattctgcattgacgggatttcgatatgaggaaggcggtgtgcgcgtccatcttacaaaaaagaaggaacaggtgacgggcaatgcagtggaattcctgatgcctgaggagccttcaaagcgatcggacaaagaaatagggcagatgaaaacggacttggcaaaggacgggcaggggcagctggtcgtatccccactcgttggtgtcttttatgccgctccgtcggaggaggcagcgccgttcgtgcaggtcggcgaccgtgtaaaaaaaggacagacactcggcattgtcgaggcgatgaagctgatgaataacatagagagtgaatatgatggaacggtgacggaaattctggtaaaaaatggacagaatgtagagtataaccagccgctgttccggatcggataaagaggtagtatgagacatttaaatatcagagaaatacaggaaattcttccgcaccgccatccgtttttactgctcgactatattgaggattatgagccgggccagtatgccatcggatataaatgcgtatcgtaccgggaagaatattttgccggacatttcccgggagagcctgtcatgccgggagtgctgacaatcgaggcactggcgcaggccggagccgtggcgattctgagtatggaggaaaacaaaggaaagacggcgtattttggaggcatacgggattgccgtttccgcggaaaggttgtcccgggcgataagctgcgtctggagacaaaaatcatccgccagaagggaccggtcggcatcggggctgctacggcatccgtggacggaaaggtcgtagcgacggcagagctgacatttatggtaggataggggaatattatgatcagaaaactattgattgcgaaccggggagagatcgcagtgcggatcatccgggcatgccgggagatggggattgcatctgtggcggtgtactcagaggcggatcgggatgcgctgcatacgaagctggcggatgaggcgatctgtatcggacctgcagcggcaaaggacagctatctgtctatggaacagctgatcagtgcgacgattacctcaggtgcagatgcaatccacccgggctttggatttctctcggagaacagttggttcgcgggtctgtgtcagcagtgcgggattacctttgtaggaccgcatgcagatatcatcgcgcgccttggcaataagcaggaggctaaaaatacgatgagccgtgccggtgtcccggtcattccgggcagtcatacgccgatcagatgtgccagtgagggaaagcttgaggcagaacagatcggttatccggtgatgatcaaagcggcacttggcggaggcggaaaaggcatgcgtactgcgtggtcaccggaagagtttgaccgctgctttgccatggcccagaaggagagccggatggcgttcggggatgacacgatgtatatcgagcattttgtacagcatccgaaacacattgaggttcagattctggcagatgcttatgggcatgtcgtacatctgggagagcgcgactgctcgattcagagaaatcatcagaagctgatcgaagaatctccctgtgatgcaatctcaccggcgcttcgtaaaaaaatgggagaggccgccgtacaggcggcaaaagctgcaggatatgtgaacgcagggacaattgaatttctgctggatggcgatggacgcttttattttatggagatgaa

SEQ ID NO: 1068 - DNA, 10598 bp, Unknown
  16S sequences of unknown bacteria
caggcttatagcccgtcttccacttcttgaaacgggctttgtcagtggtctggggggccgcccctcgcggggcggcccctttcgtcatgccggtttgttttcctgctcaaacaacttttcgcgcgtgatgttcttcagccacgtccccttgcggtaatgccagaagatgaacggcatcttcacgaactcatccgtacacaaaagcgcgtacacggcgagcaccggcaatttcagcacaaaggccgcgaggaagcccagcggaatggcgtagcaccacatatcgatgacgtcgcacttcaggccaaatttgctgtccccgccggagcggaaaatgccgcagaccagcgtggtattgagcgcgggcccaaagatatacacgcaattgatatagagcatgacgcgcagatattcccgcgccgtggccgtcaactcggcgtagcgcaccacaaacggcgaaatggccagaatcaccagcccgccgcacgcgcccaagagcagcgtaagccgtatgagtttgctcgcgtagcgtcgcgcgtcctccaggcggttttccccgatcaccttgcccagcagaatgccgcccgcgctggccatggcaaagcaggcgatggtgcccagattgcgcaccacggaaaccagcgaattggccgccaccgcgtccgagcccaaatgcccaagaattaccgagtatacggaaaaggccacgccccatacgatgtcgttgcccagcgcgggcagcgaaaggcggatgaagtcgccggataaggcgcgatttttcacaaacaggttccgcaggctgagcttgatatcccggctatagcgcgaaacgaacaggcagcagaccagctcaatgatgcgcgaaagcgccgtggcgatggccacgcccgccacgcccatgcgcggcgcgcccagccagccgaagataaacaccgcgttgaggaacacgttcagcacgaaggcgaccaggttcatcagcatggaaaccatcacgcggcccacggagcgcagcaccgaaaggtacacctcaatcacgccccagcacaggtaggtgacgctcatgatgcgcaggtattcgcatcccaggcggatcaattcggcgtcgtccgtaaaaatgcgcatcatccattgcggaacgcacagcgcggccagcgcgaaggccagggaaatgccaatggaaaagcgcatggcaatgccctccaccacctgcaccgcgcgcatatcgcccttgccataatactgcgcgcacagcatggtcgcgcccgtgcccaggccatagaacaccatgaacaggatgttggcgtattgcgtggccagcgaaaccgcggaaatcgcgtcctgccccacgaaattgagcatgatcacgtctgcggaattcaccgccgcgttgagcaaattctggatgactacggggatgaacaggcgcccgagttgccggtaaaacccgctatcccgctcttgggcctgcgtctggctcatactgcctcctgcgcgcggaactgcgcgtcgtacagttctttatacacgccgccccgctccatcaactccgcgtgcgtaccctgctcctcgatgccatgctcgccgatgaccacgatttcatccgcattgcggatggtggaaagccggtgtgcgatcaccagcgtggtgcgcccctgcgccaagcggttcagcgcgctctgaatgcgcacttccgtggcggtatccagcgcgctcgtcgcctcatccaggatcagaatgcgcgggttcttgaggaagatgcgcgcgatggaaacgcgctgtttttgcccaccggagagcaaaatgccgcgctcgcccaccacggtatcgtatccatccggcatttgcaggatgtcgtcgtgaatttccgccagtttcgccgcttccaccacttcttcaaaagtggcgtccggccggccatagcggatgttttccagcaccgatccggcgaacaggaacacatcctgctgcacgatgccaatcgcgccgcgcaagtccgccagcttgagggagcggatgtcctgcccgtccagcaaaatcgcgccctcgcgcacctcatagaagcgcgggatcaactggcacagcgtggtcttgccgccgcccgaggggccgaccagcgccagcatctggcccgacgggatgtgcaaattcacgtgttccagcacgctgcggccctcttcataggcaaaagtcacgtcttcgaagcggatatcgccctccacgtttttgaggggcttggcatccggcgcgtccacgatgtccggcttttcgcgcatcacttcctggaagcggtggaagcccgccatgccggtgttgaactgctccacaaactgcgccagccgccggatggggctttggatggaggccacgtacaggttgaacgtgatgagctccgccagcgtcagctcgccatccatgatcaaaaggccgccaaacagcaacaccaatagacccatcgcgttcagcagcagttccatgccgctgtggaacatggccatggcgcggtaaaagccctttttcgcgcccttgaagcgctcgttgccattgccaaatttgcggatctcatagccctcattggtgaacgccttggccacgcgcacgccggaaatgctcgattcgatgtcggcgttgatccccgccatgcgctctttcacctggcggctgctattcgacatgcgcttgcgctgggaaatggcgaaaaacagcaaaatgggcaccatgaccagcatcaccagcgccagcttccactgcatgccaaacagcacgataaacgcgccgaccagcgtgaccacggagatgaacaggtcttccgggccgtggtgcgcgagctccgtaatttcaaacaaatcgttcgtcacgcgcgacatcagccggcccgtgcggttgcggtcgtaaaacgtgaaggacaggcgctgcaactgcgcaaaaatatcgcgccgcatatccgcttccatataaacgcccatcatgtgcccaaaatacgcgatgatccactgcatagcacagcgcaaaagatacgccgcgcccatcgcgatgatgatcaggaaaaacgagcggtacatctgctggggcaaataggtttccagcacggtacgcgtcacgatggggaacatcaaatccaccagcgccaccaccagcgcgcacagcatatccagcaaaaacagccccatatgcggcttgtaataccgcgcaaacgcgcgcagattgcctcgtgtgctctttacgccttcatccatgtcggttgtttctctccttttccctcatgtctcgcgcgttagcccgcgagtttgctcttgatgtgcatccacttgtccgtgcggaagcgcaaatataccacgaccgcgcgggtggtctgatccagcgcgatggtgtaccacgcgccgttcaggccccaaccaaatgtgtaaacgaacagcggcgcgaccaatacgcggaacacccagatgccaatggcggacgcatacagcgggaagcggctatcgcccgcaccgcgcagtgcggaagcaatgggcaactgcgtggcgatgcccggcatgccaaaggcgatgatcttcagcaccgtggaggcgagccgcgcgacctcgggatcgttggtatacgccagcacgatgtattgcgagaataaaaggaacagcgcggcgatcagcagcgcgaccagcaccgaatagcgccagatgacccgcacaaaactcttggccttctccggattacccgcgcccatgttctggccaaccagcgtggtggccgccacgccgaacgcctgccctggcatccaggtgagcccgttcaccgaaaggccaatctggtgcgcggcaaagatcaccgtgcccaggccggataccgtgcgcgcgaacatgatgaaaccaatttgcatgatgagctgttccagcccgctggtaacgcccacgccgaaaatgcgcttgagccattccttgcgcaggcggaaatcttcccgaatgtgcaggcgcagcttggagtggccgcggaacagcaccagcagcgccagggtgcaggcgacataacgcgaaatcgtggtggaaatcgccgcgcccgccacgcccaactccggcatgcccaggcggccataaatcaaggcgtaattgccgatgacgttgaacaagttgcccgccaggttatacgccatgggcaaccgcgtgagcccgatgccgcgcaacgaagccgtgcaggcaaagccgaccatggccggcagcatgcccagcgccacaatttccaaatactctttggcataaagataggtatcttcctgcgcgcccataaaggtgacgagctgaccggcggggaaatacagcacggcggaggcaaacgtccccaaaatcaacgaaagcgtgagcgccgtgcgcgtgatggagcgggcggcgttttcgttgcccgcgcccaccgcccaggcgaccgccgccgtggtgccgatgtgcagcgcggtgagcacgccattgaccaggttcaccggattgttggtaagacccaccgccgcgatggccacagcggagatatcggtctgccccagcatgatcgtgtccaccatggcgaagagttgcgtgaacaccagctcaacgagcgaaggtaatacaatgcgccagatcgttcgcctatcctcacgatccagcgcaattcccttatgtatcagctgcatacccatctctccaatatagaattctgtcgcttcctattgtacgccaaaatcatagaaaaaggaagagctttgacgggtatctcttctattttacgtttttcgaagttccttcagcaattcagcgcatacacaatcgcgcatattcagaaaaatacatgcataacattttacgccgcatcaaaaaaatcagttttctgttgcagcctcatctaagactgcccgcagtgccggcaaggtttcgaaaaaaacggcggacgcggggaaccgtccgctcgtcccgcgcccgctattttttaatccgcgccactgccggtgctgcccgcgccgctgccgccgcccgcagaaaatcccccgccgccgccagcgccatccgcagccacgctggcgttgtacgcatcttcctgcacgcggttcaaatcgccataccaacgcgcgctgaaccacagcatgttgggggcgaaccattcgtcgtatcccacgctgcccgccgggaaccaaatctcaaaggcatggaacaattcctgctcttcgcccagcgccacggcgtatgccaacatgcgcttccacttggccgcgtcttgcccgttcggcgcaagttggccgggcacggttttcaaatggctttggaaagcctgccaccgcgccagcgcgttttcgccttcttgcgtgagcaccgtgcgcgtgcgcagggcgttgcccagcaaaatgcccgccgcccaaaccgccgcgagcaacacgcccgccgccacggagccgagcacccagaggccatacggaatgcccaatgccgctaccaacgccagcgcgatgagcaactgccatagaaagcgcatgccgccctgcaggcgcaatttttccgtgaggcccagcgcgtcaaaatccgcgtctaccgcctgctcgaacgtttcgcggcgctccacgctccactgcggctcttccgcaatgcgcttgcgcagggcgttcagggaaatttcgcccactccatccgccgcttcttccagcatgcggtacagcgccttttcgtgcggcagcgcttggccggacattcccttgagcgcaagcgcgatatcatcgtcgcccgccgcgcgcatagccacaaatcccttgagggaaagggccatcagcgtggcggtaaactgcctgccccggtcgcccttcccgccgtcataaaaatggatcaggcggttgacaagcgcgcccgccaaatcgctgggcggttccgcctggaatatgggcgctgccgctttgtgtcgcgcgagcttttcttccagccgctttttgcggtatagcggccagcccaccagcgaggccaccgcgcctaacacgcccaacaacagcaacgcaaacccttgcgggctatcctgaaaccgcaaaagcccccgctcctggttggcctgcctggcgagttccgcttcttcctcgagaatgccctccagcgccgcgccctcctccacgtagccgccggtaaaaagcgcgcgcggcatggccaggcgcatatccacaaccgtgtaatccggcacgtcttccgcgcgcaggacagcgcccgcgccgccatttttctcaatcgtgccattcaacgggccgtgcgcccaggcgaaccattcctcttccgtcacgacgctgggcaaaaagagccgcgcgctgaccacgcccgtgtaggagatttcactggcgctggtcaaatcccagcggaattcggccacgtcgtcgtgcaaaatcacagcgttttccactgtgtaagcgatgcggatttcgcgcgcgacgttttcgctgcggtgatagatttccacccgcacatccgctccatcctccaccacggcaaagcagccttccggccgctcctcgctgggcgcttccagcaaggtgagcgcttccccatccagcgaaacttcccaatcgccgagggaataccaagcatcccgccggtagctgcgccaatagcgggaatattcctggtcttcaaagcgcacgcgccaggtttcttcgatgcgcgcgctgccgtcctcttccagaaaaatgacgaaggccgcgctgtcctgcgaggcgttggcgctcgccgccgccggcagcagcaaaaacagcgccagcgcaacgagccatatcctgcgcatgctctttctcatagaaaaccgtcgtcctccatcaatcgccaaagctgatgccgatttgcttggccgtctttaccatctgatgatccggcggcaccagcttggtgatgcccgccaccttgtccaatgggttggatgtcaccgtatcgccatcgagcgccacggtcacgccgtatttttcatcgcggatcagttccgcggcatgcacgccaaagcgcgtggacagcacgcgatcgtagctggacgggctgccgccgcgctgaatgtgccccggaaccaccgcgcggcactccgcgcccgtgatctgcgccacctgttcggccacgcgatgcgcggcagtgcggtaaggattggcggtgagatccttctttttcatgttcatttcttccttggaacgggcgccttcggccacggcgatgatcgtgaagcccttgccattgcgattgcgcgcgttgacgatcttggcgatgttttcaatctcataggggatttccggcagcaaaatcacatccgccccaccggcaatgcccgcctgcagcgtgagccagccggccttgttgcccatgatttccaccaccatcacgcggccatggctgtccgccgtggtatgcagccggtcgatgatgtccgtggcgatgtccgccgccgtgtggaagccaaaagtcacgtccgtgccccaaatgtcattgtcaatggtcttgggcaggccaatgatgttcatgccctcgtcagcgagcaatttcgcggtcttgtgcgtgccattgccgcccaacgtcaccaagcaatcgagcttcatccacttgtaattgtccttcatggcgcgcaccttgtccacctgatcctcgccaatcacgcgcatcgcgctatacggctggcgcgaagtgcccaaaatcgtgccgccgcgcgtcaatataccggaaaaatcccgcgaagacatctcgcgatattccccgtgaatcagccccgaatagccatccgatatgccgacgatctccgcatcgaacatttcatacgccgccttggccacgccgcgaatcgcggcgttcaagcccgggcaatcccctccgctggtcagcaaaccgattctgcgcttcacgtcaaccgcttcctttccttcatctcgtattgctcgttttcatccctatgtacttgctattatatcatgaatcgcgcgccatctcaaccaaatttttcaaagcgcgcgcgcgatgagaaaccgcgttcttttcatccgcgctggcctcggcaaacgtcttgtggagatcgtgcgaatagaacaacgggtcatagccaaagccgccctcgccgcgctcttccagcagcacctcgccctcgcaatcgccgcgcgcgatgagcgtctcccggccggggcgcgccaacgccaccgcgctcacaaaccgcgcggtgcgcggcgcaggaaaatcgcgcacattggcgacgagcagggcgttgttcgccgcgtcgtcgccgtgtttgcccgcgtagcgcgcggagtacacgccaggcgcgccgcccaggcaatctacttccaggccggaatcatccgccaaagccgcgcaacccgtgcgcgcgcacagcgtttccgccttgatgcgggcgttttcctcaaaggtcgtacccgtctcctcgatttccatatcgacgcccaactcgcccatagaagaaacgtcgtattccgcgccaaagagcgcgcgcaactcgcgcaacttaccggcgttctggctggccagcacgagcttgggcttgcggaagagcacgttcgcgcgctcgcccagcgccgcgcgttgctctcccatcagcgtttcgatcccgccctgcgccagcgcgagtagcccgtccagttcctctttggcaaaaggcctgccctcgcccgtgccctgcacttccacaaattgcatttctccccgcgcgtcccgggccatgatcacgttcatatccacctgcgcgcgcgaatcgcgggcgtaatccaaatcgagcgtaagctcgtcctccacaatgcccacgctcaccgcggcaatctgccgcacaatgggcgaatcgaagagcgcgccttgctgaatcaggcgattgaccgccaggcacacggccacaaaaccgcccgtgatggaagccgtccgcgtgccgccgtccgcttgcaaaacgtcgcaatcgacggtgatcgtgcgttcgcccagccgcgaaaaatccatgcacgcgcgcaacgagcgcccgatcaggcgctggatctccgtgccgcgcccgtcttttttgacgccgtcacgcggcttgcgcttgggcgtggagccgggcaacatggcgtattccgccgtgagccatccgcgcccgcttccgcgcaaaaagggcggcgcgccgtcctccaccgaagcggtgcacaacacctgtgtgcgcccgcattcgatgagcacgctgcccgccgccatctgtgtgaaatccggcaaaatccgcaccggcctcaactgcttttccatgagtatttcccctttcaccgcgtattttttcgcgatttccctattcgaaaatcgcgcttgcctgcgcttgcaaaaattggtcttccacctcggcggctacgtttacgaacgtgggcacggccagcgtgtccgcgcctgggtcgtatggctcgccgtccacggccacgcgcacttcctcgatgccatcgaactgcgtgcaggtgagcaccagcgcgcgcagggccatgcgccctccatcgctctcctccgccaggcggatgaattcctccgtgaaattcacggtcgccacgccgtcttccaccgtcacgccgatcaggccgcagcccgtgggcagcgcgttgtccaaggggcttgtggcgctcggacccttgagcagttcgagcaccgccgtgtccacatcggcgttgccagccaccatgcgcgtcaccggcacgatcagcgaacccgtatcgcccgggaaataaagcgtgaccatctgcgcgtcctccaccggaatcgaagagctttccaaattgagcgcgctgcggtggaaatcgcccgaaacgctggtgccgtgcgtgagcgtttccatttcttgcccgcccaccaggaaacgcaccgtctcaatggtgggaaactcggtaagcgtttgcaccacggcgttcaccatcacggattccgccgccgcgtcgggaaggttgagcacttcttgggacaaatcgatgcgcgccaccccatcgctcatcacgtccagatccatggacacgttttccggcaacaccgtgcgcaagcccagccgcgcggcttccatatcgttatacgggctttgcaccatcagggaaagtgtcgccttggcgatgccgtccgtttccggaattgagcgcatcacgggcacgagatagccgctgttgtcctggtagtacacgaccgtgtccaccgtcggtcccggcgtggctgtgggctccaaggcctgcgccgccaaagtgggcagcggactggcgctttcctgtggcagcgcgttttcctctggcacggtttcttccggcgtccataggcgccaagccaggcacaccgccaccgccacaatcagcaatagcacggccagcagatatagcttgcgctggttttcgctgctcttcatacaataccccctcgccatttgtccagcttcgattcaatctattccgcaagggggacgggtattcgcgccgccggtccaggccgtccattccagtatagcacaattggccgcacgcaaaaagcacgggaaggataattcccgtgctcaggggctgtgaaaaaactcttattgttctttcatagcctcagactgtcaaaaccctgaggagagcgcgagagggacggagcttcgccgccgccagtggcggaaacaggcga

SEQ ID NO: 1069 - DNA, 8941 bp, Unknown
  16S sequences of unknown bacteria
cacttcagcccttcgggccttcgacggacagcgaccgggacgggaatgcatttttcccgcaaatgcaagcatttgctctgcaaaaaatgccagaaatgacgtgcacgccgtcatttctgatttaagcctcgttcttccgatactttgtcaatgctctgggctcccctttgagaaaggggagctggcggcgttagccgactgaggggttgcctttctcccagcgcgagcgaaaattgccgagaccgccgcgttttgacacggtttctgtcttgtaccaatccccatgatgtggtataatgaaagaagcatcttacaaaatcgcctttgcccgccgttgggcgcggggcagaaaacggcatgaggtgaaagatatgtttacgttcgatacgttggtggatcgcagccagaccggcgcggtcaagtgggagcggcgcacggaggcggaaaagcaggcgggcattgtggccatgtctgtggcggatatggaattcccggtggcgccttgcgtgcgcgaagcggttgtgcgcgcggcggaacacggcatttatggttatacggatcccaacgagcgctactttgccgcggtgaagcgctggatggcgctgcgccacgattgggacgtggcggcggaggacgttacctgcatccacggcgtggttccggccattgccgtgtgcgtgcgcgcgttcacgcaggtgggggatggcgtgatcatccagccgccggtgtacccgcccttccggcagatggtggaaacgaatggccgccgcgtggtcaacaacccgctgatcaacgagggcgggcgctatcgcatggattttgaggatctggagcagaaagcctcggatccgcgcgcgaagctgatggtgctttgcagcccgcacaatccggtggggcgcgtgtggacgcgcgaagaactggaacgcgtgcatgagatttgtaaacggcacggcgtgatcgtggcttcggacgagattcactttgaccttctgccgcacggcgcgcacacggtgtatgccaaagtcgatcccgacgcggtggtgctcaccgccccgagcaagacgttcaatgtgccgggcctgcagctttccaacgcgatcgtcaagaacgccgcgcgccgggaagcgttccgcgcggaactgctggcctgcggcggctcgaacatttcgtattttggctatgcggcgacctgcgccgcctacgagggcggggaagaatggctcgacgcgctgctggactacctgcgcggcaatgaagcgctggcgcgcgaatttttcgccaagcggttcccgcaggtgcgcatttccccgctggaaggcacgtatcttctgtgggccgactgccgcgcgctgggcgtgccggatgaggagcgggacgcgttcctgcggcaggacgcgggctggattgtgaacgcgggcggcatgtttggcgaagagggcaagggctttgaacgcatcaacatcgccctgccgcgcccggaattgcaaaaagcgctggatcggctgtctctggcggcgcaaaaagtaggattctgagtcgcgcggccggattttccccggagacggttgcatgaatagaacaaaaagatacatgtacaattccgtcgcggcgttcacggcggaaatcgtcaccatgattctgggcttcgtcacgcccagaatcattctggtgacgtatggttcggagctcaatggcttgacttcctccattttgcaattcatgtcgtatttcaacttggtggaggcgggattttccaacgcggcggtgtacgcgctgtacaggccctttgcggataaagacgaaaaggccatcagcgccgtggtgtccgcggcgcgcagaatgtatctgcgcgccgggggaattttttgcgcgctcgtggtgggactggccctgatttatccgctctatatcgatgtggatggcctttccaacttggatgtggggctgttggtgctgatcctgggcgtgagcaacgtgctcaattttttcacgctttccaagcatcgcgcggtgatcacggcggatatgcgcgtgtacgtcatttcgctttcgaacattgccttttccctggcgaacacgctgatcatcgtttttctggcgcaaaatggcgtgggcttggtggagctgcgcttctgggcgctggccgctgcctttttgcgggcgggcattctctcgctctattgccacaagcgctatgcctttatcgatgaaaaggcggagccgaattttgccgcgctgaataagagcaaagacgcgctctttcacgaagtgctctacgccctctataagggcgcgcccatcgccttgatcaccctaatcctgcgcgatatggcggtggtgagcgtgtacaacgtgtattccatggtgatcatgggcatcgcgggactattggccgtgttttccagcgggctcgcgccctcgtttggcaacgtgatcatgctgggcgaaatggatacgttgggccaggcctatggggaatttgaatttacgtattattccatcatcacggcggtctacaccgtggcgatggtgatgatcatgccctttgtgcgcatctacacgcgtggcgtgacggacgcggtgtacgatctgccggtggtgggcctcttgttctgcgtgaacagcctggcgcacaattttcgcatgccgcagatgatgctcgtgtcggcgggcgggcactatcgggaaacccgcagccattcggtgattcagctcaccatcagcgtgggtctgggcgcgctcttgattcagccattgggcattgccggcatattgatcggcagcctgtgctccaatctgtatcgcgccaccgcgctcatccgctttgtgcccacgcagtattcgcaattgcgttcgcgcaggagctttttgcgcattttgcgcgtggccgtcacggtgctgctcggcgtcctgccgttttgttggattcctgtcgcgccggatggctatctctcctgggcgctgtgcgccctgggcgtgtgcgcgtacgcggcgctgctttccttggcgtccgccgtgctgttcgagcgcgcggagctgaaaaacgtgctccggcgcatccggcggctgcgaagggcgtaaaatgtgaaaaaggggctgtgaaaaagcttttgttgttctttcatagcccttagagcattgacaaagccgatattttattcgaaattgcaagattttatttttaaatagcgcaatcttgcgattttttaagtttctgcccatcggtcagctttgctgatagcgtagtagaacgatccctcagtcggctaacgccgacagctccccttacgcaggggagccttttggaaagtgctacatcataagaaatagcgccaactaaatatatttgtatagagaaatggacatatagcacgaattattgactgaaacagataaaaacctttggatggtgtgcctccatgtggcgcagcagtgcccaaaaggctccccttggaatcaagggggcgcacgaagcgcgcgcgctgtgcgcgaagcagcgcgaagtaagcccaatgaagcagggagcatctcaagcgagtttgcgagcgcagagaggcgaccatgctgaattgaggaatgctggcagcaaagctgactgaggggttgcgaaagaacttttgctgttttttcacagccccttttaagcatacggcttattttttatcccagactctcgctctgaatgttgcgcagggcgcgcatggggctatgcgcgtcgcggccaaactggtcgtgcagcgcggcgtacagggcgtagagcttttggtagatggcggcgtccctggggttgggccggtagaccgcgtccagcaagccgcccatggcggaagcggcctgcgcgatggtatcgtagccgccgcgcgccgcgcctgctgcgaccgcgccgaacatggcgctgcccaacgcgccggcttgccgcgtgcgggccacgcggatttcccgccccagcacatcggcatagatttgcagcatgagcgggtttttgtgcgcgatgccgccgcaggcaaagaccgagcgcacgggcacgcccgcctgttcaaacgcttcgacgatggtgcgcgtgccaaaggcggtggcctccatcagcgcgcggtagatttcctcgggcttggtgcgcagcgtcatgcccaggatcaggcccgtgagatgcgcgtccaccaggatggagcggttgccgttccaccagtccagcgcgatcagcccgctttcgcccgcccgcagctttgccgcgcgcgcggtgagaaattcgtgcgcgctttgcccttcttcctttgcctggcgcgcgcattcggcgctcaaacaatgctccacaaaccagcccaataggtcgcccacgcaactttggccggcctcgtaggccaaaaagcccggggccgcgccgccttccactgcgccgcacatgccgggcacggcgcgttcctcctgggccagcaggatgtggcaggtggaagtgcccatgatcatcatcagttcgcccgcgcggggcgcacccgcgacgggaacggatacgtgcgcgtcgatgttcgccgtggcgacggacgtgccagagcgcaggcccagccacgcggcggcctcgggatgcacgccgcctacgcgtgcgcccagcggcaatagcggccccgccagcttttcttcggccacggtggcaaagcgcggctggagcgcggccaggtattcccgggatggatagccgtcccgcgaattccacagcgccttatagcccgcgatgcccgcgctgcgcgcttcgctatgcgtgatttggctgacgatccagtcgcccgcctccacaaaacgcgccgcgcgttcgtagacctccggcgcctcttccagcacctgcagcagcttgggcagcatccattcgctggagatccggccgccgtagcgcgcgaggaatggctctttgcgcgcttgcgccagttccgtcatgcggtcggcctgcgcctgtgcgccgtggtgtttccagagcatggcataggcgtagggattgttttcgtattccggcaaaaagcacagcggcgtgccgtccgccaaaacaggcaggctcgtgctcgcggtgcaatcgacgcccaggccgatcacctccgccgcgttgacgcccgcctgcgccagcgcctccggcacgacgcgccgcaggcattccagatagtccccgggatgttgcagcgcccagccgtgcggcaaaggcgcgccgtttggcaagcgttcctgcagaacgccgtgggggtattccatcaccgcgccgcccagttcccgtccagtttccacgtccaccacgagtgcgcgcgccgaaagcgtgccaaaatccacgcccattgcgtaccgtcccattggcttacattcctctctctacgaccgcgctcagcgcgagcaagatatggcacaaaaaatacgtgggcaagatccacgccccagcagcgcggttgcccgcaaaatcgttttccgcgatcagcgtatcggacagcacgatgcaaagcagccccagcgtgcgcgccgcgcccggcgcggccagggaaaagcccagcgaagccgcggaaatcagcatatagagcacgatggccaggcgcatgcgcgcgtcgctcacgcgcggcagaatgcgccgggcgagatacaggccataaccggctgccagcagcgcgaacgcgagaaacggcagcggcgcgagcgaagcgtccaggagcacgtcccacaaaaacagcgcgtgcgccgcgaaaaagccgccgatgccgcacaggtaccagcccgtgcgccccgctttgtgcgccatgaaccaatccgccgccacggatacgatcaatccgaaaaagagcggcgaaaccgcgccgcgggctgccagcacaatcgccgcgcagctcagcgacacgatggcgttgagcgcgaaccagggccgaacgcagcgcagcgcagctgcggccagcggaatggccagcagcgcggcataaacccaggcgctcatgcctggggcgcggcggactgcgcctgtagccggtcggcaatgcggttgaccgcccggtcgatgtctgccgctgcgcggcggtagctggtgatgcccagggagaacgggtcggaaacgctgcccggcagtaaggcgtattcggtgagcaaatgcgcgtccgcgttgggatacatccgcttcacttccatcaggtgcgtaggcgtcatgcacagcaccaggctacccggttcatacacgtctttgaagtccttggcgcggtgatagcgcaaatccagatggtattcgtccatcacttcgatggcctcgtacatggccggcatgcccgtcatggcgaacacgcccgccgaagtcacctcatatccgctcattttgcgcgtgagcagcgcgttgcgcatcagcacttccgccatggggctgcggcaggtgttggctgtgcaaaccatgatgatcttcaaagcatccacctctttgctgctttttatagggagattattgggtttccaccacgcggaaagccgccgcgcgcatcagccggttcatcactgccaggcccacgcccgcggtgggcacgtcctcggcatagatggtttccatgccgtcctcatcgagctggcgcagcgccgcgaacagctcgcccggcgcgtttttcagccggtacacgcgccgcgcgccgtaatccgcctgggaaaaggcgaggatggccgcgcgtccgtccgccgcgtcgtacaggcgggcgatttcctgcgccgcgcgcgggccggtgacgatggtcacttcgcccttgggcgcgtagtgcttgtatttcatgcccggcgagcgcgcttggctgcccgcttgcaactggtgcagcacgccctcgtccacatccacgtcgcccacgacgccctccagcatttccagcgtgacgccgccgggccgcaaaatgcgcggccgcgcgcccgtcacatccaccacggtggattccaggcccacttcgcaggggccgccgtcgagaatgaggggaattcttccctccatatcctccagcacgtgcgccgccgtggtggggctggggcggccggaacggttcgcgctgggcgcggcgatgggggtttgcgcggcggaaatcagcgcgcgcgccacggggtgcgagggcatgcgcacggctacggtatccagccccgccgtcacttcgcggggcacgcgcggggatttgggaaagatcagcgtcatgggcccgggccagaaggcgcgcatgagcttgcgcgcgcaggcgcagggctcgcccgcgatcaggccggcaaggccgctttccccggcgatgtgcgcgatcagcgggttgtccgccggccggcccttggccgcgaaaatgcgcgcggacgcttcagcgttcagtgcgtccgcgcccaggccgtatacggtttccgtggggaaggccaccaattctcccgcgcgcagcagcgccgccgcgcggcggatgctggcgtcgtccgcctggcaaagctccgtatgcacgatttacgcctcgctctccatccgcgcggtctgctcggcgagcgtgagcgcggaaatgatttcgtccaaatcgccatccaggatttcctggatgcggtaaagcgtgaggccgatgcggtgatccgtcacccgtccttggggaaaattgtaggtgcggatgcgctcgctgcggtcgccggtgcccacctgcaggcggcggcggttggcgtattcgctgtcggcctgctcgcgcttcaaatcgtatagccgcgcgcgcaacacgcgcatggccttttcgcggttttgaatctgcgagcgctgatcctggctggtgacgacgatgcccgtgggaatgtgcgtgatgcgcacggcgctgtccgtgcggttgacgtgctggccgcccgcgccgctggcgcgataggtgtcgatgcgcaaatcgttgggctggatttccacttccacgtcctcggcttccggcagcacggccaccgtcgccgtggaggtgtggatgcggccgccggattccgtcaccggcacgcgctgcacgcgatgcacgccgctttcgtatttcagcttggcgaaaacgcccttgccctgcaccagcatcacggcttctttgatgccgccgatttcggtttcgccctcgtcggtcatttccactttccagccgtgcttttccgcgtagtgctggtacatgcgcaccagctccgcgccaaatagtccggcttcgtcgccgcccgcgcccgcgcgcacctcgatgatggcgttgcggttgtcgtccgggtccttgggcagcaaaaggatgcgcgcttcctgcgccttttcttccatctgcggctccaaggtttccagctcttcccgggccatttcggccagatccgcgtcgtcctgcgccagcatttcgcgcgcgctctcgatgtcctcccgcagcttgcggaaaccgcgcgcgaattccgcgagctccgcgatgtcgctgtgctcgcgcatcagcttttgaaagcgcggcgcgtcgttgatcacctcgggcagggtaatctgcacggaaagctcctcgtagtgggcttccacggattccagttgccgggcgatccgttctagcattttatcttccatactgggttaaatcctttctatctgttcgttgacaaacctttggtttgtgggcgaggattacccggccgcttgtcttcgcaccgcccgcgccttcggcggggcggtgttccggcgctgcggatgcccttcgggcgtgtcctcgcgccttcagccgcttcgcggcctccaacggccagcgaccgggacgggaatgcatttttacccacagttcgcaatcgtcgatccacatcgcacgcaaagcgtgcttgtggctcttgttgctcactgggcttacttcggcctgtttcgcgcacagcgcgcggccttcgtgcgcatcctcaattcgcaatggtcgtcctgctgcgcctgacggcttgcagtactcccttgctcattgggcttacttcggcctgtttcgcgcac

SEQ ID NO: 1070 - DNA, 28936 bp, Unknown
  16S sequences of unknown bacteria
tcttggttctatgcggtgtctttcattaaaatccactcactttggggttgacccaatctttgacgtagaacgaactgatttggctcgcctacaagcaaatctggaaataaaaaaggctacaagtgtttaacttgcaaccttcaaaagcctatgggcgatacaggactcgaacctgtgacatcctgtgtgtaaaacagacgctctaaccaactgagctaatcgcccttagatataaagttcaatattgcaaattccgcgcgctctatcaagactttttttatacttttatcatttatatttttcccagcataaccgcgaaccaagcaccgcaaccagcatattgcaattcactgttcggaaaactgtttctctgcgcgcccacacacctcggtaacattataaaaaattttactgaaccgcttttttgggtgaggccacaagttaacccgcgatatgctttaaaaaaaatgaaagaaagaaaaaaatgtcctaatcttcgcatgcaatcagcgcgggggtccttcgcgcgctaaatgcgcaaattagaatgttactgcaatattcccctctcgtatatttttaaaattttcaaggaagacgacccctttgaagatgcacttcggctcgattgagacgccaaaactcccgaagaatcaccggcatttccgcccgagccttgcgggcgtgacgttgaagagccgcctgtggaagcgccgcctgtgcgccttgccccgtccgagcccgacgaagacgagctgtcctgcccgtagaaggctatcagcctgtattctgcaatcccgcgccttacagttatctctatctttaaaaggctcgcatttacacctgcatttttgcgcggaacaaacctcgcgccccgattctctatgtccgtcaaattttccacccaatactttccgtcgtccacagtgccaatttcgccccttattgccctgtacaaatcgacatcgtaatcctcagattccaacacgcacaaaatctcaagcgtcttttccgacgccgaattgagattcacctttgaaaaattctccgtagaaaaattttcggaaaacagggtatatagctcagtggggttcccgtcgtcgtcgaaaaacagctccttcgcattctctataaacgcaagctcggaaaacgattttatactcctgttgggggggcgcgccgtacctctctcgtaatcctcgtattcagccccgaaaactccgcgcgcatcgtcggagtcgctccagtctattatgcagtcggcagcctgctgcgccgacgccgagccgattccccattcctcgaacagttttacgaagctttcggcgtccattattccaagcggtattttgccgctttcgtcgcttattttcacgtcaacttcacagccgtcgaaaactattcgaccgtctgacaggggtctcgaccacccctggctttcggagtaaagccctccgtctatttccgcgtattcgcgcagcactgcaaccgcggcgttcagcgcgctctcggcatcgagtttaagctgctgctcgagcatcgacgacgccctcggtttaagcctcaccgacgcaaattccacgattaccgcagccacaatgcccgttatcgctatcagcccaagcacaaaaatgagcgcggcggcgcggcgtttcccaaaaagtttcattttatgcctccgtcggtaaaattatcgagccttatgaggcgttcgtccgtctccgctccgtcggaaaacgttatttttacgtattgcggcattgtggagccggttgtggtgtcgcgcagttggggttcgagctgccacgccccaacatcgtcgtagtaccagtattcgacatttgccaccctgcgggaaatctcgcttctgtaaagggcgcactcttggtcgtgctcctcggattttacaaacttccatatcacagacaaaaccccctctttatattcgagccagcacagtttctcgggcgaaaaacctgtgggggaaacgtaaaacgggtggtcgtaagcgcagccgtacgccaaaagccaatcgcctgagcctatcgtatcgggatttttcgagacgtaaactgtcttgtcggaatttgaagcgaaagtttcgccaagatcccccgacgactgcacggaagacgtggaaaacgccgatcttaaaaacccttcgacaccgtcggcatgcgacttcaaagagccccccatttcaaggctctctgaaagcttagacatgtcaaagagaagcgccacccctccaaacatcacaagcgccgatattgatattgcaagcacggcctctatgagtgtaaagccgcgcgacaccccgccgcgcgcgctgcggcagccggaattcatctcgcggcctcccttctggattcatcgagatagtcggtgcggtcctcgactatgtcgtcgcgctcggtggaaatttcgtaccagcccgggcgcactacaaacattctccgcacggcctcgaaagactttcccctcacagttattacaagctcgaacaaatcggttatgggggtggattgggcctcgccgctcgccttgtagatatcgccgtcgaatgcgtctatgtctatttcgtcggaaagcgaatcgtaatcggatactcccaaaaccgcctcgacccccttccgtatatcggcctccaattccgggttttccccctccattacgagcggatatacgctgttgtagcaaacttgcgacaccataaacgccgatatcgaaaatagcgcgagtgccaatacggcctccgcgagggagaatccatttctctcccctccgattttaccgcgcccgccactgcgcagattatttgcggaacgcctaatcatctttctcctttttatcaggatatgtttcgtcgcccgaaaacggatcgaaaaaaacggtttttacatagtccgaaaaggttatgacagcgcaaaacggtgtcatcgctccatcaggcgaaaatcgcacttcgcggacttccccgtcagggaactccacgccgggattgtcgattatctcaggattgcgcgtaaaaaacgatatttttacgttgctttcggcatcgtctccggacgaattttcggaatcggatttatcggcgcgctcgtcggccttgcgcaaatatagcctcgcgatttccttgcgggtcttaaaatcgcacacgctaaaatagccccttggttggaatctcagaaccgtctgttcgccgattttaacggactccgcgcgcgccctcaagacggcagtctttaatattgaatcggcgggcctgtcctccaaagcggaggaatcggggaacacgagcgttcccgcgagcgttgcgacgacagccgcaagcgcaattgcaaggattatttcggcgagcgtaaacgcgccccttgcgcgccgcatccgcacatcttccgcaatccgcgccattttgcgagaaatccgccgcaagcccaccttacgcacgcaatcttaccaatttccgatatcgtcttcggttccgctcttgccgtcggggcccgaggaccagacatcgtatccgtccttgctcttcactgccgggcagcggtactggtacggatttccccacgggtcggcgggaaggttgcggacgtacgggcccttccatctatcggaaaccgcctcgggagcttcaagcagcgccttcaacccctcctcggttgtgggatagcgcccgacagccaatttgaaggtcataagcggcgtctggagcgagccgttcacgaaagactccgtaatcttagtctggctctccgacatagttttgtcgaggttgacgaccacaataaacgccagcattgaaatcattgctattgcaagcaatacctccataagcgtgaaggcggctcttgaaaagcgcgtctttgcggcgcgcgcgcggattctattatttttttgtaatttcataaaggtttacatcttataacgcatggcatctgttattgtttcagacgaaagaaccgtctcttggcgcactccatgcgcgtgtgtcaaaaccggctgccggagcagcccgcaaaatcgggcctccgaaacttcatgtataattgacaattttacgcgcatgtcaaaacacaaaatttgcctttctcaaaaaaaagcccgtctcaaaaagcggcataccaacgcccctttcccaatttttgcaaaaaaacacatctgcgaagcaaaaatggttgccaattttaaaaacgcctttttgattttcagaaaggaaattttcatttaccgctttttttaggcgcctaaacggcgcaaaagcggaagctaaacaggatttaaccgtacatgaaagtcatcagagcaaaaagcgccggattttgtttcggtgtggagcgcgcaatcggcatagcaataggctgcaccgacggcgggcgctacaaagtctatacggacggcccgcttatccacaataggcaaatgatggaaaggcttcaaaaggacggcattctcgaaatcggagactacaagagcgaaagctctatcgaggacgaaatccgcaaatcggacgaaaacagcatactcgtatttagagcccacggagtatcgcccgaaaggcgcgaatacctaaaatcgctcgggatgccctgcaaagacgccacctgcccagacgtcggcaagattgcgggcatcataaaaatgcattcaaataaaggctacacaatcaccatagtcggcgacccaaaccacccggaagtaatcggcctgctcgggtacgcaggcggacgcgggtttgtggtaaaatcgagggaagacatcgacaagctcgaaaatatcgagggcgagatatgcatggtgtcgcaatcgacaatgtttacggacgactaccgcgaaatctccgagtattttaaaaagagattcccaaacacaaaggtaatcgacacaatttgcggcgctacaaaagagcgccaaaaagacgttaggcagctcgcccaagacggcgcggaggcaattatcgttattggcggaaaacactccgcaaatacagtaaagctcgccataatggccacaaggacggggctgccatgctaccatatcgaaactcttaaagagctcgatatcgactccgtaaaaaaatattcggtagtcggcgtcaccgccggcgcctcaactcccgattttctgatagacgaagtctgcagaaaactcgaaagcctataaggctattaaaaaaatctacccccctaaaaccccatatataacgttaactatatgtatatattaagaattttaaaaatagctgtgctcatcgccgcagcggtttcaatatgctcgtgcgataaaaaaccgacagtaagggagactgttaaagaacagtccacccaaaaagttaaaacaaaaaagaaaaaggtaaagaaggccaagaccgaacagaccaaaaccgccgattccaacgaaccccaatgggataagcgctttctgtctttcgatatagacacggaaaatgtcgtatccggcggcacattctcggggagcgtggatatcagcgctccgtttaaaaacgcattcgactcttccgacatatctgtcgaattgtcggtaaacggcgtgtcaaacggagtgtcgatgaatgttcccatgcattatgtccgcggcaattcggacaaatcaacgtggtcgttttcggtcataattccaaaatcgggctcttaccgctacaatgtgtcggttaaagcctcggggcaaagtttcttctcgccggaattcccgcttaaaacaacaaaaggatcgggattgggtatatataggctgtctaagaaagagccttcgcacttctatttgaagggctcggacaatatccgtggaatcggcgtcgatttcccgctgatactcatcggagacgcgagagaaaaggcgctcgacgccgtcgcaaacgccggcgcaaatatcataagggtaaaactctccgcgccgacatcgcttataatcgcgtccgggccccacgcgggcaagtacaaccagccgctgttaaaaaacctcgaaacgctgctcgattccgcacaaaagaggaatctaaacgttatcatcacctttgctgaagccgccgatttcggcgtaaactacgcgaactcgtactttgcaaaaagcggaatcgcgaaaactcccgacgaattttttgaatcgcaggacgccgcgcaaatttacaacgaacttgtaaaatacatcgtgacgcgcttcggctcaagcaaggcggtaataatgtgggagccgttttcgggcatagatgcgctcagccccgaaaagctcgatacccgctcgtcttggctgaactccgcaacctccgcaatccgcgactccgacagcgccgcaaaacgcccgataatgataactgcggcaacctccggagagctcgaatacttgtggggcggcgactcatgctctttcctcggcatagatttgaagggattgagagacttctcacagggcgtatgggaacacgccgcattcttcccgaaacgctacaaaaagccggtcggggcagtttccgcaactccagcggccagcactccgccagacccgtcgtactcgtacatcagaaactcaatgtgggcggggctgatgacggacgcccccatactgccgcttgccgactaccgcaaagtcgccgcgcgctcggcagcagaagaagcaatttctgaagtatctgcatttgaaaagaacttcaaaacggcaaacgccgcgctcgacccgctgaggctgccggaaaagatagtgcaaacttcgacttccgccgccgaaaattcgacaatcatttacccagcattctcagagacatacccagacaaggaatcttccaacgacctcgcgcaagtcgggatagacctctcaaccgggacaatatcctcgaacactgtgccgattgtgtggaaagacacaggcaccgtattggtaaatatagagaatgttccgaccgacaagaatacgctcgacattgagattgaaagcgtgccagcggcggccaattttgagcttatatgcctctcaaacgacaccgaaatttccaggacaaaaatcactgcggaaggctcaaaagttctcaccaatgaaaacggggtccccacggccgcaataaacaagaaagtctccataccgctcgcaaagggagaaaataatttggtattccagctttccggaacgggggtgtctatgaaagtgggcaagctcgaaattccaaagactggctcaatgagaggtgtgacatccgtaaaacccttcgctgcaatagacaagaaaaccgggacaatatacctgtggcttagaagagccggagcggaatcctatacagttgctaaatacaagctatatacgcgcggaatcccggggatgcgctcgtttgagtacccgataaaaatcgagggcaacccgtccacaaacttcaaagtcacttggtgggatacgcgcggcaagaaggaaatcgcttcaggcgttgtaaggacggactcggatggggtgttaaagctcaaaacgcctccgttcaatagcgatgtagcctgcgtgatagagcgcgaatctaaatagcatctgcggattaaaaagccgcgttatgagccggggcctcggttgaaggcgccggctttttattttcatattgcctcgcgatatttttgcctcgcataccggggaagaccctacattgccaaaaaaatttttactttatcggcggcgcgcaataccgctttgcaaataaaaatcccatagaatttatttctggaaatacagataccgttaagtgaaatgatattccacaaatcccaataatggggcttattaaaaacttgactaaattaaaatctcctttacaaacgactaatatgaagaaagttattttacccctactatccgcaatcggcgcattatccccaacgttttcgagcgctgcggactactatttcattccgccctcaaaggacaatataaattggggccacctcgaaaattggaaaatttccgaagacgggggtcaatcgtttgcagatgcaacagactccccttccgcctccgacaatgtatttttcgaccagacgaaaatcgccttgtggcccgacggcaaaggaatgaacttgtatttcgacggcaatatagaaatggattcgctcactataacgggcaatttagaccagctgagttttggcgcatataataaaaccgcagaaactgcctctacttcatcgcttatagtaaacgggaatatgtccgtaattcttgacggagccggagggtacaacggaaaatatttaatgggcggccaatacaatccgctctcagtccaaataaaaggggacgttgaattatccagactaaataataccggaacgctgacattttccttcgggggatacaaccagagcagcgctttaaaaagcctaaaaattgacggtaatttcaacaacaaaacaggccagatttcctttggatcgtatgtatgcgagcgcgacgccgcaaaaattgccgaagacaaatattattattacaaaaacgccgacattcaaataggaggctcaattaccggcaatagcactctattcttaaacagcactggaaccaataatgtaataataaaagtaaacggcattacatccacttcggttgatatgcgcgccacaaacgatgcaaaaggaaccgtaggctcttccgcaacaattgtactcgccaacgaaggccaagcattaatgaaaggcggcattacggacttgttctcttaccagtcaggcaaagttgggaaggaaacatcaaatacggtagtagatgtcgtaatgatgggcgcgcaaaactcccagcaaaagcttgttctttcatccaaccaaagggcattccgcggaggagtcactgtaatatccggggatttgagaatgtacaccatgtacaaaaacaacaccgcagaaggcgaatggggcaagtggggcgacataaggctcgtcggaaattccgacggcattgacgcaaaatttggcgccatcggctcaaacggcagcgagaccgactccgacgcggtggtttacggcgacaacctaatatggacgggcggaacgattgtttccggaataataagcaaaacgcaggcctcgctaatcgagctttccggaacgatgcaaaagggcgaagacgcaggctctgaattctggtttgaatttgtaggcaatacgaactatctcaccgaagacggagttagcataaaactcatttcatggacggagggcaacactcctaccgacttccttgaaagcgaatttaaagcggcgaatatcgacgggaaaatcgccgaattcacaatcgcggacgacggcttgtacgtatcctacaacacagtgcccgagccggcggcagtagcagcgcttgtcggggcggtagccctgctctttgcgctgcgcaggaagaaatagcaaatggcgcttagaagtgcgccgcaattcaagcgccgcgcattcgcaaaatggaaggcgtaaagcgcaaggcggcaaaaagcggactgtttaaaaactgtccgtttttttattcaaatgcgtgcgccgcgttgcgtcttttttcgagtggatttccgccaataaaaaagcgctctaaaaatggagttttatggagctctttggaaagtcgaataggtcgcacacagaaagcggttttgagataaaaagaaagttaaaaaactccaaacgcagaaactttttttgcaagttttgaaggaattaaaagttgcgcgcctaccgccaagaaaagaatttttttaggcgacaatcctttacaggcgcgcgcattttatacattataggcggaaaaattttttatgaacgaagaccatttgatacagctcgccaaagagctctccataccagtaatgcaaatcgcggcaaccgcgaaacttcttgaagacggcgccaccgtgccctttatagcccgatacagaaaagaggcaacaggcactctcgacgaagtcgcgataactgcaatccgcgacggcctcgaaaggttgaaagccctcgacgacaggcgggaatccataaaaaaatcgctgtccgagcgcaacctgctgaccgacgaactctcagccgcaatcgcggccgcagaaactctcgccaagctcgaagacatctaccagcccttcaagccaaagcgcagaacccgcgcgactgtcgcacgcgaaaaaggccttgaaagcctcgccgcattcatatttgaaaaccaatcctccgactgctccgaaaaagccgcggaatacatatcggcggaaaaggacgtttcggacgtcgcggcggctcttgccggcgcgcgcgacatcatcgccgaaaccataagcgacgacgcccccgcaaggcaggcaatgcgcgaatattttgagcaaaacgcagtgatgtcgtcaaaaatactcaccggcaaagaggaggaaggcgcaaaataccgcgactactttaattggagcgaaagcgcgaaaaccgcgccatctcacagaatcctcgcagtcaggcgcggcgaggccgagggatttctaataatgcgcgtaattcccgaagaggcgccggcgatagaaaagctaaaacagatgtatgtaaaaggcagcggagaggccgcagcgcaagtcgccctcgcagtcgaagactcatacaagcgcctgctcagccccacaaccgagacttacatgcgcctcgaactgaaaaagcgcgccgacgccgaagccatcgccgtattcgcctcaaacctaaaagagctgcttatggcctctcccctcggcgagaaaaacgtgcttgcaatcgaccctggatttagaaccggctgcaaagtcgtgtgcctaaacaggcagggagcgctgatgtataacgacgtgatttacccggagcagtcggcattgcgccaaagggaggcggccgacaaagttctcgcgctttgcgcccgctttgaaatagaggctgtcgcaatcggaaacggaacagccgggcgcgaaaccgaggccttcataaggtcgctcaaccttcccgcctccattcccgttgtcatggtaaacgaaagcggagcttcgatatactcggcaggcgaagttgcccgcgaagaattccccgacaaagacattacagtaaggggcgccgtatccatcggtaggaggctcatggatccgctcgcagaactcgtaaaaatcgacccccaatcgataggcgtcgggcagtaccagcacgatgtcaaccagagcatgcttaaaaaatcgctcgacgacgtcgtaataagctgcgtaaacagcgtcggggtcgaggtaaacacggcgagcaaacagcttctgtcgtacgtttccggcctaaattcaactacggccgccaacatagttgcctatcgaaacgagcacggaccgttcaagtcgcgcaaggagcttacgaacgtgcgcggtctgggagcgaagggcttcgaacaggcggcagggtttctcagaatacgcgacgccgaaaatcccctcgacgcctctgcggtccacccggagcgctacgagcttgtggagcgcattgccgccgatatgggcgaggacgtaaaatccctgatgcgcgactcctccgcgcgcgcgaagattaagcttgaaaaatacgtaggcgcagacatcggccttcccacgctcaaagacatcatgcaggaacttggaaagcccgggcgggatccgcgcgaaaaattcgaggtattcaaattctctgacgaggttcacagcattgacgatttgcgcgagggcatgaggctgcccggcatagtcaccaacgtcacggcgtttggagccttcatagacataggggtccaccaagacgggctggcgcacataagcgaactttccgacacctttgtaaaagacccgaaagacgcagtccgcccgcagcaaaaagtcaacgcctacgttttagaggttgacaaggcccgcaagcgcatttccctatcattgaagacgaaccccacaaagagggtgcgcagcgcgggggaaattgccggagcgggcgggcgccccgggcgcgacaaccgcggcggccgcggaggctaccgcgggaggtcggacgggaacttcaactcattcggagacgctttttcaaggataggaaaataaaatgtttgggaaaatcgcagcggcggcaatattttgcgcggcggcgtttgcggcggcaaccaccgcgagcgccgatatcgactattccgcccttgcgaatccccagacatataagaatgtcgataccatataccgctcggaatcgggaaattcgatagcgcgtattcggttaaaatcgatgaattttgaaagccgcgtgaagaaatgggggattccaatcccccagactctcctgatacgcacgcttacaatagacgtctattgcagaaacctgaccgacgcggaaattcaaaagctgaaagcccccccgctgtttttcatagccgccgaaaatttttccctcgtactatacggcaagagaaacaaggtgactgtgcgctcaaaccatgcgctcctaaaaaaggacctgtcgatagttctgacgggcgacgtaaaaatttctaccgacaaaggccagatgtcgctcggagactccgcaacattgtcgctaaacggcagaatgctaaaattttcgtacggggaaaacggagagaagtttgcgataaaattttaactttccgctaatattttacgggcatatgcgcgactccacacggtatgcaaatatttttcctcacaccaatcgaaactctaaaagcgcacagttcttgagggatagcgcttataaaatttttttaatttttatccgcaacccaaacttagcgctaaaaccttaaaaattttagcgcataatttatcctgccgaaagctgggctagcccaaattgcgccgtaaaataatgtagtggtaaaataacagcgcggcgcggttgggagcataagttgcaacacccaatccgtgtggggtattgccgaaagtatctggaatttggcggcaaaaaaatcaatatccgaaagagttctcgcataagttcccgcgcgcaaaatcaaataagttcccgcgcgcaaaatcaatattgtcttgcgatttttaacgcgcaggaatttaattttcggaatgaaaaagttttctatttcggcaattttcacaatatgcatgtggctatgcgcggcagcctcgttcgcggcgccgcagaaatccggcaactggacaatcgaaggcaaagtggtcaccgctcccgacggggcgattatcctatctaagggcgcctcggcgacgctctcgccaaaactaaacggcggggattttaaagacttcgagctctcatttaaagcccgtacgataaacggagcaacagggttcctcgccttccacacgggtcccgacttttcaaatggctataaagttgcaatagacaattcaaaaacgtcaaaagtgtggtggagaaagacgggcagcctaatcggcgtcaggaatgtcgtgaagcggatttccgaagacgggcaatgggcgcaaatagacgtaaaagtctccggaaacctcgtggaagtagatgtcaactcccacaggctcgtcgaatacgccgaacccgagaacccgtacaggctgccacaaaacgcaaatatgcgcctcggcaaaggcgccgtcgcgctaaaatgcgtatccggcgacgggattgaaataaaagattttaaaataaaaaggctcgccgcagacggcaagagagcggaagccgaacctgagagcgcagacggcgtaatcgccctgcaccagtccgacttccccgtactcgactaccacgtgcacctcaaaggcgacctagattcgcaaaaggcaaaaaaacagtccttaaaatacggaatcaactacgccatcgccgtgaactgcggcaaagattttcctgtaaacaaagactccctcgccctcgaattcctcgaaaaaaataagaatgagccatacattttggcaatgcaggcggaaggcagggaatggatgaaactcatctcaaaacccgtgcgcgacaagttcgcctattcatttaccgacggaatgacttttgaggactacgacggcaaccgcgtccacttgtggaagccgaacgaagttaaaataaaagacaaagaggcgtacatggacatgattgtcgaaaaaatctgcggagtactcggcgagcccgccgacatatacgcaaacgcaacatatctccccggcgctctcgcgccggagtacgaaaagctctggacaaaacagcgccgccaaaaggtgctggacgccctcgcgcgcggaggaatggctcttgaaataagcgcaaaatacaatattcccgacgcagaatttataaaggcagcaaaggcgcgcggagtaaaatttacattcggcagcaacaacggcgactcaaatttcggcaagctcgaatactgcataaaaattatgcgcgagtgcggccttaccccggaagatatgtttaacccgaacagggaaaatagataaaaccgcaaaactttatccgccgcaggggcaacccctcggcggatttttttgtccgcaaaaaattcacatagaaaaggattctccccacaaaagagagaataaaaaattcatacgccgataaaaaactttgtgcccgccgcggctcagtacgttaaaaaaacgccccttcggcaatcacgccttaccacgggtcttcagccttaaaatgtttcggataacgcgccttcaattctttgcgaacatttgcccacgaggttttccaaaactctccgagatcggtggtcgtttgaacgggccttccgtttggggcaagtatctcaaaaaccggcactacttttccgccgcatatggaaagcccctttgaatcaaaaccgaataagtccttaaaagatgccggcacaaccgcccttttcattgcggcatcgtactttatctcaacgggcctgcggcgcggagaaatgcgcacttccttaggcgcggcgtatttcaggaactccgcctgccccgccgaaagccagtcgcgcagggccgaatggacgtcgagattcttgatttgcgaaagcgagtaagagcccaagcacatctgcaaaaatatctccttcagcgccgcgctatctatcggggcgattccactttcagggcaaacggcggcaaccaagtttaccctctctataaacgccttggcggaatcgtcaaaatttttgagaatcgacggcgactcgaatatcttttcaacaagcagctccgcagcctcgccagcaggcggctccgcccccgaattttcggatattacgagatcgcggaattttaacgtttcgccgcacaccaccctcctttggcgctcgtcgaacctaacacccttttcagacgtgaagtcggatgcgaacagctcgcgcaaattttcgaccgttatgggggtcaagagcgacgccattatcgaaacgccttgcgcccctccctgtctttcctgcaagtcgagcgcgacaaacagatcgtcggcgtacgcgcgcgactgcctgcttatctccccctttttacccgccgcgagcgcgcatgcaagcgtgcccttgttgagccgcacccccacatgctcggaaaacgccgacaaaacgcacatcgcaactttttccccttccgctccgccagtctcgtccgtcccgttcgccccgcagaggcgcgcgccttcgcccttccctcgcgcttcaaggcgcaatgctgcgcgctcgaggtcggcggcggcacggcacgcgctgcgggcgttcgcggcatggattccaaaatccctgcaaaatttttcgtcgaaagaattttcgcgggcgatttcgcaaaggcgggcgatttcctccggctcggagcggacttcgccgacatattcgtccctcgccgcctccgcaaatgcgttgtcgagcggaagctttattcttccgcaatcggaaagcgccgctatgagggaaaccgtccgcaaacacccgcggcgcgtgccctctatgagcattctcgcgtacctcggctggaccgggaaggccgccattttgcgcccgagcggcgtaatttttccgctcttgtcgagggcgccgagatttgagagcgtgcgcaaggcgcgggcgtacgaatcttcgggcggcgcctcaaacagcccgatgccgcctgcgtccattcccgccgccgcaagccacaacactatctggctcaaatccagacgcgatatttccgaaggcgtgtatttttcaaaagccgcctcgtcggacgccctccaaagcctgaccacttttccgggcgcagtgcgccccgcccttcccgcgcgctgagccgcgctcgcaaggcttatgcgctcggtcaaaagagtgtttacacccctcgcggggtcgtacctcgccacgcgcgccagcccggaatctatcacaaattttattccgtctatcgtaagagacgtttccgcgacgtttgtcgatacaattaccttcctctttaaactttccgatagaaccctgtcctgctctccgggcggaagttccccgtgcagcgccaaaacctcaaatccccgcgctgcggggcttctgcaaattctgccaatggtgcgcgatatttcgtacgcgcccggcataaaaatcagaaaatttccgtcgtctgtagttttcgcaagcttttcaaattgttcgcaggcattgtcccacacagcgcagtcccgcgagcgcggcggcgcgtaggatatgtcgagttcatacattcgcgagccgcacgaaaactccgcgcactcgccctcaccgcccagatattcgcgcagcgcggaggagtccatcgacgccgaacacacagctatcgccaagtccggacgcaaatctttctgcgtgtgaagggcgagcgctagggaaacgtccgcataaatgttgcgctcgtgaaactcgtcaaacactacggcggacaccccctttaattggggatccgcaagaagcatccgcgcgagtattccctcggtcagaaaaacaatctttgtatcttccccgtagcgtttttcaaagcgcacatgccagccaacctcgtcgcgcatgtcgaacagttttccgactgatttggcaagcattctcgccgcaacgcgccttggttgaagcacgagaatccttcccccaagcttgcgcgaaagcataaccggaagcccggtagacttccccgaaccagtcggcgccgacaaaacgaagcgccttttcccgcgctccagttctccgtaaaggctgttttcaatttcaaaaacaggaggcgtcatctcgtcattataaatttaaattcccttgaaaaaacccgcgcggcgtattcgcgcccctcttgtatatcgacttctagtatttcccgcgcgacttcttcaggagtcaaaatctctccgcggagtatttgcgatattgccgcatacgctcccatttcagcgggatcgcaaagcgcttcaagaaacctatcagacactgaggaacgcgccgcctcaaatttgcgctcgtctattttgccttctgcgagcctttcggatatctctgaaaatatgtaggaaacttttccagtatttttatgcgaagtaagggcgtagaaatatagcgccgcagcgtcagtcccggaaataacactggcggacgccgaataagaaagcccgtggcgctgacgtacgcagttaaatatctcaccattttcccctccgagatattcgagcaaaatcgcgcgcacggctttgtatttatactctgcggccccagcgtcggaaaatgcggaaaatactacagactgctccttttccctatccattttcacaaccttttcgcgcgcttttggaaacgaaaaagccgcctttttgcgcagactcgcgcagccgcgggcaaggccggaaaagcggctttcgcaatcgtcgagaaattcggcggaatcaaaatctcccacagcggttatagcgcacttgtcggctggaaatacttttgagagcaccttctcggcatcggcgggggaagctactttcatagcgtcggcgtcgccgcagagagcggaggatagcggatatgcgccaaagaactccattctcaatccgcgcaatgcgaaagtcagaggatcgtcccgcccgtcgagttccctggatatcgccgcccgcctctcggactcaaaaattttagagtctattttaaaattcaatgcggcgtccgatatcaacccggcggaaatcggcaaatctccgggcagagactcggcgcacacagccgtgcaatagtccgaaaataccccgtaaaacgagattgcgttattctcgacaagttccgaaatttcctcgaaagtcctatttgaagttccacgcaataagcatattgacgccaatttataaatatccctctcgggcttgtccaatccgcaaattccgccgaacgagcacaagcgcatattcgtcctgctcaatccctggcgggttattgccgcaatttttaggccgttgggaagctcgcgcttttcaatcttaaagccgggggaaggtgcggcttttctgcgcacgcgcggctttgaacgcccgggtaaaaccgcagaataggtgctcgaaccaaaatccaggcgcgccgagagaaagtcggcggaatttgagaaaatcccgctgccggcagacttcgccctatgggcgtaaagctccaagcccgcccctaaatatgcgcaatcagagagcctatccgccgctatgtgggagtttcgcagagcttcggtgacggccgcgtggcgcgtttttgcgtacctgcttatctgcatttcagaaaatcccgtgcgcgcaaatttttccacctcgcgcgcggccgtttcgcgcgccgactccgcatttttaaccgcacattcccacgacaaaattagcgcgctttccgcccccaccgaaaaaaagtacgccccgacgtaatccacaagattttcaccgtattttagctttttcttcaatatggacgaattaccttcgccaagagacatcgcggcgcaatcccagaaagcggactccacggaatttccgcacggcactttaaaagccagcaaacatttcgagacgtcgcaatttgaatattccaagacttcgcgcgggcactgctgcggaagctcctgctcaaccatgacaggtttgagatttccgccccttcccccaaaagcccttgacaccgcatcgaaaaccttggaatgcccgagtgccgacgccacgcaaacgcacatattgtccgcgctgtacctgtcctgaaaatatccgcgcaaatcgggcggccgcactcccataaacttttttttaagccctattaccggatagcgcagcgggcttgagatatacatctttcggaagagattgtcatacactttttcgccggcatcgtcggagcacatgtctatttcccgcaatattacgtcgcgctccttttcaaatgcgccctccgtgaaattcggctcaaacagcatttctgacagcaaagagagagtctttcccaaactttccgtcgggcagtccgcaaaatacacggtgcggtcgtgggaagtgtatgcgttaagctccgccccaaacattgcggcatcggccgaaacgctttcttcgcgtcgccccccagcccctacaaacgccatatgttccgcgaagtgcgaaactccgcagccgcacattgccccctcgtgaatgtttcccgtgcgtacaaccacagaaatcccaacggctgcgaaataacggcagcgaatatgccttacttcaaggccgttttcaagacgctcataggcgctgtctatttcaggaaaaatgtccatcagtctgcacggtcgagcgcggacggggtgaaatccctctttatggaattcgatacggacgaagccgggaaataggcgttgtcgcgctccaatatcatgccgacctctatatatcccttaaatcccccgttgggcatctccacatactttttggagtttgaagacattataagcccgcgctcggaaataaaaaacgaatcgcgctgcacgtcgaaaacgtagattaagtatttgggcgtccaataaacgtagtttcttttaacctcaccgacgtacgctatgacgtctttttcaatcgtctctatttcaagctcgagcttgtcgccttttaagtacaagtacgagctagtcggtatgctcttgccattcgctattattttgccggagcagacgaggcgcggagttcccgtggcggacgacggcacatagctttgaacgacctctgccctcataatctcgctgccttccaccgtcatgctttcagaacccgtccagttccccacgtaagtttcaaaagccgccttggcgtcgggcagccagtagtcggcgttttcgtgcgaaaataccgatatgttctttccgttttcggcgccgcagagcgctgcggcggaaaacattatcgcaaacaatgccttttttaagtagtgtgtcatatgtcgattacgtcgtcgtctttcgatttttcagagtctttttttagaactttgcggattattttttcgcttcgcgccattgctattgcccaagagagcgtcgatactataaacgaagcccaaagcgccgcccaatacgacgacaccaaaatgccgtcgcccggaatcagccgcgccgcccaatatattatcagcgcgtttataaacagcatgcctatgcccatcgtaaatattataaacggcaaggtgaacagcaccaatatcgggcggattatccagttcataaaccatatcgccacgacaagcgccgcaaatgagaacgcgttgttgaactctatctgcccagccggcagcgaaacccacgcgaatatcaaccctgcggcgttaagcagacagttgcgccaaaaattcaactctattcgtatggtattccggacccttccccgaaaacctccgccttcatctccgtcactgcgattttccatttttcaactttcttttgagttttttatactcttccagccgttccgcaataagtttttccgccccgcggggagtcggcttgtaaaaagtcttcggattttccatataatcctgcccgcttatcgcccctgggcagtcgtggttgtaaatgtagtcggcgccgttgccccccgagcggttgaacgccgtgtgggaatcccgcaagtgcttgggcacaggctgcacggggttttttgcgatttcagccttggcggcggcaagggcggcggttgccgaattgctcttcggtgcggcggcgagaaatattgtggcatgcgccaagtttagctcgcattcaggaagccctacgcgttcgcaggcgtcaaaggccgcgtttgccacaagcaatccgcgggaatccgccaacccgacgtcttcgctcgccaaaatcacaagcctgcgcgcaataaaccgcgggtcctcgcccccggcgagcatctttgcaagccagtagagcgccgcgtcggggtcgcagccgcgcacgctttttatgaacgccgatattgtgtcgtaatgctcgtcttcgtcggaatcgtaccttatgcggcgttcttgcgcgaaaatctttacgctgtcggcagtaatttccgcccctccgccggccgagacgacaatggtttcaagcgcgttgagagctcgccgcaaatcgccgtcgcttattgccgctattgccctcaatgtatcgtcggaagccttgcagccgaaatttcccattccgcgcgcgcaatcctcaagcgcgcgcctcaaaaccttcactacgtcctctatgccaagcggctcaagcctaaacaggtggctgcgcgaaagaagcggcgcgtttatataaaagcccgggttttgagtggttgcccctattaggcgcacatttccctcctcgacgtctgggagcagcaggtcttgctgggccttgttgaagcggtggatttcgtctataaaaagtattgtgcgctctccgcggcggcgggcggcctccgccaattcggttcttagctgcgcggcgtttgaaagcacggcgtttatctttacgaatctcgactttgtctcgcaggctatgacgtttgcaagagttgtttttccgcagcccggggggccgtaaaatatcagggacccgaatgtgtcggacttcacaagctccggaagcaggcagccgcgccccaatatgtgcgaatgccccaccatctcggagagcgacgtcggccgcattctcacggcaaggggcgcgcacgccgaaaccctcggaatttcgcgctctctcgggaataatccgtccaacgggagttcctgtgtgtcgtccgccatattttcttatcgaaaaaacaaaagcatttcttgaaagttttgtcaaataatgcaatctctatgtgaaaaatactttggaatggtaaagactgcaaatatgccgtgcgccatgaccgtcgcgggaagcgactccggcgccggtgccggaatacaggccgacatcctcgcgattgcggctaacggcgtttacgcgtgctctgtcgtgacggcgcttacggcgcaaaatcccgacggagtctacggcgttttacccgccggggcggaatcggtcgaggcgcagatgaaggcggttgctgacttttattccccaggagccgccaagactggaatgcttttcgatgcacagacagtggcggcagtcgcaaagttttttagggcaaaccgcgggataaagctcgtggtggaccctgtcgcgatatcgacaagcggcgccaaactgcttagcgacgacgccgtaggagagctcaaaaactcgctaatcccgatttccgacgtattcacgccaaatatcgacgaggcgaaaatgcttcttggcgccgacagcatagacgacacgacggacgcagccgaggctctttataaaaaattctcggttcccgtgctcctgaaaggcgggcaccttgaaggcggtacggtatccgacgtatttttcgacggcggacgcccaatcgcaatggactcccgccgcatagagggcgtaaacacccacggaagcggctgtaccctaagcgccgccattgcggcaaacctcgcaaaaggccttccgcttgcggacgcatgccgccgcgcaaaagaatacctcgttgacggaatatcgcgccctgtgagggtcggcgggcaaaactttataaaccatctcccaggatacagcaaatgagcggagaatctgattcatacagccacgacgggcaccgcaaaaggctacgcgagcgttttgtgcgcggcggaatgtcggcgctgtcggactacgaggtaatcgagctgctgcttacaatgtgcattccgagaatcgacgtaaagccgattgcaaaagatttgataaaggcgtacggaaacctccgcgggatactcgacgccgaccgcgaaagcttgtccaaaataaaaggcataggagagtcgtccgccgcgtatatcggctttattaagaatctgattaccctctaccacctcgaagagctggaaatagagcaggaggaaataccgacaatagacaagctcataaaatactttaaaagcaaaatatccgccgagccgcgcgaagtaatcgagatggtctgcctggactccaacttaaaaattgtcccagacggcggcgttcgcctctgcgagggcagcgtaaactgcgcgagcgtcgacataagaaagataatcgaaaccgcaatacgcctcggcgccgtaagcattgccatagcccacaaccaccctggcggcgacccccgcccgtcaatggaagacgtgcgctttacaaaaaggctgtctgacgcatgcaggccgataaacctaagccttatcgagcatatcgtagtggggaggaactcttgctattcgttcaggcgctccggagaattcgacgtgctatacgacgaaagccttccgccgccgcgccgctccaatccgtcgagaaaaacccgcgagcagaaagtcgccgaagacggaaaggatatacaatgagcatattggcgatagaaagctcttgcgacgagtcggcggccgcgattttcgaccccgatttcggagtgcgcgaaagccttattcattcgcagatagacctgcacgcgctgtacggcggagtcgttccagatctcgcgagctccgagcaccttaaaaaacttcccgcgcttgtaaagaaaatctccgagtcggagtacttttcaggcgtcgacaaaatagcggcaacgagcgggccggggctgccaaattgcctggcaatgggcgtagctgcggcatcggcgcttgcaatggtgctaaaaaagccgttagtcggcgtcaaccacttgcgggggcatgcgtactctccgtttattccaatacacgcgaaggatcccgcaaattttcgcaagaaattttccgaactgcttccgcacataggactcaccgtttcgggcggcaatacagtactctttgagataggcgaggacgggaatatggtcaccctcgccgagactgaggacgacgccgcaggggaagccctcgacaagggcgcaaagctacttggaatgccgtatcctggcgcccccattctcgaaaagcgcgcaaaatcgggcaaaatcgacaagacgatgttcccgtacgggcaaaacaggaaaatcgaagacgaccccgatttcagcttttccgggctaaaaacgagcctgcgttataggcttgaaaagatgtccggagcggaaattgaggccgcgatgcccgacctctgcgcctcgtaccaatttgccgtcatagagcagctgcggcggcggtgcgactggtttgcgaagcgcaagccgtataaaagcctgggcatatccggaggagtctccaacaattcggtctttgccggagtattcgaaaaactcgcgcggtcgaggaacgcaaaatttctgatagccgacaggcagcataggggcgacaacgccgcaatgatagcctttgccgcatggattgcgccgtccgaatgccaacagccgaaaaactcaacccttgaaatccgccccgcgtgggagctctgcaaacgaataggaatctaagaattatgcccccgtcactggaaacgtcatacgcaaaatgcgagagcctcgcgaactcccactacgagaattttcccgttgcgaaaatggttcccaaacggctccgcaagcacgtggcagccgtgtacgccttcgcgcggacagccgacgacatcgccgacgaaaaccacgattcgatagccgacaacgatccgataagaatacgcaggctcgaagaattccaatcgcagctggacgtatccgacgcatcgaagctcgatccgcgctgggactggattttcatagcctgcgccgacaccataaagaaattttcaataccggacagccttttccgcgacttgataagcgcgttcgcccaagacgtcgtaaaaaagcgctacgcagattttcccgagctgctcgactactgccgaaggagcgcaaaccccgttgggcggctcgtcctgcttctccacggattttccgacgacgagcgcttcagcatgagcgacaatatctgcaccgccttgcaactcgccaatttctggcaagacatgagcgtcgacaggcttaaaaaccgcatatacattccggaatccgactggaacggggcggacgaagctgaaatattcgccgacactgcgactgcgcgcgtaagggaaatcgtaaaatttcaggttgagcgcacgcgcgggcttttcgacgcgggagagaagctgccctcgctgcttccgtttccgctgagccttgaaatacgcgccacgcttgcaggcggccgcgcaattctcgacaaaatacagtcgcaagggttcgataccttgtcaaagcgcccggctatcggcaagatcgacaaattaagaatcctattgcgcgcactaatcccatgaacaggtccgacgaagcatctacgagcaagcgccaaaccgtggaacggaagaagtcgaatttggcgttcgcgtttttctgcctcgacaaggagcgcgcaaaagacatggaaattttctacgccttctgccgcctgatggacgacatcgccgacgagccagcgcgtgccgcttccgaaaagcgcgccgaactcgcctcatggaaaggcgagataagccgaatatacggaggctcaaaagacctcagcccgctcggtggggaaatggcggacgtcatacgccgcaggggaataccgcaggaatatatacaggcgattatcgacggagtattgcgcgacaccgtggacgagccttttcggacttttgaagacatacgcaattactgctacggagtcgcctcggcggtggggcttgcttcaatatacattttcggatttaaaaatccacgcacgaaattatacgcggaagctctcggctacgcgctgcaatttacaaatattttgcgcgatgttgcatacgatatgagcacgcaaaaccgctgctacattcccttgcgggagctcgaatttttcggggttgagagaggcgacttgtcggagccaagccgcaatccgaacagcaaagagctcttccgcatgatgcacttccgcgctaaacatttttttaggaaggcagacaggctgctcccgccggaggacagggccgcgatgaagcccgcctttatcatgggcgcaatatacgagaaaattctcgataagatagcagaatcagacttcaatataacccgctcccccataaagctgagcaagccaaagaaaatcgccatcgccctatccgcgctgcgcaatgcgaaccgccgcgccgaatccggctccgttgagtttgggagcgcatgcgttttgggtggcggaatatcggggatatgcgcggctttaaaactcgcattagaagggttcgacgtatcgctatttgaggcaagagcctccctcggcggaagggcgtctgcgatagattggaatggagccaggctcgacaacggctcgcacgccgtaatggggtgctaccaaaactttttcggatttttgaggctgataggggtctcggcgcgcgacgcgttcgagagggccaaagaaatggacttttctttcccgggcgggaaaaaattccgcgtagaatttccaaagcccgacgacggccctgtgaaaaaatttttcgcatttctaaggtatttgaaagttcccgggcttgggaaggccgcaaacgtaatcttgcttgccaaactaaaattagggcttggcgagccgaaaggcggacagacagcgctcgaatatttaaaagagcgcgaaatagacggagaatccataaaagtattctgggagccattctgcgtatccgccctaaacacaacctgcgcgggagcgtcggcgaagctaatggtatcgacactgagaaaatcggtgctctcaggcggcgagagcggcattctatatttcccagagacggcggtaatagacgcctttattccgcgcgcagttacgtatttagagtcagtaggggcggaaatatgcctttccgaccgcgtggaggaaatcgagattaagaatggcagattcgagtccataaaaacggcaaagcgcggacgggtggaatttaggaactgcgtcagcgcgctgcctgcaaaagttttcgcgaatatgcttcccgaagcctccgctttgagggcggaaatcggagatataaagtccaccgacataataaatgtatatttcacaaccgaccgaaagctaaccgacggcgactacgcatgccttgtaggctccaaactgcactggatattcgaccacacccgcaagtctaaggaatgcgaaaaagacggcacttatttgtacggcgctacaataagcgacgcaaaaattccttttgaagccgaaaatatccgcaaatccttgcgagtggaactgaccggcatttttggcagatgcgaaatcataaaggcgttgccttcactctaccgcggggcgaccatatccggagactgcgcgagcgaaaaggcgcggccggacgactcccaatgcggagtcgagaacctgcatatttgcggggactgggttcaaacggggcttccctgcactatggaaagcgccgcaaagagcgtgaacgacatgacaatttttaaacaaaaaaaagatatatgaaaagaccgttaatagtttttccaatggtttacgaggctcgctccacttttaagtttttcaacgagcctctaaaatgcgtgctcgggggaagatgtaaatttacgctggcaaacggcactgaatgcgaggctcttgtctcaggcataggctgcaagaagtccgcggagcgcgtacgggaatgcgttgaaagcttctgcccaacggacgtagttttgtgcggattcgggggcgcgtgcgacgaggatatggaaataggagaatttgtgttccagagcgggtcggcggaaatatcgaaattcctttcgagaaacggaatgcgggaggggaaaatcgcctattctgaaggagtagccgacgagaacgcaaagagaaagtttgcgtcagaaggatacgacattgttgagatggaaagcgcgatattttcagcagcgcttggagacgacgacgactttaagcctgttctcacccatataaggtgcgtaagcgacactttaaagacatgcgtccctgcgggtgtcgtagaaagcgggctaaaccttgaaacggggggatttaaaatttcgccgttaaaatctatttcagaaatcataaagaaccccgcctcaatacctgcgctcataaggtttgcaacagttgccaacaaggcgcgcaagatttacgaagccaaaattccccaggtattgacagctctatttacaaatgtgggcggcaaaaaataattccattgaaaaaaacggaaaaatatattgacaagcgcgccgaaaaatgggaaattaacgcttcaaaattcagtgatgattgttcagtagctcagcggtagagcaggtgactgttaatcacttggtcgcaggttcgatccctgcctgaacagccactgaaaaataaaggctttccactcggaaagcctttattttttcgctcttcgtcaaactcagtgggatgaggaagaaagaggggataagagaagaag

SEQ ID NO: 1071 - DNA, 1932 bp, Unknown
  16S sequences of unknown bacteria
taatgaattcgtgctctttccttttcaattattttacatcaattttacatttgcaccgaagtccctgtctgtttgcaggcgcttactctgccagttcttccattgcttcccgcaccgtatcggccgaaaacaggaacactccgctgccggtgtatacttccacatggcttccaacataacgcagttcaaaatctttcatccgtgttccctcctgtatctcgttttttgcagcttttcagaacgtttttgttccatggctgtattatcgcacacagcaggtaccataaatcggattttcaacgcattttgcagacaaaaagccgcccggcttcagatgcggaaccgggcggctggccacctatttatatcgttcaatgcacagcggcatattccgggatgcgctgctcatgggcctgctgctctgtgcgggccttctcatagcagtaacggatgatcgcctgcctgcgcacgatgccaatgaagatgccgcggtcatccacaaccggcacaaagttctggttcatggccgcttcgatcagctgatccatgctggtggtcacggtgacagccttgtagtcgcgcttgtgcgggaaggccgaaatggggacatcctcagccgcttccagatccagaccatggaactttttcagcccccagagaatgtcgccctcggtcagggtgcccacatattttccctgccggttgagcaccggaatggacgcgtagcggttattctcccacttttccagcgtctgccgaagggtgaaatcgtcgtaaacatacatcagatcctgcttgggtgaaaggaaaaacagaatattcatgacaacagctcctaaacattgttccacgcgccgtgcgcaaaaaataacgcagttcatccgcacaagcgggaccctgcgccgcagtccctatccttgtttctattttagcactttttcatagtcggataaagagttatcacccaccttttatatttttttaacagattgtttgctttctttcgtcatactttcggttttgataaaaagcaaccagcgtccgttatgctatcaccttcccggtgcgaagccgcccgaaccatgccgtcaatgcagaaacctgcgcaaaaagttgatataccagcattttgcgctgtacaagcgcgccccaaagttgtataataatgtgggtgtttctcggcgcagtatgtgtatctgtccgccgctgcgccccagaccttgaatgtgttttatgaaaataacataaaggagcagagcgactatgatcacttcccgtttccctctgggggatgtcagctttacgtccgggtattttgctactctggtaggtgaagcagccaaacagtgttacggtgttgccgcaatggcaccccgtgatatgaccgatgccgtcagaagcatggtgcacggttctgattacccggaaaagggtgtccgtgtcacgcaggaggatggtcgtctggtgatcgaactgcacattgcagtgagctatggcctgaacatttctaccgccgcacgcagcatctctcaccgtgtcaaggacgaggtggagcaggccaccggcctgaaggttgcccgcgttgtggtttcggtagacgatgtgatcgcctgatttttgttggttcatccgaatgcgccgggcttttccggcaagtacaaggagtaaaaaagaatgatttctggtaagattttgcgtgacgccattatctctggcgccaacaacatcaacaatcagcgctcccgcgtggacgagctgaacgttttccctgttcctgatggcgacactggcaccaacatgggcatgaccgtgggtgcttctgtgcgcgagctggaagcattggacgacagctgcaccgtgggtgaggcttccaagaccgctgcttccgccatgctgcgcggcgcccgcggcaactccggcgttatcaccagc

SEQ ID NO: 1072 - DNA, 3489 bp, Unknown
  16S sequences of unknown bacteria
aaacaatcggaaaagctggctctggccatggccacaatgctgaccgcagtggctaaaatctttgctcccatcgtgtggatcctcacaatttccaccaacacggtgctgcgcctgctgggcatcgaccccaatgcggacgacgacgaaatcagcgaggaagaaatccagaccatgctggacgccggcacccgaaaaggcgtattcgacgcgcaggaacagcagtttatccacaacgtgtttctgtttgatgaccgctgtgcggaagaattcgccacacaccgcacggaaattgattttctccgcgccggtgaccccatagaaaaatgggaggaaacaatccacgcgacgcgccattcccgttatccgatctgcgaagaaacgctggatcacgtcattggcattctgaacgtaaaagattatttcgccctgcaggacaaatcctatgcttccattatggccaatgcggcgcaaaagccattctatgtacctgagagcgttcgggcggacgtgttgttccgccagatgaagcagagccggaaccacttcgccgtggtgctcgacgaatacggcggcaccgccggcgtggtcaccatcaacgacctgctggaacagctggtgggtgaactggacgacgagcccgtatctcccgaagatgacgccccactgatcgaacagctagacgccaatacctggaaaattgacggcagtgcagaactggaggaagtctctgaagcgctgcacatcgaccttccctgcgaggactatgacaccttcggcggttttgtttttgcccaaaacggctttattcccgaggacggcgccacctttaccatcgacacggacacactgcacatcgaagttctgaaaattgcagaacaccgcctgcgttcggctctggtcacgctgaccattgctgtgtaaattttgtaaatctttgttaaaaaatttgacaacttgtcattttcgggatacaatgaaaagcaaattgaacaaattttaacgatcttttgttccatactacaggaggagcgtgctttcattgaaaaagcaaaaaatttccgaagcggtcatccgccgcctgccccggtattatcgctatctcgacgacttatataacagcagcgtcgtgcgtatctcgtccagttccctgggaagcaaaatgggcatcaccgcttcccagatccggcaggatctgagctgtttcggagaattcggccagcagggctacggctataatgtggaaattcttcgcacggagattggctcaatcctcggcgtggatcattaccacaagctgatcgtcgtcggcgcgggcaatctggggcaggctttgatccagaatttttatttcaataaaagcgggtttactctggaagctgcctttgacatatcccccgccttaatcggccacgaaatcaacggcatcacggttcattccatgaatgcacttgaggactatgtggtagagtgcaaacccgatgtggccgtgctcaccgtcccccgcggcgtagcgcagaaaacaatggacctcctggccggatacggcgtacggggcttctggaatttcaccaatgtggagctggaagaaaagattcccggcgtagtggtagaaaacatccattttgccgacagtctgctcaccctgagctaccgcatcatggaacactgacaaaggagcgtttgcatgaagaaaagactgattgcccttggtctggcggcggcgctctgcgccagtgtcgtcactgcctgggctaccggcggcagtgccggggatccgctgatctccctgtcctatctcaaaaatacatataagccccagatgacgcaggcactgcagaacgccctgtatcctgccaccaccgccgggcggcgctctgaggctcaaatcactatggatcagcagcgctacaaacaggacgacgtcattcaagcttctaccggctgcgaagtgattgtgctggccggcaatgtttccgcctccttttccagcggtggcgtattggtgaacgctacggacggtacagagattgccgccggcaaatcgttgacccccaacgcccgttatgtggtaggtgaagataccctgtgcgcactgaccattgtttcccccacagcggtggtatcggtcaacggcgcggcaacgctgagcgtcagcacaacgccggattacaatgccatggcaaaagcgctccagtccctatctctgctcaaaggaaccggctctggctacggcgagggtttcgacctcgaactgcgccccagccgtatcgaagccatgatcctgtttatccgtctgctgggcgaagaagacgcggcgctcgcatgcacggcgaaaaatcctttctccgatgttcctgcctgggcagatcgctatgcagcctatgcctatcagcaaggctacagcaatggcgtcggcgacggaaaattcggcactgctttaatgatctctccccaggaatacgtcgaatttatcctgcgcgcactgggatacagctccacaagccatactgatctgagcacaacgctgaacgatgccagaaccgcaggcgtacttaccagcggcgaatacaattccctgcgttccacaacactgctgcgcgcgcacctggtttatatctcctattatgcgctctccacacctatggcgagcgaaaacagtacgctggccgaccagctgatccgcgacagcgtgttcaccgcttccgcttttgacaacgcgcaaaagctggtcaccacgccccggctctgacaaaatagacaagaacgatcaaaaaccagccctgtgtgctgccgtttggctgcacacagggctggttcttcgctttgcagcattccctgcactttattggacgcggcattttcccgctttctcccgcttccgccttctgcgggcggtgatgcggaatggattctgaagccaatacgccgtccagtgccacaggctgtcgcggccacagaccggctccacgcagaaagactgaaaaccgcagcggcgggcgcccagcacatcggtgaagatctgatcgcccaccaaggcggttgtttccggcaccgcatcgaactggcgcatggcctccagcaaacgtccccgcttaggcttgcccgcatggcccacatacggaatgccgagatcgccgcaataggcctctacccgagcaggagaacggttattggatacgatcatcacctgaatgcccgcctccgtcagttccttcacccaggcacgcaccgcatcggtgggccgcactgtctcatggagcgccagggtgttatccaaatcacaaagcagaagcgtcacctgtttttctttgagatatgccgcggtcaattcctcaacatggtcaaacaacaggtccggacaaagcaaacaacgcataaacgcctccttgaacacataatgtgatagcaatgatatgagtataccattctcaccgaattgaaacaagggggagtctacattgcagctttatatgaccgccgcaccggagc

SEQ ID NO: 1073 - DNA, 32759 bp, Unknown
  16S sequences of unknown bacteria
tggttactggcttttcggcagtttggacttccaaagtggaaacatgatttcgagtcagccccgttatgaccacttcgataccgctgcatggtgctttaacagcataccggaaaaatccccgtttgtcaaggggcagagggcagacggagcagggtgcggtagagtgcgtcatcccctttggtaaaggtgttgaacaccacctttttcggatagggtgagtctttgagaaaatccagcaccgcagggacggcaatggcggcggcctcctccggcggaaagtggaaggcgccggtggagatgcagcaaaaggccagggattccatctgctcccgctgggcaatgcccagacaggacaaatagctttgctttagtgcctgcttatccttttgggtgagggtgccgtggacgatgggccccaccacatggatgatgcttttacagggcaggttgaaagctggggtgagcacccccacgccggtgggctggggatagccttgtttttccatgtattcatggcaatagagccgcagctgcatcccggcataggtatggatggcgttgtcgatgcagtggtggcctggggcaaagcagcccagaagggcagagtttgcggcgttgacaatggcggacaccggcagggtggtgatgtccccacgccagagcgcgacccggggaaaaaggggagaggggagaagggcggacaaggaggccacaccccgctcggaaagccgctccttcagataggcatcctggaccgccagcacttcttccggcaccggtttgggcgggcgcagattcatcagggctcgcagcagtttccgctggttttccgggtccacggggatggcccggccctcataccgcttgttttctcccagaagaaactgaagcaaaaattcccgcctttgctgctgatccatgaaaacccctcctttttcctgatggtatcacaatcggtctccctttgcaaatggggggattttggttgacggggtttttgtggggcagtataatatataaataatgaagaaaaacagccggaggtgcaccatggacgagaagaacattctggacgagatccccgatctgtatgaggacaatggaatgtggagagggagccagtactcctttttccgccacgaaaaatgcgagttttttccctgccaccaaaccgaggacaaggagaacttcaactgcctgttctgctattgccccctctatgccctgggggacaagtgcggcggcaatttccagtacacctatgggggcattaaggattgcagccagtgcatgatccctcataaaaaggacaactacggctacatcgtgggccgcttcggggagctggtcaagctgctgcaagagcagaaggccgcagaagaagaggccaaggccccggaaagcgaaaagtaagtgaccggcatcacagtggaaaagcgggagggggaaatccccctttcccggctgatggatttttacgaccgggaaaaattctggggcttctgccgggcctgtccccggtatggggccttgtggtcctgccccccttatgaggaaggagccctgccggatctggagcaattttccaaaatccggcttttttgtcatgtgcttcatttttccccggagctgcgccgggaggtttcctcgccggaaaaagccggcgctttcatggaaagctgcgtcgcccggtatggcaaagccgcccatgaggaaatgctccggctggaacaaagccatccgggcagcctggggctgacccatgggggctgccgcctgtgcgcccattgcgcccggccggagggaaaaccctgccgtctgccggagaaaatgcgcctttctctggagagcctgggcttttcggtggtggaccaggcaaaggaagtactgcacctgcccatttccttttcccaggaggggctgccgccctatcaggtgctgctctgcggcctgtttttgccctgaaagggaaattttgggcgaaaaaagtggctttttgcagggaaaaatcgacaaaatatccttgtcaaaccagggaaaataggctataatctcatataaagatgaaaaaacctatggccaagcctttggccgaagataaaacggagggtctgctgtggcgctgatggataaggtccggtcctttatgggctatgacgacgaggattacgaggacgagtacgaatacgaagtggaggagaaccgggctctggcgccccggaaggcggagcgtgcccggacggaggagatgactatgcctgctccggcggctgctttccagattacatccatccgcaccaatcgctttgaagatgccagcctggtggtggacgagctgaaggccggccgcacggtggtgctcaatgtgcaggccgccaccgtggaggtcacccgccgtatgatcgatttcatcagcggcgctgcctatgccagagatgggcacatcgcccagatcgccacaggcgcttatctggtggctccctatagcgtggagctcaccgatgagacccaggagcagcggtatttctaaaaacaaaccaaaaacaaaccaaaaaaagagccattctgcctgcaaagcagaatggctctttttttgcagccggggagcaaagaccccgggcaggggcttgcaaaaaaagggaaagccttgtataacaataaagagaccgatgaatcaaagaggaaaagggtggggaagatggcagatacccatatcaaatacaacgaccattccattatttcggcattcaaggaccactatatcgtgccggattaccagcgggaatatgtgtggcaggatgaacaggtggagcagctgctggccgatttgctggacgcttaccaggaggacaacaggaaaccttattttctggggaccattgtcacctgtgattccggcgggcagtttgagctgatcgacgggcagcagcgcctgaccacttttttcatccttctgtgcgccatcaaacagatctacatggcccaggggcagcagaccagcgtgctggaaaacctgatttacagcgccaccatgaacaacgatggggatgtgatcaatttataccatcttcagctgcaatatgaggatgcgggaaactgcctggagctgatcgaaaaagggcaggaaaagcccgcccatctgacccaatcgggcgagcggctgttcaacgcctttcagacggcccagaaattcctgggggaacagtttccggaaatcgccgatctgaaaaagttcgtggtgtttctgctgaacaaaaccagctttgtgcgcatcgagacctacgacatcaccgatgcgctgaagatctttgaaaccatcaaccagcggggcaagggcctggaccccatggatctgctgaaaaatatggtgttccgtcaggtggagcggagcaaattcaaagagctgaacatgaactggaaatacatcactcgagcgctggagaagatcgacgaaaaacctctccgcttcctccggtatttcatcatggccaattacgacacctccaaagagaaggacggcgttctccgggaggatcagatttacagctggctcacccgcaacaacgaccaatgccattaccgggaagcgccctttgcctttgtgcagaaaatggcggagcatgtggacctgtatgtgaaatgcaggatgcccgatgatctttcccaggggaacgcacatctgaaaaacatccccctgctggcgggcaaatcctataagctccatctgatgctgatgctggcagcttccaacatggaggaggaggcttttgcccagtggaaagcggtggtggaatcggtgatctattacggggtcatcaaccgggtggccaccaatgtgactgagcgcacctttgcccagtggtgccggagcctgcggcatatcgtcacgccccagcagctggatgaatttgtgcaggagaccattctgccggaggtgcgggattggaagcaggacaaccattccaatttcctccgcctggggctgaacagtatgcagcaataccgcatcaagttcatcctgggaaaaatcaccgcctatgtggacgggctgcggctgggcaagaccacggcagaggacctgacggtctacacccagacggcggtggagatcgagcacatcatgccccagacctgcgaaaacaagaccatgtacggtgtggacgaggaggaatttcccatctacctccaccggctgggcaacctgactttgctggaaaacagcatcaacaaatccattcacaatgatctgtatgaaagcaaggcggccgcttacaggcagtccaagttttatatcacatcttctctgcccggtctggtggaccagggacaggatacagccatcaaccgcaccaaccggctgctgcgggcctggccccaatggaataaacaggccattgaggagcggcaggagatgctgtatcagctgagcgaaatgatctggaacattgggtagcatatgccaaaacccccggagatttcctccgggggctttttcatgcactccaaaacggctcaggccgcttttttcacaagctaggggatgagcacaaaggccccgtcccggaaggaaagggagctatacggcccgccggcctcggacaaaaggcccgaaagcagacgggacagctgccccgtccactccgaaggcagcaggctggggtcgatctcctggcccgaaagctccagggccgccggagtcaccgtcatctgcccgttttccccgctttggcaggaaaaggccgccatgatggagatcttctggggcaggagggagagcatcagttccccctgcagccccaggtccaccccctgggctttcagataatcccgcagtccgtcccgctgtgtctggccttccaccgccaccagcccctcccggctgatgcgcacactcagcccttccagaggcaggccctccggcagacgctgctgcaaaagctctttggcatattcctcggtgatgagcatctgttctcctcctgttccggccccctgggcgctctccggctctgtgggcgcaggctgggcatcgccaggccgggtgcggccctcccagaagatgctgccgatgagcagcaggcaggtgagcaggcaggcaatgcacaccgccagatacagccggttttttgttttttcggtcacagtccttccccccttgctgtcagtgtatggggcgtcccccgggagtatgccccttttttccctgccgccgttgcgaaaaaaggggaaaggtgttatacttttttattagcattgacgaaaaaacaaggggaggacaacatgggaaaaacaccggtgacagtatcccaggaggaacttttgcgccagcaggagtacagccagcgcatccatcaatattatcaggaaaagctggggcgggcgcccgtggcctgcaccgacacctacggctgccagcagaatgaatcggacagcgaaatactccggggcatgatggcccagatgggctttaccttcacccatgagccggaagaggccgacctggtgctgttcaacacctgcgccgtgcgggaacacgccgaaatgcgggtctatggcaatgtgggggccttggtgcaccagaagcgccgcaatcccgatctcatcgtggcggtgtgcggctgcatggcccagcaggaacgggtggccgaaaagatcaaaaagagcttccctgtggtggacttgctcttcggcacccatgtgctttataaattccctgagcttctgtggcgcaggctggaagggggcaagcgggtctttgacatctccggggatgcttccggggtgattctggaaggggtggagcccaaccgggaccggtcggtgaaggcctggctgcccattatgtacggctgcgacaacttctgctcctattgcatcgtcccctatgtgcggggacgggagcgcagccgggagccggagcagattatccaggagttccgctctttgctggctgccggcgcccgggacatcacccttctgggacagaatgtgaattcctacggcaaaaacacccaggccggctgggactttgccgatctcttggaccggctgtgccaggaggaaggggagtttctcatccggtttatgaccagccaccccaaggacgcttcggaaaagctcttccaggtgatggctaaaaatcccaaggcggccaagcacctgcacctgcccttccagtcgggcagcagccgggtgctccgggagatgaaccggtcctacaaccgggagcaatacctggagctcattgacctggcccggaagtatatgcccgatgtgaccctgagcagcgatgtgatcgtgggcttccccaatgagacccaggaggaatttgaagagaccctgagcctgatcgaaaaggtgcggtttgacaatctgttcaccttcatctattccaagcgggagggcacagtggccgccaaaatcgacgacaaagtgcgggtggaagagaaaaagcgccgcttccagcagctgctcacggtgcagaaccggattgccaatgagcagaacgccctgctcttagggcagaccatgaccgtgctggtggacggcgtggggcaggatgaggagtatcccctcaccgcccgcacccagggccagaagctgctgcgcctgaaaggggccggggaggagcggatcggccagtttgtccaggccaaagtaaccaagcacaccacctggtccctcttcggggagatccaggactgaggaaaaggggaggacacatggcaaaagagaagcagacgggggaggcaaaaaagctcacccccatgatgcagcaatacatggcggtgaaagagcagaaccccgacgccatcctgttttaccggctgggggatttttatgagatgttcttcgaggacgccaaggtggcctcccgggagctggagctcaccctcaccggaagggactgcggccttccccagcgggcgcccatgtgcggcgtgcccttccacagcgccgaaagctacatcgcccggctgatccagaagggctacaaggtggccatctgcgagcagatggaggacccggccaccgccaaagggctggtgaagcgggatgtgatccggaagatcacctcgggcaccttgctggaaagcaccatgctggatgagaagcggaacaacttcatttgcgccatccagtgggacgacacctatggggccgggctgtgtttctgcgacatttccaccggccagacccaggccatcgagatgttcgggggcggccttgccggcgccgtcatcagcgagctggcccgttttgagcccagtgaggcggtgctctcccccaaggccatggagcaggaagaggtgctggcttttctgacaaagcgcctttcctgccagatcgagcggggggaagagcaggacttcaccgaagaggccggacggcagtggatgggaaagcattttgaggacactccccagctgcaggaggatatccagggccggcccatgctcattggagcggtgggggggctgatggcctacctgcaccagacccagaaaaacgacctgcgccagatcaaccggctggaggtctacaccaaggcccagttcatgggcttggacccggcggcccggcggaatctggagctttgccaggtgatgcgctccggggaaaagaagggctcccttctgtgggtgctggattacacccgcaccgccatgggcgggcggctgctccgccagtggctggaaaagcccttggtcaacgccgcccagatcgccctgcggcagaacgccgtccaggcccttctctcggaccgtccccggcgggacggggtgctggaagggctgcggggggtctttgatctggagcggctcatcagccgggtggtctatggcagcgccaactgccgggatctccgctctttgtggcagacggcctgcgccattccccaggtgaaggaaaacctggagggctttggcggcagccagtacctgaaagaactgtgggaggagatcgacagcctggaagatgtggccgatctcatcgaccgggccatctccacagagccgcccttttccttgcgggaagggaaccttttgcgggagggctttgacgaaaaaatcgaccagctgcgggacctgctcaaagggggcaagggcaccctggccgccatcgagcagcgggagcgggagcgcaccggcatccccaagctgaaggtgagctacaacaaggtctttggctactatatcgagatcagcaaatcctacgccgacaaggcccccgaggattatacccgccgccagaccctcaccggcagcgagcggttcatcacccccgagctgaaagagctggaaagccagatgctctccgccggggaacagctcaccgccctggaataccagctgttctgcaaggtgcgggacaaggtggctatgcaggcccaccgcatccagcgtaccgcccgggccatcgcccagctggacgctctgtgctcctttgccctggccgccgagaaaaacggctatgtgatgccggaagtggactattccggggtgctggacatccgggaagggcggcatccggtggtggagaagatgctggaagatcagctgttcgtgcccaacgacacctatatggaccaaggggacgaccgggtgtccatcatcaccggccccaacatggcgggcaaatccacctatatgcgccaggtggccctgatcgtggtcatggcccagtgcggcagctttgtgccggccaaaagtgcccatgtgggcatctgcgaccaggtgttcacccgggtgggggcctccgacgatctgacgaggggccagagtaccttcatggtggagatgagcgaagtggccgacattctgcaaaaggccacccaccgcagcctgctgatcctggacgagatcggccggggcacctccacctatgacggtatggctatcgcccgggcggtgctggaatacaccgccagcaaaaagaccctgggctgtaaaaccctgtttgccacccactaccacgagctgtcccagctggaaagccaggtgagcggcgtgaaaaactacaatgtggtggtgaagaagcggggagacgacatcaccttcttgcggaagatcgtccccggcggggccgacgacagctacggcatccaggtggccaagctggcagggctgcccgactcggtgatcgagagggccaagcaggtgcttcagagcctgctggagcaggccccccagcaaaaggccggaagccggaaaaaggcttcccagccggaagcgccggaaggccagatgaccctgggagccgccatgggagaagaagtgctggaaaaattgcggaagctggagccggacaccctcagccccatcgaagggctgggacttttgtacgaactgtgtaaacttgccaaggagtgctgaaaaatgggtaaaatttccgttctggctccccaggtggccaacatgatcgccgccggggaggtggtggagcgtccggcgtcggtggtgaaggagctgctggaaaacgctctggacgccggggccgatgctgtgacggtggagatccgccagggcggcgtcacctatatccgggtcaccgacaacggcggcggcatggagccggaggacgccgttgtcgctttcctccgccatgccaccagcaagataaaaggggagcgggatctggaaagcatccataccctgggcttccggggggaggctctggcggccatcgcttcggtgtcccgggtggatctgttcaccaagacccgggaggctcccctggggctgcatctggccctcacagggggcgagatcacagagcaggaggagaccggctgccccgacggcaccaccattgtgatcaaggacctgtttttcaacacccccgcccggatgaagttcctcaaaaaggactccaccgaggcttcctatgtggagcaggcggcggaacaggtggccctggcccatcccgggctgaccctgaaattcatcaaggacggaaaagaagggctgtatactccgggagacggcaacatgatgtcggtgctctacgccatctacggcggctccttcaccaaagagcttttgactctccacgggggcgcccgggaggtggaggtgacggggtttgtcacaaagcccaccttctcccgggccaaccggtccatgcagcagtttttcgtcaacggacggccggtgcgctccaaattgctgggggccgccgtggagcaggcctaccagggccacctgacctccggccgtttccccgcctgtttcctttcgttgaaagtgcccgccggggcggtggatgtgaatgtgcacccggccaagctggaagtgaagtttgcccgggagcgggaggtgttcagcgccatctatcaggtggtgcgcagtgcactggaaggggatggggtgctgtttcagatgccccaggagcaggaggaagagccgcctgtgcccaagcagccctaccgccccagcctgaaacccctgttccagcagccccaggaggaaaaagagcagccccagctgcgcctggatcattcccacgccaccatccgtccctcctatgcgccgccggccagggaatatgagcgggaagaaaaggggagcggccgctcctttgcccccaagggaaaccagggagagaaaaacagctggaagagccgcagctttaccctggatccggaggaaaacggcgcccggaagatccttttccgagatgggcccgatgaggtgcggggcgtggccgcccagggcatgaaggatgcccaggcggccaggagccgggaagcagagacggttttgccccccgctttgccggtggagccggaaaagcccctgtcctacttggagaaggccaacgccatccgggtggtgggagaggtgttttccacctatattctggtggagggcgaaggggagatgatgctcatcgacaagcacgccgcccatgagcgcatgatctataaccgcctggagcgcacagccgagggcaccagtccccaggtgctgctcatcccggagacggtcaacctgtccagaagggaaaaagaggcccttctgggagaaaaggagctgctgcagaaggcgggctttgaggtggaggacttcggcgacggtgcggtgattttgcgccaggtgcccatgtacctggaaaaagaggacgccgggtttgtgctctccgatctggcggagaaaatcctcagccaccggaaagaccgtacccagctctatgaagaattgctggagagcatcgcctgcaaggccgctgtcaaggcggggacctttaccgacgacaaggagcgggaggagtttgccagaaaggtgatcggcgatccggccattcgctcctgcccccatgggcggccggtgatcgtccacctgacaaagcgggagattgagaaaatgttcaagagggtgctttagaagatggaaaaagtcattgtggtggcagggcccaccgctgcgggaaaaaccgccctggccattgaactggcccaggctttggggggagagatcgtctccgccgattccatgcagatctaccgccgtctggacatcggcaccgccaaacccacctgggaggaacagcagcaggcccggcaccatatgatcgatgtgatatggccgggggaagagtactcggtgtccctctatgccaagcaggccgcccagtgcgtggaggacatcctggaacggggcaagcgggtcattgtgtgtggaggcaccggcctttacatcgaagccctgctgcggggtaccgactttggccccgggggccaaagcaccgatctgcgccgcaggctcatggaggagtgggaaaaagaccctcaggccctctggcaggagctcatgcgggtggacccggaaaagagccggaagctccacccccaggaccagaagcgggtggtgcgggcgctggaggtcttccgccagacgggaaagcccctgtcttattttgaagagcagagcaggctggcgatcccaaaatatgaggcgctatggctgggggtgcggcccaaagagcggagcaccctttatgagcgcatcaatgaccgggtgaccaaaatgctggaagaagggcttttgcaggagacccggagcctttgggaagaagggcttttgcagggcaccgccttgcaggccatcgcctacaaggagatgctgggctttctccggggggagtgctcattggaagaaagcgccgatctgctgcggcgcaagagccgcaactacgccaagcgccagctgacttacttcaatcatgtggaaggcctgcggtggctggaatacgaaaaaccggaggactttcccgctttggtacaaattgcgacagacctcgcactctcctggctgtaagatgaaatggccccgaaaaagggggaactttttatcttatggacggaggaaacagaaaatgcaggaaaacagaagcgctttgcaggatcagtttttgaatgcgctgcgggtgcagcgggtgccggtgaccctctttctggtcaacggctttcagcagcggggcgtggtcagctcctttgacggcttcacgctgctgcttctcagcgagggaaaacaatatctcatctataaacacgccatttccaccattgtgccccagaccaaggtggaaccgtggggaagccaggaaagctgacggccttcccccttgcggcgtccgatcttccgggcaggaggccctttgacagcatatgagccgaaaaacctttttcaaatccctgggagccgtgctgctgcttttgctggtggtggtctatatgggctatcaggtgatggagaacctcaccgaaaaaatcgtcaccgccgatgcattgcaggtcaccgctcaggacaaagtttccgccaccggcatctttgtccgccaggagacgcccctttacccccagcaggggggcacggtggccttcctggccgatgagggggaaaaggtggcccggggccaggcggtggcccagttcttcaccgacgaaaaccagctggccctctatcgccagtcccaggctttgggggaagagatcgaaagcgtgaaatacgccttcacccatatgaccgacggttccgatggggtcaagctggactccttgatcaaaatgaatatgcttcagctgggcgccaagctccagcagggactggtgagtcaggcggaggaatattcctccaagctggacgccatgatcgtccagcggggcgtggcccagaagggggacaccgattatgccgccattctccaggagctggagagccagaaggcccagatcgacgcatccctccagggtggcgcagcggtgaccgctccggccgccgggtattttgtgggccgtaccgacggctgtgaggaatccctcacccccgagggcctgaaaaccctgtctgcaagcgccatcacccaggtggtggagcggcaggaggccggcagcgaggccatcggcaaggtggtggacgggtacagctggtactttgccgcccaggtgacggcggacgaggccaaaaggctgaaagaagtgagcaaagtcaccctccgcttcccccagcttctggcggaggacatttcctgctcggtgtacgatgtgcaccaggacgaaagcgggcagtgggtggcggtgttccaaagcgggtacatgaacgcggccttgctcatggcccgggatcagccggcggacatcatcctgcgcagctacaccgggctgaaggtgcccaaggaggccctgcggcagaacgacgagggagaatggggcgcctactgtctggagggggcccaggtggtgttcaagaagatcaccatcctcttccaaaccgacagcttctatgtggccaaagacaccggcaaaaacggggagctgacccgatacgataaaatggtggtcaaagccaaggacatcgagaatcgaaaggtggtaagctagcatggaagaaatgcgcaagaagatggaagagcgggtgcatctgatccgccagcagatggaagaggctgcaggtcaagccgggagagcgccggaggagatcacccttctggcggccagcaaaacccagagtgcagagatcgtggcgctgtcggccgccttgcccatcgatctctttggagaaaaccgggtgcaggaactggcatctaagtttgacgccggggcctacggcggcaagcaggtggacatgatcggccatttgcagaaaaacaaggtgaagtacaccgtgggaagagcgcggctcatccattcggtggattctttggagctggggcaggtcatctccaaggaggccgggaagaagggcctgtgccaggacattctgctggaagtgaacatcggccgggaggaaagcaaaagcggcgttttccccgaagagctgccccggcttctggaaaatatctgtcagctgccccatatccgggtgcggggactgatggcaattccccccatttctgccaaagaagggcagaaccgcccctatttttccgctttgcgccaacttttcgttgacataaagtccaaaagatacgataatgtccatatggactgcctgtccatgggtatgacccacgattatgttgacgcaatcctggagggcgcaaccctggtgcgcatcggcaccggaatctacggcccccggatctataaggaggaaacgccatgagttttatcgatgacctgaagcattgggccagaggggatgaggacgaggacgaagaagagctggaggaagaagagttcgtcgctcccgcccccgcaccgtcccgccccgagcccgacaacgaccgggccgaacgggccgcccggagaaacaataaggtcgtcaatatcaataccaccacccagctttcggtggtgctggtcaagccggaaaaattcgagaatgccgccgagatcgccgacaaccttcgtcagcggcgcacggtggtgctcaatctggaggacaccgccaaggagccggcccgccggctggtggacttcctcagcggcgtcacctacgccctggatggcaagatcaagaaggtggccgccagcacttatatcatcaccccctataatgtggacattctgggggatctgatcgacgagctggaaaacaacggcctttatatctgatgggaggcgctttttgacctatatctattatatctttcgctccgtggccgtgagcctgatctccgtgctggagctgatgatgctggtgcgggctgtgatgagctggttcccccagacccagggcggacggctgcaccaggccctggtgttcttcaccgagcccatcatcatgcccttccgggccctgctcagccgcatccccgcgctgcggggctttcccctggacatcagctttcttctggcctatatggttctgatcatgctggaaagtatgctgtaatcaggggaaaacgggaaagcagtacattcaccccaagagggcccagggccttcttggggccgcggcgtttgggcctttccccggcgccgcctggaatgccatacagagaaaaaaggtgggtgtaaaccgatatgatctcccctcaggagctgcaaaataaaaaattcgaaaaggccgtgttcggcggttacgatatggcgggcatcgatgagtttctggatgtgctcatccccgattataccgccctttataaggaaaacatgagcctgaaaaacaaaatgaaggtgctggtggacaagatcgaggaataccgcagcgtggacgaggaaatgcgcaaggccctctattccgcccaggtcaccgcccgggagctggtccagaagacccaggccgaaagccagcaggtgctggagggtgcccgccgggaggccgaaaacatcctggaagccgcccatgcagaggccgaaggccgggtggccggaatgcagcaggccatccatgaggaagaggagcggctgcgtcaggcccgggaggtctcggccgcctattcccagacggtgatcgagctgctgcaaaagagcatcaccgccatccagatgatcgccgactccgctcccgaagcaggcagcgtggcgccccctgcggcccccgccgtcgccgtgcccacggcgccttcggcccccgccgctgcggcggaagaaggggagaagccggaaaagcaggatgcggtggaccccatgctggaaacccgggtctttgagcgggtccaggcggcccagcaggccgccgaggaagccctccaggcctccctgggccagaaggacgcccccgcccccacagaacaaaagcaggaggccccctctttggaggacaccgcccgcttcaagtttgaaaacctgaagttcggcaaggattatcagcccgatgaggatctgaagggctgagccatcgccccgacaaaacaaaattagaaaaatatatagagaggtactgtaccaatggccgattacaacgaaacgctgaacctgccccaaacggaatttcccatgcgggccggtctgcccaagcgggagcccggtatgctggaaaactgggacaagatggatctttacaacgagatgctgaaaaagaacgaggggaagccccgctttgctctccacgacggccctccgttcagtaacggcggactgcacatgggccacgccctgaacaaatccatcaaggactttatcacaagactctatgccatgcggggctattacaccccctatgtgcccggctgggacaaccacggtatgcccattgagtcggccatcatcaagcagaacaagctgaaccggaaggaaatgagcatcccccagttccgctcggcctgccaggaatttgcccagcactacatcgatgtgcagatgaagggcttccagcgcatgggcgtgctgggagactgggagcatccctacaagaccatggccccggaattcgaagcggaagaagtgaagatcttcggcaagatgtacgaaaagggctatatctataagggcctcaagccggtgtactggtgcccccacgacgagaccgccctggccgaagccgaaatcgaataccaggacgatccctgtaccaccgtttatgtgaagttccccatggaggacgacctgggcaaactgagccacatcgacaaagacaagctgttctttgtcatctggaccaccaccatctggaccctgccgggcaacctggccatcgctatgcatccccgggagagctatgtgctggtgaaggctcccaacggggaaatctatgtgatggccgaggccctggccgaaaaggtgatgggcctgggtggctttgattcctacgagatcatcgagcgccacgaaggcgccttctttgagaatatgctggcaaagcatcccttcctgcccaagacttcccggctgctgttggccgattatgtcaccatggattccggtaccggctgcgtgcacaccgcccccggcttcggcgccgacgactaccagacctgccgccgctatggcatggagatggtggtgccggtggacgaccagggccgtcacaccgattacgccggaaaatatgccggcatgaagaccgaagagagtaatcccgtcatcctggccgatatgaagaagagcggcatgctcttcgcccaggaggacatcgttcactcctacccccactgctggcggtgcaaaaaccccatcatctttagagccactccccagtggttctgctcggtggaggccttcaaggacgaggccgtggccgcctgcgacaaggtgcgctggattcccggctggggcaaggagcggatgatctccatgataagagagcgggccgactggtgcatttcccgtcagcgccgctggggcctgcccattccggtgttctattgcaaggaatgcggaaagcccatctgcacccccgaaaccacagaggccgtcagcgccctgttcgaaaagaagggctccaacgcctggtatgagatggaaggccatgacattctgccggagggcttcgtctgcccccactgcggggggagccacggctttgaaaaggaaatggacaccctggacggctggttcgattccggctccacccactatgcgtccatgaagcgggatcagggcttctggcctgcggatatgtatatggagggcctggatcagtaccggggctggttccagtccagcctgctcaccgctgtgggtgcgctgggtgagggcgcacccttcaaggagtgcgtcacccacggctggaccgtggacggagaaggcaaggccatgcacaaatccctgggcaacggcgtggacccggcggagatcttccagaaatacggcgccgacctgctgcgcctgtgggccggcagtgccgactaccatgtggatgtgcgctgctcggacaacatcttcaagcagctgagccagaactatctgaagttccgcaacaccgcccggtattgcctgggaaatctggcgggctttgatcccaaccacctggtagctcccgaagagatgctgcccctggacaagtgggccatcacccgcctgaaccagctgatggagcggtgcaaggcggcttatgacgaatacgagttccatgtggtgtcccacgccatcaacgatttctgcgtggtggatctgtccagcttctatctggacatcatcaaggaccggctgtactgcgaggagaaggacggtctgcttcgccgttcggctcagacggccctctatctgatcctggacaccatcacaaagctctttgcgcccatcctgtgcttcacctgcgacgagatctggcaggccatgcctcacaaaaatgaggacgatcagcggaatgtggtgctcaatgtgatgaacgagccctttatggaatacgctctgccggaagaggagatggcaaagtgggacgctctggagaccctgcgggacggcgtcaacgccgcgctggaaagcgcccgggcccagaagaagatcggcaagagcctggaagccaaggtgactctggtgaccgagcaggcccagccccagctggatgggctgaaagcagccttcgaaaaccagtgggccgatctgttcatcgtctcccaggtggaggtgaaggaggacaaagggctgtacagctccgccgccgaaacaacggtggaaggcgttcgggtgctggtggaagaggccgccggtcagaagtgcgagcgctgctggaagcacgacggcgccgtaggccaggatgcagcccatcccactctgtgcccccgctgcgctcaggtggtcagcaaaatgggtctttgatccggttttcaaagcctagatgatagcaaaaacaagggcggcggccccatgggctgccgccctgtctatatggaaaagtggctgcggagtgcctccgctgtcatatgtcgcagcgccgggctgagaagtgggagacggctcctatcacgctgctcagcgaagctgggtgcaaaagacaaaaaaggtcagctatgcggcatgaagcggggctgttatttcgccatgctgatttgccgcataacacgacagcccaggcactgcactgggcaggaggggagtaaaatgatgctggaagagctgcgggagcaggtggtgttttacggaaacgagatgctgcgccagggactgaccctgcacaccggggggaatgtgagcgcccgggcgggggaatatatggtcatcaagcccagcagcgtgccctatgccctcatccgtccccaggatgtaacggtgatggatctccgggggaatgtgctggaagggttgcccccgtccagtgagtggcggctccatgctgcgctgtaccgggcctttccctggatcggggcggtggtgcacacccacagtctgtatgcctgcatgatggcggcccgggggaccgaagtgcccctttggcaccaggaattgggccgctattgtgcccggccggtgcagtgcgcaccctttgccacggcgggaacgccggaggtgggggagggggccgtggccgccatgggccaatgtaaccaggtggcgctgctgaaaaaccacggccttgtggctatgggcaaggatctgtggcaggccatggacgcggcctgtgccgctgagctctcctgtgccatgcactttgcctgtgatgtgcgccgcaatgggatgcccaaaggaaagaaacggcgcacctctacctggtagcacagtgcctgtgccgtcgtatgtcgcagcgctgagcggagaggtgggagacggctcccatcacgctgctcagctggggtatgtgcatgatagtcctatcaatgaagaaaccgcaacaacctacgccgtggggcatggaagaaggctgttacagcaccatagtccgtgccccacaacatgggagtgcaggcactgcaccgcatagtacgggagcggagccactccgccgccgtggggcatgagagaaggccgttacagcaccgcagtccgtgccccacaacacgggagtgcagccactgcaccgcatagtatgggagcggagccactccgctcaatggaaaaccgcaaaaagctacgccgtggggcatggaagaaggccgttacagcaccgcagtccgtgccccacaacacgggagtgcaggcactgcacggaggaatgtatgattttatatggtattttggtagcggccattgtggccggagatcagctggtgaaatggtgggccgtgaaagccctggggccggggggctcctgggatgtgctgcccggcatcttcagcctgacctatgcggaaaaccagggggcggccttcagcatcctggagggcaaacggctgtttttcgtgggcatgaccctggtgatgatcctgctcatgctccttttgctgaaaaaaggctatatcctgggcctttggggcaaaatcgccgccgccttcgtcatcggcggcgctctgggcaacggcatcgaccgggtgctgcggggctatgtggtggatatgttcgaagtgcgcttcatccgcttcgccatcttcaatgtggccgatatcttcatcaccgtgggcggcgtgatgctggtgatctatttcctcttcctggagggcaaaaccctgggagggaaggaatgatggacggacgcatcaccctcaccgtgccggaacatttggccgggagccggtgcgatgtgttcctggcatccatggtgccggagctgtcccgctcggccgcccagcaccttctggaaaaaagcatggtgaccaaaggggacaaacccctgggcaaaaaggacaaaatggcggcaggggacatcctccaggtgaccttgccccagcccaaaccggcgcaggcccagcccgaggacatccccctggacatcgtctatgaggatgaagatgtggtggtcatcaacaagaaaaagggcatggtggtccatccggcggcgggaaacgaggaagggaccctggtcaacgccctgctccaccactgcggcgacagtctttcgggcatcggcggccagttgcgccccggcatcgtccaccgcatcgacaaggacaccagcggccttctgatcgtggccaaaaacgacagcgcccatcgaaatctgtcggagcagctttccgaccactccctccaccgggaatatgaggcggtggtgctggggcggctgcgggaagaagagggcaccatcgacaaacccctgggccgcagccccaaggaccggaaaaagatggcggtggtgcagggtggcaagcgggccgtgacccattaccgggtgctggggcggtatcagggctatacccatgtgctctgccgcctggaaaccggccgcacccaccagatccgggtgcatatggcatccctgggccatcccatcgccggagacccggtgtatggcagccggggggacaaatcgggcctgcagggccagtgcctccacgcccggcggctgatcttccgccatccccgcaccggggaggaaatgcgcctggagtgtccgctgccggaggactttgccgcttttctggcaaaactgcggaaagaaagcgaagaatagaaaaagaccagaaaggggaagggaacatgggacgatttgacggggtgatgatcctcaccgatatggacgggaccctcctcaattcccagcgtcagctgagccggggaaaccaggaggccgcccggtattttatggagcaggggggccttttctccgtggccaccggaagagccaagcgggccatggaatattttatgccggagcttgcgatcaacgccccggcggtgctgttcaatggctcggtggtctatgactttgaaaaaaacgccccggtgtgggaaaagcccctggaagaaaaaacggcctgggactttgcccgggatatgatggagcgtttccccttcctgggctttgaggtctttctggccgacggggagtttgtggccaggagcaaccccatcaccgaaaagcacttcgttttcatccgcctgcccctggtggagcggcctttggaaaaaatccctcagccctgggtgaaattcaatctcaccggtgagccggaaaaaatgggaccggtggccgaatacgcccagaaaaagtatggggaagagtatttcatgcagttttcctccccctatttttatgaggtgatggccaagggggccaacaagggcgccggcgcccagacggtgtgccgcatcaagggcatcgacaagggccatctgtacaccctgggggacaacctgaacgacaaggaactgatggaatgtgccgctttgtcctttgccccggaaaatgccgccccggccatccaggagatcgccgggcgcatcctgccccactgcgacaacgacaccctggccgccgccgtacaggtgctggaagggatgtatccttaaattttgctgaaatctttcgttttttgaaaggaaaaattcaccctttgttcgtttgttttccccggtgaaaagtggtaaaatgaacacaggaaaacacccatgaagaaagtcaggtgcgcctatgaaaaacaagcgtttcattgtctttttgtcagcgttatccctggcggcttccctctctctgcccgccgcaggggccgacgccccctccgactgggccaaaaccgaggtggaaagcgccatctcccagggccttgtgccccgcgatctgcaaagcagctaccagacccccatcacccgccaggagttctgccgcctggccgtgaccatggtggaagtggtggaggaaaagcccgtcagtcaggtgatcgccgaccgggagctgcaaaccaaggaaaatgccttttccgatacccaggacgactacgcggaaaatgcctgtgccctgggcatcgtcaacggttatgaggacggcaccttccgtccccagggcagcatcaagcgccaggaggcggccaagatgctctatgagaccgcaaaggtgctggaatacaccggctccggcggttccctcaccttctccgaccgggacgacatcgcctcctatgcggtgacggcggtgaagttcgcctcctccaccggcgtgatgaagggcgtggaggacggccggttcgatccctcggggctctacacccgccagcaggcctacatcaccatggaccggcttctgtcggtgctggaaggggagagcgcagggggcgaaatgaccgccacccagatcttcaaccagtgctccccggcggtgtgctatgtggaggtctatgacgcggcaggccaggtcaccggtaccggcagcgccttcgtggtggaggaaaacggcaaactggtcaccaattaccatgtgatccaggatgtgtactccgcccgggtgaagttccccaacggcaagacctattcggtggaaaatgtgctggcctatgatgtgaagcgggatgtggctgtgctgagcatcagcgcccagggcctgcctaccctgcctctgggcgattccagcaccctggtcagcggccagacggtgtacaccatcggcagcccccagggcctggacaacaccattgccaacggcattgtctcggccacaaaccgggtggtggacggccaggagtacatccagaccacggcgcccatctctccgggcagcagcggcggggccttgctggatggctatggccggtgcgtgggcatcaccaccggcaccctcagcggtcagaatctgaacttcgccgtgcccatcaacgatgtgaaggaatatctggacaagaatgatcccatcaccctggaagagctggccggcgccaccagccgggtcaccgatatgcaggtgacgctgatgggggagaaggccacctacaccggtgaggtgctgggcggggccacccctcacggcgaaggccgggcggaatgggccgacggcagctattacgaaggcaccttccagcgggggatgccctggggcaagggtacctattataaaaacaaggaccagagcctgtataccggcgatttctatgccggatttgcccagggggacggcgtgctgaaatacggcaacggcgaccagtacgaagggcagtttgccggcggccagatgcacggcaagggcacctacaccttcaaaagcggtgatcagtatgtgggcgagctggcctacggcagcttccagggagaaggcgtctacacctatgtcaccggcgagaaatatgtgggcgagttccgcaacaacaagtttgacggctacggccgctattacggcaccaccggcaagctggagcgggaaggctattggtaccagggctccttcaaaggggagatcaagcccgtttagccttttccccagggccggggccattgctcctgcgtgatgcggaagaggatgtgctctgtgtcctggagcttttccccgtagtgtaccgttttccagggggtcattcccactctccgggccacattctgggaaggcaggttgttgtgcttgatgatgctgtacagcgccggggccgaaagaacatcaaagccatagctccggcaggcccgggccgcttcggtggcatagccctggtgccagtggcggcgctcaaacagatagccgatctccagaaaggacagctcgtccagggcctgggggactaggccgcattggccgatgacttccccggtttccaaaagctccgccgcccatagccccaccccgaagcgggcatagcggcggatgtttttttcgatccaggcctggatatccgggatggaaaaggtgcgttcataggcccgcatggcgatggggtcgcccatggtgcgctgaagggccggggcgtcctccggagtgagggggcgcagccggagacggggcgttaaaagagaaaaattgctggacatagaaaaaggcctcttttccgccggttgattttattccggcaatggtttatcctagtaaaaagggaatagcctgctttttattatggacaataggagaaattttgtcaaagggaagacggagacgatatgaatattgattttggcgcgaaattcaagaaatgccgcaaggacaaaggattgagcattgccatgctggccgagaaggccggggtcagccccggcatgatcagccagatcgagcggaataccacagtgccttccatttatgtgttctggaagctgtgcaatgccttgggggagagcgtggcctccttctttgaggaggataagcagaagaacaaggtgacattggtgcgggccggggagcatcggacggtgtccggcgcggggaacgagtacgccctgctcacccccgatcccgaccggcggatcgaaatgtacaaggtggtgttccaccgtcagcccgaccagaagccggtgctggcttcccacgagggcgccgagtgcgggtatatcatctccggcactctgcgggtgatcaccgaggaggaggagtatgtgctccaccccggtgacagtatttattttgaaagcaccattcttcactatctccagaatgccggggatgaggaagagtgcgtggccgtctggggcgaagttccctttacctggtaggcggcgtgacgccacggccaaaactcgctgaaggctgtatgggttgcttttccccggtgctccaaggctggcgggccagccttggaaagggccgggcgcaatcctggcagcgtgccacagaaaaagttggttgtattcacttggcaccggcgggggctccgcctggggcgcgaaaaaggtcggggaaaaacctagtttttccccgagggccagcggcggcgtcagcttccgatatgatcgttatttcggctttgcgccgaaataacacgccgccaatggcccaggaggggcccagcgtcacgctgggaagaaacctggggcaacacccgccgcagcgggtgttctggcccctgtgaggtgattttttgaatttagagcattataactcctatttggaggtggacttgggcaagatacgccggaatgtggaacgcatccagcgtcacatcggcccggggcgtggcatgatcccggtggtcaagggcaacgcctatggtttgggcactgtggaagtggcccggctgatgcacgatatggggatgggccttttagccaatgcccatattgccgaatccatccagatccgcaaggccggtatcccggtggatctgatgatcctgggggccttgcctcctcatgccgtcccctatgccgcccaatacggcctccagatgacggtgttcaacaaagaaggggtggacctgttcagccgggcctgccgggatgccggccataccggccaggtacatatcaagatcgaaaccggcctgggacgcatcggcgtcaaacccggcgccgatctggaacgattgctggatcatatcgcccaggcaggaaacctggaagtggtgggcgtctttacccattatgccaccgccggagagcgggagagccagtacgccaaggagcagttcgccctcttccagaagggcctccagcaggtgcaggcccggggcattcagccccagtacatccacaccgccaacaccggcgccaccatctggtttgaagagagctactgcacccatgtgcgctgcggcagcctgtacctgggttacagcaatatcaaaaaccacgaaaaccccctgggggtggaggaaccggccacctggcgggcctttatcaccaacatcaaggatctggagccgggggagagcgtgggctatagccgccactttatcgccgacaaaaagaccaccgtggccacggtggatgtggggtacagcgccggtctcaaccgcaatctggccatgacctatggcccggtgctggtgcgtgggcacagaacccggtatctgggtgtgtgcatggatcagtgcttcgtggacatcaccggcattccctgtcagctctatgacgaagtcaccctgctgggctgggacgagggagagctgctttccctgttccagctggccgaccatgtgcagcagaatgtacacagcctgctggcttccatcaaccccaatattgtgctgcgggtctaccgcggataaggaagggcagcctccggccggtgggtcgggggcggtttttttgaaaaaaaggagggctttgccatgaaaaataccaccctttgctatgtggagcaggacggaaaatacctgatgctgctgcggaacaaaaagaagcaggacgaaaatgccgggaagtggatcggggtaggggggaagttcgaggaaggggaaagcccccaggactgcctgctgcgggaggtgcaggaggagaccggcctgcgcctgacccagtaccgcttccggggcattgtgacctttgtctcggatcggtacgaaaccgagtatatgcatctgttcacggcccatggctttgaaggggagctgactgcctgcgacgaaggggaactgaggtgggtggaaaaggacgaggtgctctccctgcccctgtgggaaggggacagggagtttctccggctgctccgggaggacgcgcccttcttctccctcaagctggtctatcagggagataagctggtgagcagtgtattgacccagtgcctgggctcccatactgcgctcccgcgctaggcagtgaaacggagagaaaggcaaaaaaactccccctaatgggggaatttttatatttatgcactctgccaggattgcattatagctccttccagggctggctcgccagccctggaccactcaggctcatagcgcatcccaggcttcagcgagttttggccgtccggacaccggacacgacaaattcctggattcccatataaccgggggcaatggcgtatttggggaatacgatcaccacctggccttgctcattgagatagaaggactggtccggctcaatggtctggaaggcgaaatcatcgttaaactcgtcctcatcgtcccgggaataatacatggcgtccgggtcctcggccatcttcttggccatgccttccttcaccgcctggttgcacaggtcgatgtaatccggccccaaaagcccttccagggtgagatcttctcctgtcttcagatcaatattatagaaatactgctgggtgtaggcattggccccggtgatggtggagttgagcacaaaggataccacatccggcgtggtgtagtggatctcatagtcgatctccaccttcatcttccagaaatccgggtctcccggctgcttggtggcgttgtaggccgtgagatattcctccgccatgcgggtggcctccgcttccagctggtcgatcttgtcggcaatgcgctggttgatctccttgtccagctggctctcgccggtgccccggatggcaggcacccgcacctggatgtccttggcttcgtccacctcgtggctttcccggaaggtgaagaactgggccacatcccccagaaggggcacttcatacaaactggccgcccaggccggggacagattcaccgacagggcaaacagcgcagcacaggcagcgcaggccgtcagggtgcgggccgcaaaacgaatgggccgccgtttgggtcgcagggccttttgcacccgctcttccagctccgggggcacagggatgctctcatggagttttctcagttcatggggtgtcattagggtcctcctccagatgcaggcgcaggcggcccagggccgccttgagccgggatttcaccgtgttgatgttggtatcggtgacctgagcaatctcagaaaacttcatgtcggaaaaaaagcgcagcataaccaccgttttcagctggggttccagccggtcgatggcgtcgtgaagatccatggtctgggcggtgtccgggggcagaagggcgggcagttcctccagggcctgctgcaaaggcaaaagctcccgtttgtttttccgcagataagtcaggctctcattgaccagaatccggtaaaaccaggtcttcatatattccggctggcgcagagagggcagggctcgtaaggccttctccaaggcctcctgtaccacatccatcgcaccgtcctggtcatgggtatagcgaaaggccaggcggtaaaactcctgttgacgctgggtgacaaattggatgaattcgtcccgcagcccttgatccttctttctcatggtgtgccctcgccgggtggaaggggggttagcccatggcttcttccatgatctccagggctttgtcgctgtccgaagaaacgcacagcgctaccgtctgccccttggcatacagggcggcgtcttcgatcttgggcacttcggtggggacatagttctgaaagtcctctttcagccggggcaggtggttttccttcagaacggctttgatctcctgggcccctttttcatcgctggctttcagcaccaccacttcctctgcggtggccccggtgcccagatagatggcgcagtccgataccttgtcctcatagctctccaggcccagcaccgtgagagcggcgtccttgtcggtctcctccagcttatcctggaaggtgatgtccgacagaagctggctggcaagctttgagggatcggggttcttggcttctgcttctttcttctggcagccccccaggcacagggcgggcaccaggcacagggcgaagatcgcccgggattttatcttgaacatcgttttaattacctccccagatatgcgtgttcacataggaaaaccaaacgccataggcttctttggtgatatggatgccgtcggaagaatactccccgggcagagcgccgctttcatcgcaaagggcgctgtgagcgtccaggaacaaggcctgtttttcggcacacatctgccggatcagctcgttgaaatgctggagcttgggattgctgaaggtggaatccttctgggagcgctcggcggtcaccggcagaatgctctgcacatagatggtggccgaaggctgcaaggcccataggcggtcgatgagattgctgtaccgggtgacaaactgctcttcgctgccaaagcccagttcattcatgccgaacatcagatagatccggtcaaactgccggttctgcagggcctgctccacggtgatgcggcccgagccggaagtcaccaccggttctgtgagggcgttggtcaccgtcaggccgtttttggcgtagaccgtggccccgggcacaatgccgtagcgggcgatgccatcggtgatggagttgccaatgaacaggctgttctggaaggccccttcggctccaggggcgctttcgggcaccggctgggaataatcataggcggccgtctggggcgggggagaggggttttcctctttgggcgtttcctccagggaggtgttgtcttgttccccttcttccggggaagtttctttttctttggtgttttcttcgccgtccggggatagttcctccggttcggtggtggtgtccggggcgtcgggcaccgagtggacgggcaggcggacgatggcggaaacaaggctcacgccgcccaggcccaccagcagcgccaccgctgccagcaaagcccggcgccgacggcggcggcgagcgcgtagtgtttttttcatagcgtttatctccaaaaccgttgtggctgtgtctttctgattgattagacggggccagggggaaaaaagtttatccccggccaaaaaagtgagaaatttttttacagggccagcagcgcccggtcggcgccttcctcccggagaggacagaggcggccatgggcagtgagctggcggaagcattggccgcagccaatgcagggggagcggtgagaggggtcctgctgcacattctgcaaaaattccggctcacacacaaagggacggcagaaggacaccagggggaagcctgcatccaggcaggcctgggcatcgctgcccgagcggatgccgcccaccagaatcaggggcaggccggccttttgcagcgagcgggcctgcttcagataataaggctcggcggaaggggggaaggcgcggaaattgcagccgctgatctcggcggccagggcgcccagttttttgcactcttccagcaaaagcagcagctcctgctcatattctttttccagttccggctggggcaggttgcagttgaccttgataaacagggggaagtcattgccgcaggcctcccgcagagcgctgagcacttccagagggaagcggatgcggttttcattgctgccgccgtactcgtccttccggctgttgtccagcggggagaggaactgggagagcagatagccatgggccagatggagctgcaccccatccatccctgcttccttggaaatcagggcgctgcggacaaaagcctgcttcagattttccagctcctgggcggtaaaatccgagggggccttgccgccgggggccttccatccggcgtggctgatctgcatggccatgcaggaaccttcccggtggacgctctgggcgattttctggagcatgggcaggtttttctcgctgtccaggccgttttgtaggggagaggccttgccctccggggatacataacaatgggcgctgaaaataagccccacattctgccgggccaaaagggtataaagagccaattcctgccgggtcatctggccctgggcggtgccaagatcgtcctgggtggccgagcggacggctctgtttttcaaagaaagtccccccagatgcaagggggtgaagagcgatgtcacaaaaatcctcctaatcggtgttttttccctggatgagtatggtataatagctgcaagtcccgccggaatacatggggcgggaggacagaaaaatccacattttacgaccattttatacagtatatcacaccccaaagcaaaggggaagggacccctgggccaaaaaacagaaaaattttttgacccatggaaaaaaaggagaagaaaccaccgggagaggaaaagaatatggaaaattataaaatattggaacaccggtttccctcggcgggagggcggcagcaggtttatggcgtggcctatgtgcccgaccggccccggggaatggtgcagatcgcccacggcatggccgagcacatgggccgctaccgggagttcatggatttcctggcgaaaaatgggtacatcgcctttggctgcgaccacatgggccacgggaaaaccgcccgcaccaaagaagagctggggtattttgccccgaaaaaggggtttgacctgctggtgaccgacctgcatctgatggctatttatatgcagggcaagtacccgggcatgcccgccttctttctgggccacagcatgggctcctttgctctgcggctctatctgacccggtacgggaaggagctgcaaggggccatcctcagcggcaccggcggcaagcaggccggggcgggactgatgggggcgctgtgccggaaggggggagggagccccaaccggctggtggatcggctggccttcggcaatttcaaccgggggattgaaaacccccgcaccccctttgactggctgagccg

SEQ ID NO: 1074 - DNA, 4154 bp, Unknown
  16S sequences of unknown bacteria
ctacgaccttcgggttatgagcccgacgagctaccaactgctccaccccgcgatatttaccgccgtcatctctgacagcgaaaggtattatatcatataccgaccgcaattgcaagcccaaatttaactttttttgaagaaaatttttcgagcctttaatttgcaaaaggacaaatgtcaacaaaatcattataaaggttccccgccctgccgtaaaacggccgattcataacctgtctgcggacaggtgggtgccctccccgatgctttgtgcttccaacgtccggcaaaaaccgggaggcctgcatacccacaccgggagaccgggctccctattaaaagcttgtagggttataatggccgcaatattcgcggacagggcaggaaaaacctttaatcctctatatcgaaaatgtcctcgagacgagccgagaaaaaatcggccactcggctgaattcctcttcgtcggaaatttcttcaaagaactgatcgtcaccgtcggtgatctgtttcattatgacaagagggtcgctgtcctgaaggctttcctccgggtcgtcgtatactggcagcatggccacataatgaccgttttcaaaatccgcctcgtcaagcgcctcaaaggtatattcgtttccctcgtcgtcactcagagtgtatatatcgggggtttcttcgataaaatctttttcttccataataacgtctccgtgctttgggcatctcgccgtaaaataactgcctttttattttacccaaaaacaccccaatagtcaacatttatttttaatctcccttattttcatgtcaaaaaatccgtttatatcaaatatataaaaaattttataatttttatcacaaaactattgacaaaacacaagaggtgtgctattctatagttgacgaaaggatatatgataaaaacccgaaggaaaacgggcacctcaagagaggaattcttacgaaaggactgataccggtgcagaacgaggaacagatatgtgtcggtctcggctgtttttaaaaaggtcgacagaaaagcatagaggcttacatacggcgatgtgaaacaagagtggaaaaacgccgagccgaccgatggattttttacatatattttttgaaaggacaacatttgacatttaggacataaattcaaaaattatttttctttttcatattttttatcccgactataaggtgaaagccaatgtggtaatttgtttgtgagtcccccgtgtttaggggcttaacgatatgacattatcttttaaatccttccgatctcaaaatggaaagggcccggttaattccgggttcttttcattttatgcaaaaatcgcgaccgccgcccgcccgacacccgaaaccgatcgggtatgatttttccctctcctttttgttgcttttaatgcctttccgaggtataataaaaaagaaaagaggtatcggcaaatgcaggattattacgaccgtgttgaaaaaatcaccgaatttatcaaatcaaaatccggtttatcccccaaaacagccgtcgtgctgggcagcgggcttggcggatttgcctcggaaatcgaggagcaaacggttataccctttaccgaaattcccgactttcccgtttccaccgttaaggggcacgcgggaaggctgattttcggaaagcttttcggcaaagatattctcgcaatgcagggaaggtttcaccgctatgagggctatgacatgaaggacgtgacgctgtatgtcagggttatgtttatgctcggcatagaaaatcttgttttgaccaacgccgcaggaggaataaacaccgattttgtccccggcgaccttatgctcatcaccgaccatttttcgcttttctgccaaaaccctcttttcggcaaaaacgacgagcgtttcggtccgcgttttccttccatgagcgaggcctattcgaaggagtcggcgcttgtcgccgaaaaggcggcttctcggctcggaataccgcttaaaaagggaatatattgctacactcccggcccgacatatgagacgcccgccgaaataagagcgcttaaggctctgggctgcgacgcctgcggaatgtccaccgtgcccgaggccattgtcgcaaatcattgcgggatgaaggtgctcggaatttcctgtataaccaacatggcggcgggaatcacccaaaaacccctttgccacgaggaggttatggaaacgggacgagcggcgggagaaaaattcggccttcttatgaaggaaatttgcgccaacctgtaatatcacggcatttttaggagtaataatgatcagagaaataattcacgacccgcttttcctttccctgccctcaaagcccgccaccccggaggatcttgagacggcagccgaccttgccgacacgctgaaagctcacggcggagaatgcgttggaatggcggccaacatgatcggaaagcagaaacgcataattgtctttgaggaaaagggcaagataaacgtcatgttcaatcccgaaatcatcgccaaatcggaaaaatacaccgcgcaggagggatgtctttctcttgagggaggaccgagaagcacggtcagatataagaaaatcaaggtcagatggcagacggccgatttcagactgcgaatcaaaaacttcaccgattttacggcgcagattattcagcacgaaatcgaccatataaacggtattcttatttgataagaccttttcccgaaaaattattttacaaaatttttctcaaacctattgacatttgcaaaaaaatgcattaacataaggcttgtcaaatctgacgttcgttgaaaccatcgggattttttaaaccgatggcggaggacactctggagaattcattgagttgaatgccgaaggtgcaaggcgaaagccgaatctctcaggcaaacagacagagcagagcaaaagttgtatctgttatgctttcttcatactgtccgtcaaacgtcgggcagttatttttttggaggagtatatttatgcaagcaatccaggacgcacttttgcccatagtgcaaacaatcaactcctatctgtcggactacattctcatagttctgctcataggaaccggtcttttctattccatccgcacccgctttgttcaggttcgctgtttcggcgaaggtatgaaaaaagccttcggcagcatcagccttaacggcggccgccaggcaagcggactttcctccttccaggcgctgaccaccgccatcgccgctcaggttggtaccggaaacatcgtcggtgcctgcggagccattctcatcggcggccccggagccattctgtggatgtggatcatcgctttcttcggcatggcgacaatatacagcgaggccgttctcgctcaaaagacccgcatagttcatgaggacggaaccgtttccggcggccccgtctattatatacgcaccgcctttaagggcaaattcggaaaattcctcgccggtttctttgctgtcgccataactcttgcgctcggctttatgggaaccatggttcagtccaattccataagcgaggcctgtcacaatgccttcggaattcccggctgggcagtcggcattttcctttgcgtcgcagcagttttcatcttcatcggaggcatcggccgcataggcgccgtcaccgaaaagatggttcccgttatggccgttctctacctcgtcggcggacttgtagtgctgtgcgtccgtatcaaatacatacccgaaaccttcggtcttatcttcaagtatgcctttaatcctaccgctataatcggcggaagcatcggctatgccctcaaaaccgcaatcagccagggcgttaagagaggacttttctccaacgaggccggtatgggctccacacctcacgcccacgccctcgcaaacgtcaaggatccccacgagcagggcgttgtcgccatggccggcgtttttgtcgacaccttcgttgtgctgaccatgaccgccctcgtggtcatttccaccctcttcaccgagggcggccccctttacaacacggttctcaccgccgaatctcttgctgccgcaggcgtttcaaagaccaacgccgcccagcttgccttcggttcggttttcggaagcggactcggcaatgcctttgttgcgg

SEQ ID NO: 1075 - DNA, 5221 bp, Unknown
  16S sequences of unknown bacteria
ggcggcgccgcgcggcccggcgcgcgcaggttctgccccggcgcggcggcgccggccctgtcgccgagaatccgctgggtctcgcgcgtcaggaagcgcatccgcctctcgacgaggcgttcgatccgctccgccgcatcgggcgcgggggctgcggcgcgctccaccccggcatagatctggaagagcacgtccagggagagcgggccgcggccggcggggcgctgggcctccatcttctcctcctgcggctcgtccagaagggattccagcgaaaagcgccgccacgcgcggctgtcgcgccggagcacgcggccggcgatgcgctcggaaaaggccgcaaggcccctgtcgagctgcgcgcccccagcgcgcagctgccgaaggagcgcgagcttccccaacacgggccgctgcaccttgacgctggaaatgtcctttttcatctcggcgaacccatcctttgttccctgaattgcggcgcgccgccgcgccctgtgcgcaggctcacaggacctgcagcagcccggtatgcaggatctcgatgcgctcgatggcgatctccgtgctcatggcgttgagcgtcgggccctcgatgcgcacgggatacacctcgctcagggtccacatgtgctgcagcgtgccctgcatgtcgtagagctcgatcgtgcccacgagcttcgtatagctgcccgtgagcgcagcggccatccagaggttgtaggcgtcgacgtagacgacgccgcgctccagcgtcagccgctgggccatgggccctttgggaaagaagagcggaccggtgttgcgcccgccctcctgaaaggtctccatctcgatctcgtgcgagatgccggatacagaggtaaagctccccagcaggtctgcgccgatgcgcacggcaaaacagcacccgggcaggggggtcgcgagcaggctcatacgttccctcctcggttctgcgcgtcgctttcaaaccagagcgagctctcctcgtccacctcgcgcgcaatgctcccgcaggagagctcgagcgtctccaggagcacctcgccgtagctgctgtccaaatcgctgagcgaataggccacgggcagcgcatcgccgaggaaccagcgcgggccgtcctttccgtcgggcttgaggatggtcagggtgacctggcggcgcatccgctcccccgtgggccggtttccgtccgagcagacggaaaggatccagttgagcatgtcgtagtcgcccacaacgccgcgctccaggcggacgtgatcgtagttggtcaggcccggaatatcggtcgtggaggtggacttgtccgtccccacgcggtagggggcggtctccacgcgcatgcccaggccgctcacgcgggcaaaagccgcggagagcacgccgtccacctccaccttgaagcgaaagctctggtagtaataggcgcgggttccctttgtcttctgctgcatggtctctccctcccctcctcatcagacgcggtcaaacacgttttcgggcgtgccgctgatcttcttgttgatcttggagacttccttgcaccagcgccgccgctccttgtggtccaggttcatcagctcctcgtgcgaccagtgcatgtagtaccccaaaaaggccatctcctcgtaaagtctgtccgccgggtagaggatcaggcctgttcggtcaaaaaatccagcggcacctcgatggtctccccgcacttggggcaggtgatgtggtaggcgggcacgtcctccatgttgatgcgctgatagagatcctgcaggtaggcgatgtccaccgtgaacaggttctcgatgacgcgggtcgagatcgagggcagcgtgccgagcttggtcaccacgcgcgagagcaggatgatggaaaggtatccgccgttctgctgcacgcgcgggtccttgagcggcaggatctcgtccgcggcggtggccaggcgcatcacgccgttgcggtgcacgttgccctcgccgtcgacatagcccttggggagcgtaaattcgaattcggtctgcattgtatcaagcctcttttccatgcggaattaccaatagtatagcgaatggaaaacagtacggcaagcactttgcgcatgcctgccgtaccgcaatttgagttatcgtttcaccgggctttcaggccggtgcggcgcgcgcggcattagacctcggaggctgtcgcggcgtcctcgccggtggcgacgcgggccaggccctcgtgcgcgaattccacggactccaccgccacctccgcggacagggcgttgaagtcggggatggagtagcggcagggccaggcgttgatgatcagccattccggcccggggttgccggcgtcgtcgatcaggcgcacggtgatgttgcgccgctcgatgcccgtggggccggcctgctcgctggcggccacggtgtagatccagtcgaggaactcaaagtcgccgaccaggccccagcgcagcgtgatgttgccgtacttggtcaggcccggcagcttgcggggcgtgttgcgcaggtcgttgccctcgcggtattccacaacgtccacgttgaggtcaaagcccgatacctcggagaatccgccgcgggtcacgccgtcgatttccacttcaaatcggaacgttctataaggatagcgaatttctgacataagctaaatcgtcctttccgatgcgcctactctgggcacctgattttactcgccgccgcccgcctccgcggtgtgctgcgtgatgcggaagatcacaaactccgcaggcttgaccggcgcgatgccgatctggcagatcagccggccgttgtcgatgtcgtcctgcgtcatggtcgtgcggccgatttcgacaaagaacgcctcggaaggagaattgcccgccagcgcgccgctgcgccacatggaggccaggaacagctccaccgtgcggcggacgcgggaccagagcgcctcgctgttgggttcgaagacgacccagttcgtgttggcgcggatcgtctcctccgtgtagatgaagaggcggcgcacgttgacgtacttccacagcgcgttggaggaggccgtgcgcgcgccccagacgcggatgccgcggcccgtgaaggcgcggatcaggttcacgccctggggattgagcagatcctgctcccgctcgttgtagggggtggaaaggccggtgcagccgcgcacgacctcgttggccggggccttgtgcacgccgcgctcggtgtcgcagcgggcgtagatgcccatcaccgcgccggagggcggcatgtaggcgctgcgcttggccagggcgtcaaagcactccagccacgggtgatacagcgccgcatagctcgtgtcgaagatgtcgcgctgctcgagcagctcgtcgaccttggtggcggcaagcggcatgtccagcaccgcaaagcgggacttgaggttctcgcagtgcgcgaccagggagagctgcacgtccgcatccgtcacgcccggcaccgccatgatggagaccacggcgttctccaggaaggcctggatgcccgtgcgcttgccggggccgttgtccacgccgatgtagtccgcggccgtcacgcccgcgatgttgccgtccgagccgttgtccagggagagcagcagcatgccgccgtggccgcccagggaggcaaacggggaaaccacgccggcgggcgccgcagcgggcgcggtggcgggctcctccttgccgtccttgccctttgcgggcgcgggggcgggctttgccgcgggcagcgcggcgcccagggcgaccttgaccagctcgctcttctgcatccgggagacgatgtagttggaggcctccgcgttgaaggagacggcgtcgtactcctcggccgtgtcctcgtacttgacggtgaccttgatctccgcggtgcggatgtacttggccgggcgcaggttcttgtccaccacgtccgccgtcaccgcgccctcaaagacgaggatgttgtcctgcgaggacttgatcaccgcgtaggaagaggtcttgccgtcaaagagctcgaccacgtcgccggcgttgaagccgtcgctggacttgaccttcagggcgttgtcggccaccttttcgtagacctgggtgcgggccttggaggccggctccaggatcacgcggatggcgttgccccacaggcccgggttggcggcggtgaaggtcagccggccggcggaagccgccgcgggcttggcgtcctcgggcgcgacgcgcatgatgaaggcgcgggcgccgccgttgaggaagaactgctccaccgcgtagggcaggaagcgcttgtcgccgtacttggcctccgagaggtatccgccgtaggtgcgctggtagtccgcaaagctggtcacaagctggggcttgccgatgacgggtccccgcatcgccatgccgatgaagcctgccgtcgaggtgctgaccgcctccatgggcaccgcaccggagtcaaattcttcgacgtatacgccgggggaaagatattctggcatgttcgtttctgacccgctgcttgcgcgtggatcagagtcctcctctcgccttgaatttttttgccgcgcggcttttcgtcgcgccggctctatctcttgggcccttccgcagtgcggccaaggccctcaagcgtcgttgcgttccagcgcgccaaggcactggtccaggatcgccctctgccgggcgagcgcgcgctccagcgcccactgggcgcccagcccgtcctcgtagtagagggtctgcttgaaataggcgcgcccttcctcgtccgcaaccaggcagccgtcaccgagcgtccggttcagccggttgcaccgcagggccgtctcctcggggtccgcccgcccgggcaggcgcgcgtagagcgcaaaccgccctgcatggcatcgaagcacgacgggcgcccggccccgccggcacgccgccagaaagcgcagctcctgtccgcgctgcgcaaagggaatccccagcgcgcgcagcgcatccatcgccaggggcagcggactctcactctccatgggtcttcgcctcgccttccggtccgtccagggagtctgcgccgaattcggggagctcctccggcgcgactgcgtcgggcgcgaccgcccccgcggccggcccttccggctccgcctgcggcaggcgctccggcggaacgaacgccgcgccgtcctcgagcagccgcagcgctgcggcgttgcccgcgcagcgcgcgacggcctgcac

SEQ ID NO: 1076 - DNA, 32759 bp, Unknown
  16S sequences of unknown bacteria
cataatcgcatccaagagcttttgcccgaagcacgtcctccacggagtggcaggacgcccccagcacctcgaattccttccgttcctccgaactcatcttttccaaggcctccagtggcatgtgcagcgccggaatgcccagctcccgcgccacctccgggtgactgtgagcaatcaacaaagcaccggcactccggcagatgtcccggaccttccgagccagcaccgaatattcttttaccggcagatccttctcccgaagcacgatcccgaatggcttcgccgcagcaattttctcaatctgtttcaagaagtccgcttccccttcgaaccgcttccggctggtgatcaccaggattttcggattactgcacgtacacataatcgttcatcaccggctgaaggccggccgcctcctgatctcggtacatctcctccaggctccgatcgtcgtcgatatcgaactgctcgtcgccctcggcttcccccttctttccggtatacttctcttcatggtcgccgattccggtggataccccggcggaaaccttggtagccgcaatccgggtaatgccgtctcggaaagcccggctctctcgggaggataccacaatctgcgcaaacggcaggaaaatccggtatgcgcacagaatctggcaaagctgggtctcgtgcacatccttcggattgattttgtcgttgttcacgattggacgcagtctcgggcaggagatggaaatatccccatggggatatttcctctgcagcagacaggcgtgcagcgccgtggcaaaggcatcctttcggaaatccgacagccccagcagtgcagacattccaacgcctctcatgccgcccataagcgcacgctcctgggcttcaaagcggtacggccagattctcttgttaccggccaggtgcagctgctcgtagcgatcggaatcgtaggtttcctggaatacggtgacgtaatccaccccgcattcgtgcaaataccggtaatcgtccacattcaccggatagatttcgatgcccacgttccggaaatacttcttcgccagcttgcaggcctcgccaatgtacttcacatcgctttttaccggagactcgccggtcagcagcaaaatctcctcaattccggtatccgcgatgaccttcatctcgtgctcaatctgttccgaatccagtttcagtctccgaatgtggttgtagcagttgaatccgcagtatacgcagtagttctcgcagtagttggcgatgtacagcggcgtgaagatgttcacggaatttccgaagtgacgggaagtcacccggttggcccggcgagccatctgctccaggaacggctccgctgccggcgacagcagtgccttcaaatcctcaacggaacaggtctcctgctccagagccctttgcacgtcccgcgccgtgtacttggacggatcgtattccgccatttccttcatcacccgaaggcggagggacggatcgatctgatccattccttccagatacttcatatgatcgattctagaggacgggtcgttctccagacgatgtttcttctccagagcggcgggagacagatgctcggaatccaccaaaaaatcattttccataaagtacctcccctagttccgcaggaatccggtcagcggatcggaagcggatgcgcctctggtgaggactcttcccagaccggccaggtatgcttctcttccggcctctacggctttaccgaatgcactggccatctgcggtacatcgccggcggttgccaaagcggtgttggccataattgccgccgcacccatctccatggcttcacatgcctgagacggtctgccgattcccgcatccacgataatcgggagctcaatctcatcgatgagaatctggataaattccttcgttgccagacccttgttggatccgatcggggaagccagcggcattaccgcagcggcaccggcattcaccagatctcttgcggtattcagatccggatacatgtacggcatgacgatgaacccttccttcgccagaatctccgtcgcttccaccgtcgcctggttgtccggcagcaggtacttgctgtcccgcataatctccacctttacaaaatctccgcagcccagttctctgcccagtctggcaatacgaaccgcttcttccgccgtccgcgcaccggaggtattcggcagcagggtgatgttcttcggaatgtagtccaaaatattctcgctgtccttcgtgttggcccggcgaacggccacggtgatcagctctgcaccggcattctccaccgctgccttaatgagatccaggctgtactttccggagcccagaataaatctcgaattaaattcttttccgccaattactaatttatcgtctttcatttgaatgcacctttctcctgcatcgattcggaagtgactggcacgttccgcatcattatttttagggattatctataaaaaaaaagattcgttcgtcatcggtgtccggcttagccaccacccatgaatttcaccacttcgatggcatcgtcttcctgaagaacccttgtgtcataggccgtcttcggcacgatttccaaattcacttccaccgcaacggcggttttcttgtagccttccgcttccagcatctccgctacggtcatgggtctgtcgaatttccgatcttccccgttgattttcatccctttcacctccttcacttacagaatcggcgcatccagattgcttgttttcgtcttcatgtggcgatgctccggggctcggaagccgccgcagcaccgcacttgtttttaccgaatcatcggcactttctcttatgagaacttagagaatatcgatgtattctccggacagagccttgttcatgctccgtaccgcacagaacttaccgcacatgctgcaggtttcgctgtgatcttcttccggggaacggtcgtcccggatggctttcgccgtttccggatccagggcgcactcgaactgcgcatcccaatccaattctcttctggcatcagccatcttatcgtcgatatcccgcgcattcggaatgcctttggcgatatccgctgcgtgagcggcgattttggaggcgatgatgccctgcttggtgtcttctacgttcggcagcgccaggtgctctgccggtgttacgtagcacaggaatgccgcgccgttcatggctgctacggcaccaccgattgcagcggtgatgtggtcatatcccggagcgatatcggtcaccagcggtcccagtacgtagaacggagcgcccatgcagatgctctgctgcaccttcatgttggcggcaacctgatccagcggaacgtgtcccggaccttccaccattacctgtacgttgtgatcccacgctctctttgtgagctcgcccagacgaaccagctcctcaatctggcatacgtcggttgcgtcggccagacatcccggacggcaagcgtctcccagggatacggtaacgtcgtattcttcacagatgtccagaatctcatcgtagtattcgtagaacgggttctcgtttccggtcatgcacatccatgcaaaaacaagacttccgccacggctgacgatgttcatctttctcttgtgcttccgaatctgctcgatggttttccgagtgattccgcagtgcagtgtgacgaagtctacaccatcctctgcatgaaggcggacaacatccacgaaatcctgtgccgtcagggtggccaggtctctctgatagtgaatgacactgtcgtataccggaacggttccgatcattaccgggcattccgatgtgagcttctggcggaacggctgagtgttgccgtggctggacaggtccataatcgcttcggcgcccaagtccactgcgctcatcaccttctgcatctcaatgtcgtagtctttgcagtctctggatacgccgaggttgacattgatcttggtgcggagcatgcttccaacaccttctgccgataagcactcatgtctcttgttcgccggaatagcaacctttccttctgcaacaagtttcataagcgcctcgacatccatgttttcctttgccgcaacggtacggatctgctccgtcacaatgccttttcttgcagcatccatctgtgtcgtgtaattgctcaaaataatcctccttactttctaccggcaatttttgccggattcaaatgaacaattttttctaccgcggcagaaagtggtgctcccggtctgccgcctgcaataaaaaacacggattaccaactttcgttccggtaatccgtgggtttcacgatcttatcttccctccgttggcattatccaaatcaggttatgggtcgaagtattccttcctctcagccggctgcttccagctccccgtatgtttttttactgcagttccattgtatcacgattccaaattctgtcaattattttccgtttacggattgtaatgatattcatgctcatgtataatttcacattgtacgggttataatacataaccgctgtgaccaaagaaagagagaggaaaatattattatggaaaagaacgttagcaaggcgcgattcattgtgccttccgtcgtcggaatcttcctgttcatgattccgatcaaggtggatgaaagctggaccattgccgtcaaaatcatcgcggactggatttctgcaatcgcagagagcatcctgcccggtctctgcctgttcatcctgaccgtttcggccgtactgtgcctgatggctttcgccaaaccgaaattcatcatggaaaatacgctcttaaaggaagggttctgctgcacgccgttctgggcggccacccgtgtgctgggatgcgtcttctgctggctggcctacttcaatctgggaaatgaacagggccggggattttcgaaattcatcggtgcccttaccggtccggatcagggcggaatggccctcggcctcatcgtgggattggtcatcatcttcctgattgcctccttcctgcttccgctgctgctggatttcggtcttctggaattcgtgggtgccctgctgacgaagttcatgcgtcccctgttccaggttccgggccgtgcggcagtagattgcatcacctcctggatcggtgacggcacgctgggagttatgctcacctgcaatcagtatgagggcggctactactccacaaaagaagcatccatcatttccacctgcttttccgccgtatccatcaccttctccatggtggtactggctcaagtggatttgacccagtatttcggcatctactacttaataatctgcctgattggaatcgtctgcgcggtaatctgtccgagaatctatccattgcgaaaaaagccgaaggattacctgattccgggcaaagccatgccggaaacactgccggaaggttttacttcttcgaaagagtacggcctgcacctggccatgaagagagccgcagcccacaaaggtgttggcgaattcttccgaaacggcgcaaagaactgcctgaacatgtggttcggcgtcctgccaaccgttatgtgcatcggtaccgcggcccttgtggtggccaactacactccggtcttcgactggctgggcatgccgttccgtccgcttctcagcgccctgcaggtgccggatgtcgctgcagcggcttccaccatggtggtcggcttcaccgatatgttcaccccatcggtaattatcgccggcaccaatgcggttccgatgactcggttcatcgttgcggtggtttccgtaacccaggtgcttttcctggacgaagtaggcggactgattctcagctccaagctgccaatcaacctgttcgaactgttcctcatcttcctggagcgaaccattatttctctggcaatcgtctgcccgattgcccatctgctgttctaattgcaagcggcattttctaagaatcaaaaagcatccgaaggatatcaatattccgtccggatgcgttttttctttttctgcacacatgtttgtggtacacttttattgatgtaaaacgaatatgtatcaacaacttgaaaggacggtgcccctatgtttcgcaaaatgcgtcgcttcaaacagcagattaccgatgaagaatgccgtaaaattctggcggagaaaggccgaggcgtgttgtccctctttggcgaggacggatacccttacggcatcccgatgaattatttttatgatgaagacgaaaacaaaatctactttcactgcgcgaaagaaggacacaaaatcgatgcccttcaagccaacgagaaagtatccttctgcgtactggacaaaggcacctactcggagggggactgggcctgcactctgcacagcgtcatcgtattcggtgagattcaccttgtttccgatgagaagaaggcctttgagaaactgtgcagcctgggaatcaagtactatccgacccgggaagaaggcatcgaaactgccaaagccaatgcctcccgcacacagattctggagctgaacatccaccacatcaccggcaagcgggttcatgagaaataagaagtaatacaaaacagtgccaccctcagaacgggtgacactgttttttcaattaaagccttccggctttctccaatatccgcttcaaatactgcccggtataggattccgggcacatcgccacttcctccggggtgccggtagccacaattgttccgcccccgtcaccgccgtccgggcccaggtcgataatgtgatctgcgcatttaattacatccagattgtgctcgattaccagcaccgtgtttccgtcgtccaccagacggttcagcacgtacatcagcttatccacatccgcgaaatgaagtcccgtggtcggctcatccaggatgtataaagtccgaccggtgctccgcttggaaagttccgtggccagcttgattcgctgagcctcgccgccggaaagctgtgtagacggctgtcccagcttcacgtatcccagacccacttcatccaacgtcttcagataccgctcaattcccgcctggttcgcaaagaacggcagggcttccgaaacggacatctccagcacctgagaaatattctttcccttatactttacttccaaagtctcgtggttgtaccgggcaccgccgcacacctcgcacggcacgtacacatccggcaggaagtgcatctccactttcgtgatgccgtctccgcggcaggcctcacatcggccgcccttcacgttaaagctgaaccggcctttggaatatccccgaaccttcgcttccggcatctgggcaaaaagatcccgaatatggtcgaacattcccgtataagtcgccggattggatcgcggtgtccgtccgatcggcgactggtcgatatcgataaccttatcaaagttctcgataccctgaatctcccgatatttgcccggcgtctcctgcagtcgattggttaccgccgcaacccctttgtaaataatccggttcaccaagctgctcttgccggaaccggatacaccggtcacgcataccagctttcctgccggaatctccacatcgatattcttcaagttgttctccgcagcccccagcactcgaagggacagtccgtttccttcccgtcgcttcgccggaatttcgattttccgaaccccggacagatactgaccggtgatggattccttacatgccttgatatcctccaccgttccttgggccaccagcttgccgccgtaaattccggcccccggaccgatatccacgatgtgatccgccgcatacatggtatcctcgtcgtgctcaaccacgatcaatgtgttgcccatgtccgtgaggtttcgaagggcctgcaaaagcttatcgttatccttctggtgaaggccgatgctcggctcatccaaaatatacaaaacgcctaccagaccggatccaatctgagtagccagccggattcgctgggactctccgccggaaagggtgcccgccgcccgagacagcgtcaggtatcccagtcccaccgtctgcaagaaggaaagccggtccataatctccttggtaatcagcttcgagataaccttctctcgttctgtcaattccagtttccggaaaaaatcaatcgcctgaatcacggacatgtccgtcacttcgatgatatttttaccccccaccgtcaccgccaggaccgtatccttcagcttccgaccgtgacatgtcgggcactccgcctccgtcatcatgcccccgattttctcgcggatgtagtcggacttggactcaccgtagcggcgctccagacttggaatgatgccctcaaaagtatgattcatatgggaaacacgaccgctcttactggtgtaggtgtacttcagcttccgagttcccgttccgtagatcagttccttcttgaaatcctccggcagctccttgtacggccgggtgatgtccgtgttgtggtcaatggccaattgctgcagcatctgccgatagaaccccatggcgtccatcgaggcaaaaacattccccatcgcacctttcaccaggctcttattctcatccgtcaccagggattccggtttaatccgcagagtaaaacccagtccggtgcaagtctcacaggacccgtacggcgcattaaacgaaaacatccgcggctccatctcctcgatgccgatgccgtgttccgggcaggccagcatcgtgctgaaggtctcctcatattcctttcggcttccgtcctcttggttctcggcaaaaagaacgttcaccagtccttccccttcccgaatggccagctctaccgcctccgcaatacgactccggttgtcttctttcaccactatccggtcgatggcaatttcgatagtatgcttcttgttcttctctaaaagaatctctccgtcatccaggcggtgcatctcgccatccacccgaactcgggtgtagccgtctctctgaattcgtccgaagacacctttatgttctccctttcgtcctcgaattaccggggccagtaccgtcagccgggtgccgatttcgtgtcccgcaatccgatccacaatgctgtccacagattggctggtaatctcccggccgcaaatcgggcagtgcggaattccgattcgcgcataaagcaatctcaaatagtcataaatctcggtaacggttcccaccgtagaacgcgggttcttgttggtggttttctggtcaatggaaatagccggagaaaggccctctatcaccttcacatccggctttttcatcaatcccaaaaactgtctggcataagcagacaggctttccacgtatttcttctggccttcggcatatatggtatcaaaagccagcgatgacttcccggaaccggacagaccggtgaataccaccagccggtcccggggaatcgttacatccaaatcctgaagattgttctcgcaggctcctttaatgacaatatttttctccatttcgtaccctttccggaaaagttttatgatacgttacagtatagcatcttcggagcctgcgtgcaaacatttgttcttaaaatcctccggattatttaatctttaccttcttggttccggaccatgtcccgtagtaggttttcccgctgattttcttatagcttcgaatctttacggaataggttttcttctttgccagcttcttaatggtcttcgctgtctttgtgctcgtgtaatacttcgcccttttagttcccttcttcagaacgtaaatctgataggtctggcttccgccgcccagtttcttccactttacggtcattttcttcttgcccgcttttacggaaggagttttgcactttgccggacggattacataagatgcggctaccgtgcctttgtaattatcggttccggtaacggtcaccttgtagctgcccaaatttttgcatccggacggataacttactttgaacccttcggtaatccgtgtgccgttttcgtcatagacctttacggacggcttctgtactttgccgttgtacgtcagcaaggttttggaaagaaccacctttcggatttcgagagaagattcttttttcacaaaatcatcataggttttcttcgcttcttcgaatgctgccttatcttcttcgtaagtcttccgaacatcttggaggcttgattctgccgcttccgtttccttcactgcagtgtccagtgcagcctttgcctgactgacgtcggacttcttgtccgttaccgcctgcgccgcctgaaccaggtccgggaaagcatcccggtaggtctccggattctcccggtcaattgccttcgcccgatcgtattccttctgagcggaatccttgacatcctgtgctttttgctgaaacgcttccttttcggataccgcggtttctgcatcggttgccgatttgttcgccgcatccatctgattctttaaattctgagatgcattggtcttatcggtaacggccttctctccggccgttacggccttttctttttcggccagatccgacttcgcattctgaagtgcggtctccgcatcggtgtaatatttcactgcggaagaatccttggcttcaatcttttccttcgttgcctttgcctgatccaacttggactttgcgtcggaagcaaagctgttcaccgcattccgccactcctgagcggtgtaggtcttacctactgcacggttggcgaaacgctggcagtaagacactctatactcttcagaaccgtaggagatgccgatgccggtcatcggggcagtaccgtagtctttcgtgatattcttatagtgtccggttccgtctttcttgttgttatcatagatttctttctcttctgtataccatccgtcaaacggatcttggtatccccgagcaagattttcggaccagttggttgcatttggaaaattaatcctgtttatttcattatctccggtattaaacaatacgtggtccccttgatttcggctcaccatggcggaggcggtagcagacactaccatttccgggctcagcttcatggccacgcggttgttggcttcggtgaaattgttatcggttttcctatagttgttgcaggtatccagaagagttgcaactctcagaagattttctacagaaaacgcttcgttgaatgtagtttcatcgtaagcattcttaactttgtcgtccgacgaattggccagcagtttcttccagttcgcaatcttataactgtcgttggaaatcacgctgttcagaaaatcgatgcccacattgccgtaggcggtctgtgccgctttcagcttttccttggcatcctgcaaatcctgttcgtacttcgtctgagccgcagccatttcggtctgtgcgttctttacggacgcttccgcatcggtcttttctttttttgcctgttccagattctgctttgcggtttcgatggcatcctgcgattcccgataatcggttgtcgctttatcgcagttcgatttcgctcggtccaagttcgtctgtgccttcgtcagctctgactttgctgtctggagcttttcatccgcctgcttcaaagctttctctttctccgtcactgcatcgcggaaggcgttatcggcttttgtttccgcagatttcagctcggtttgcagccgatcgtattcctgctgctttcccttctgcgccttctctgcggcatcctttttcgcctgagcgtccttatacgccttctcgctggcatccaagcgcttctgggcttcgttttttgccgcttccgcttcttccttcgaagaaggtgcctgcgcctcttcgctctccgctgccgttccggtcggggtcgccgccagaactgtcaccggtacagtggtgcccagcatggcgatactcagcaccgccgccaggcccaagtgttgaattcttttcttgtccatatccatcctcccatttaacacgattggaaatattaatactctaattatacttctttttgagcaaaagtcatacaagcagtggttcaaatcacgtttgccggcggccgcatgctgaaaatggcctgagacttggtgcaaagcgaacggaagaacaaggccttgcggggattcgtgcaccaagtcccccgcggccgcgccttgaaacaacccgcagacttggtgcaaagggaacggaagaacaaggctttgcggggattcgtgcaccaagtcccccgcgaccgctccttgaaacaacgcgcagacttggtgcaaagggaacggaggaacaaggccttgcggggattcgtgcaccaagtccacagcggccgcgcgctgaaacagcccacagacttggtgcaaagcgaacggaagaacaaggccttgcggggattcgtgcaccaagtcccccgcggtcgcgccttgaaacaacccgcagacttggtgcaaagggaacggaggaacaaggccttgcggggattcgtgcaccaagtccacggcggccccgcgctgaaacaacccgcagacttggtgcaaagcgaacgaaagaacaaggccttgcgaggattcgtgcaccaagttcacggcggccgcctgccgaaaatgacctgagacttggtgcaaagggaacggaggaacaaggccttgcggggattcatgcaccaagtccacagcggccgctccttgaaacaacccgtcgtctaatcctacaaaagaaccccctgcatttctgcaaggggttcttccgaacatcattcaattccgacagacccaagtccgtcccgaataattaataattcttgtaatctccgtcgttcagagctctcagtgcacccagagccagagccttcatctcttcttcgcccgggatacggatgatcggagcgatctttcctacgtaggaagtgatttcctcgcagaaacgttcactgtaagccattccgccggtgtaaacgatagcgtctacatcgaaacgcagaaccgctgccatagcgccgatatcctttgccagctgataagcaattgccttgaatgcgcccatgcactcttcatcgtgctcatcaaatgccttgttctcaacggtacggaaatccttggttccggtgtaggagaatacgccggcttcacggccgatgattctctttacttcgtccttggtctttccggagtagcacaggtttaccagtgcgtttgccggcaggcttccgcctctgtccatacccatagcaccctcgtccttaacgttgttcaggtctacggtcttgccgtgcttgtgtgcagcaacggatacgccgccacccaggtgaacaccgatgatgttcagttcttcatatggctttccaatctgctttgcagcttcacggcaaacagccttctgattcagtgcatgccagaaactctgtctttccatgcccttcagaccggagtaacgagcaacgtcttccagttcgtcaacggcaaccgggtcaacaaagaatgccgggatgccgactttgtctgccagttccttggaaatgtaggaacccaggtttgctgcgtgctcaccgtaaggcgggttcttgatgtcctcgattactgcatcagttaccttataagtaccggatgggatgtgcttgagcagtccgcctcttccgcagattgcatcgaaatcttccagcttaaagcccttctcttccagagtcttcatgatgatgtcacgacggaacggcatctgatcaacaatcttttcgtgcttgtccatttctgcagcatcgtgatcgataccaacgcgcattacctcgttctcatcctcataaactgcgatcttagtggatgtcgcaccagggttgattaccagaattcttttcattcgtaaaatttctcctttcaccttgtgaaaaatagtgtttcgtttaatcccttacccttctccagacgttattatattattattcttcgtcattcgcaagtgtttctaatgtagcaatgagctgacccgacttaacgctgtccgcttcctttacatacatcttctcgatgacgccgtctctcagagccagtacgttggtctccatcttcatggcttcgataaccgcaatcggttcccccttcttcacttcgtctccggctttggcgatgaccttgacaatggtgcccgggatattggcgccgatttcgtccggatcgtcctcgctggcgaactgaatcacactgcccgccattacggaagtggtgagtgcctgcttatccttcacagaaatcactctgcgatttccgttgatggtaaaggtcagatctctcattccttccgcattcggtgcgctgacatcttccaaggtgataaccatggtttttccttcggtcagcgtaatctctgccgtctgacccaatgcgattccgtggaagtatacatcggaacccatattccggaagttgcccttcttcttcaggtttttgacgtaatcgtcgaataccttgctgtacatcgcatagctgagctgctgctgatccgttccttccagacccaggtcctctacaatatgacgcttaaattcttcgtaatcgtcatcttccagcaactcgcccggtctgcaggtaatcggctctctgcccttcagcacaaccttctgcagatcttccgggaatccgccttccggctgaccgatcattccctcgaagtaggaaacaacagaatccgggaagtcgaaatcgacacccttttcgacgatgttctccggtgtcaaatcgtttcgaatcatgaagattgccatatcgcccaccaccttggaggacggagtaaccttgatgatatctccgaacatctggtttaccttcacgtacatatcttttacatcgtcgaaacgatgtccgataccaaagctttctacctgaggtttcaggttggagtactgtcctcccggaatctccagacggtaaatctctgcggtagtcgacttcaggtcggattcgaactggctgtataccggacgaacgtctatccagtaatcggaaattctctgcaggcctctctgatccataccggtatcccgatccgagctttccagcgccgcaacgatggaattcagtgccggctgtgaagtaagtccggacatactgttgaatgcggcatccgcaatatccaatccggcagaagcagccatcagaaccgttgccacaccgtttccggatgtgtcgtgagtgtgcaggtgaatcggaacagtcacttcgttcttcagtgcacgtaccaatttctccgcagccaccggcttcagcagaccggacatatccttgattgcgatgatatgcgcacctctcttctccagttccttcgccatgtttacgtagtacttcaggttgtacttctctctggattcatccaggatatctccggtgtagcacatggaggcttccgcaatcttaccctgattcagggtctcatcgatagcgatttccatgcccttaatccagttcagggagtcgaagatacggaatacatcgattccggacttcgcggactgacggatgaacttccgaatggtgttatccggatagttccggtatcctaccgcattcgcaccgcggaacagcatctggaacataacatccggaatctcttcacgcagggtttccagtctttcccacggatcttcgcccaagaaacgcatcgctacgtcgaaggtcgcgccgccccacatttcgaaggagaagaaatcctttccgtaagtggccattgccggtgcaatcttcaccaaatccttggttctcattcgagtggcaatcagtgactgctgtgcatctcggaacgatgtatccgtcagcagcagcttcttctggttcagcgcccaatccgcaaccgccttcggacccttctcgtccagcagctgcttcgtcccgcggaaagaaggaatctgactcttatctacctgcggaaccaccggaacgttatagtccattctgtggcccttcgtttcgtttacatacttgtcacccaggaattccagaacctgcagctctctgttggttaccgcacggatgttcagcagttccggattgtcgttgatgaatccggtgttgcagtttccggcacggaatgtcgggtggttcagcacgttcaggaggaatccgatgttggtcttcacgccttcgatacgcatctccgtcagcgcacgaaccgccttgttgacggtgtcgttaaaactacgagcgtgcgaacatacttttaccagcaagctgtcgtagtacggggagattaccgatccggtaaaaccatttccgccgtccagacgaattccgaatcccgctgcggaacgatactccgtgatggtaccggtatccggtgcaaagttgttggccggatcctcagtggtgatacggcactggatggcataaccgttcatggtaacgtccttctgggacttgatgttgattctctcggaatccagggcataaccctcggcaatcagaatcatatcctgaacgatatcgatgcccgttaccagctccgaaaccgtgtgctctacctgaacacgggtgttcatttcgatgaagtagtgctgaccgctcttgtccagcaggaactcgcaagttccggcactgcggtaatccactgcttttgccagcttaatggcatcattgcagatggcttctcgctgcgcgtcggacaggcagagcgccggtgtgaactcgatgaccttctggtgtcttctctgtacggagcaatctctctcataaaggtgtaccaggttgccgtacttatcgcccagcacctgaacttcaatatgcttcggctcttccaggtatttctcgataaaaatatctccgttgccgaatgcttttaccgcttcgttatgggcactgcggaactgcggaatcagctcttcgctgctgcgaacgattctcattcctcttccgccgccgccggcagccgccttcagcattaccggataaccgcacttctctgcaaattccagcgcttcatcctcggaagagatggccttatccacgcccgggatggtcggaacgccaacgctttccgctaccagcttggactggatcttatcacccagtgcattcatcatctcatgtgtcggtccgatgaattcgatgccgctcttctcgcaggcttccgcgaaaccggcattttctgccaagaatccataacccgggtgaatggcatcgcagccctttgcctttgctaaacggataatttcatcaatatccagatatgcatcgattgggctctttccattgccgatttcgtaggattcgtccgccttggtgcggaacagggaattcttgtcctcttccgaataaatcgcaacagaacggattcccagctcacggcaagctcgaataatacgaatcgcaatttcaccacggtttgctaccaaaacctttttaaattgcttaattcttcccatttttgttttcctcactaactttagtcgatgataatttattaataaaaccaatccattatagcatattaataaataataaggcaattccttatttccataattatattttatcggtttgcccgtcttctttccaactcgttcagatatttcttccggagacggatatcgtccggcgttacctctaccaactcatcgtcgttgatgaattccagcgcttcttccagggagaatactctcggcggagtcagcttgatggtatcgtcactgccggccgcacgcatattggagactctctttgccttgcatggatttaccaccatgtcatcgtttcgggcattcattccgacaatcattccctcatacacgtgagtacccggttctacgaacatctgtacccgctcctgaatattgaaaatcgcatacggggtgcagtttccctcttcctgagcgattgccacaccgttcacacgctgcgggatttcccctttataaggctcaaatccttcgaaccggcgaaccatggttccttcaccgtgggtatcgttgatgaactcactccggtaacccatgagtccgcgggtcggtgccaaatactcgattcgggaatatccgttgccttcgctcatcatctgcgtcatcataccctttcgaatattcagcttggagatgacggtgccggaatattcatccggtacgctgatgaccacttcttccaccggctccagtttctcgccgttttcaccggtcttgaagataacctccggcttggatacgcccagctcatatccttctcttctcatgttctcgatgagaatggacagatgcagctctcctcggccggataccttgaaggaatccgtggagtccgtctcctctaccaccagacccacattgacttccagctccttgtccagacgttcccggatgtgacggctggtaacgtatttaccggactgtccggcaaacggagaggagttgaccatgaagttcatggacagggtcggctcttcgatgttgatcatctccatggcttccggatggtccggtgcgcagatggtctcgccgatggaaatatccgggataccggatacgaccacgatatcgccgcattccgcttctgctaccggcattctctggagaccccggtagacgaagacctggttgattttatttttggaaacggtaccgtcttccttgcaaaccgcaacctgctgcgcttccttcagtgtgcctctggtgatgcggccgattcccagtctgccgatgtaatcgtcgtacgccagggagcaaatctgcagctgcagcggctcttctctcttgtccgggaagggctccacgtggttgacgatggtctccagcaacggctcgatgttcaggtcgccgtaacccttcgggctcttcttaattttgccggcgccctctccgatgaccacttcatccgcatcggaaggctctctgaccgcgataccctgtctggcaataccgtaaagaattgggaagtccagctgatcgtcattggcttccagatccatgaacagctcatatacttcgtccacgacttcgtcgattcgcgcatccttcttgtcgattttgttgatgaacagaatcgggttcaggccctgttcgagagacttgttcagcacgaaacgggtctgcggcatcggaccctcgctggagtccaccaggaggataacggtatctacggttttcataatacgttctacctcagaactgaagtccgcgtgtcccggagtgtcgacgatattgattttgtaatccttatacatgatggaacagttcttggaataaatggtaattccacgttctctttcgatggcatcgctgtccatgacgcagtccactacttgttcgttatctctaaatacgtgagactgtgccagaagtgcatctaccagagtggattttccggcatcaacgtgagcgataacggcaatattaattattttttctttttctttcattagaaaattctccttcttctattcgtcagatgataatcattttctacagtacggcagaaggtcttcagatccctcgccacctgttcggtacgttttcgagcatgaccgattaccatgatatttccttccgctttttcctcatagaattccgcgcccttagcaccgatccaccggaattttctcgcccacagctcctcctgagagaatgccagagcgtacggaagcatttcataataataatccggatgaagcagcccggctttcgccatctcggcgccattcgcctgaccgatgaaattcttcatgcacagaagccgggtaaccagctctgcatttccttttccgcgcttcttcatcagcaatgtgagaaccagcgctgccaagccgcacaagagtgccgccgctcccaccaacaggctgccgccttgcatgtagaatcgaatgccgccgaatgcaattacgccggcgtaaacggcaaacagaatcatcatgctggtgcgataggaacttcgatccatatcatatcttctgtcataccgaatattaatcgcaatcagaatcaatgcgctgattcccgtcggagccagaaaatccgtcacgccgatttcctgatagctgaacagccgcgtcagaacgcacacgccgcccatgcaggcggagaggagcaagatgctcaggacccgcagccccttagaaattccggtgcaggctttcatgttcggtgcattgaatccgttctcaatgctgacaccgatattcttccgcaccgcacgaagtctcgggtgcaccatcttcggttccagcggtcttccttcgtacacatcttcaaaaagaatattgtatgccgtccggatgtaccgctcttcgtcctttggttctgccagcggaaccagcgtatacttttttggccgatattccacaatcttgagataccccttggttgccaggtacacaatcagcactgcgatatcccgaatccgagtgtgcccgtagaacaggtacccgatatccgccggggtcacgccttcaattggatgcatttccaccgtctttcccaccttcggatctcttccgccgatgaaccagaacaggaaaatcagaagcaaggtgatggacagaaggatgatgctcatctgcaccgtccaggaattatccaatgcgccctgccagtagccattcttctgctgtgccttgaaggtgatgccgaagttggccggcagatgggttccggtcatgtggagcgttccgtctttcatcttatacttcagcgtgttctgcacattctgtgcgccgtactggccgccgtagtactgcagatccgacagatcaaagtcggatgggaatcccaacgtcagattcagtttctgaatcggcacattccagttggtcggaagcgcgtcgtacagaaacatgtcgtatttcttgttttcatccttgtattcctgaatcagatagcggacggagaacaggttctccccttccgcaaacttgttgtctttggtgtccggtttcagctgaatgtagtagttgctgttggcatctttcatcgcctgtccggtacagccgacggtctttacatccgtcagggaatactttcccgtgggaagatttacctttacggagctcagccccttcggcgcattcacccgcagcttcagcgtcacttcgtactcgtgggatttcagaatttgagtctcctggttatattccaagagctcatacccctccgatttcgcatccccgtatattgggatagcaatattcaaaaataccaagcaaaagaaggcaagcaccatggccacctgcacataatttcggatacttcttttcagagtgctcatattttttctccttagacaataatcgtattattatacaacatttgagcattcttatcaaatgaacggctatacgtcttccaaaaagaacacgttcttgtgcttgataaccgcaatcgggtattgtagaataattttataaattgttgggaaaatacggtcaatcccaacggaaccaaaaggggaacaaacagaatgaaacgaacagattatatttcttgggatgaatatttcatgggggtttccctgctggcagcaaagcgcagcaaagaccccaacacacaggtgggtgcctgcatcgtgaaccaggaccacatcatcatttccaccggatacaacggttttccaaagaattgctccgacgatgttttcccatgggaacgcaccggcaaagacaccaagtacgcctacgtcgtccatgcggaactcaacgccattctcaattccggtggccagtcgctgaagggggcttctctctacgtatccctcttcccttgcaatgagtgcaccaaagccatcattcaatccggcatccgggaaatcgtctatctcagcgacaagtacgcagattccgatgccactctggcttccaaaaccatgctccgtgcagcgggtgtgcagatgcgtcagctgaagccccacacggaacaaatcgtcctggacttccgagtggacaaatagaatccgcaccaacaggattcaacccaaataagatcatatttcagttgtaaatacaatcacgcagaaaggaaggttatattattatgaaactgattgtcgttggaccaagaggcaaaatgggaaaattcatcaccgaaatcgcttctcagcgggaaggcattgaaatcgttgcaggcgtcggtcctgccggaagggattacatcggcaaggacatcggcgaagtggcgatgctgggcaaaaccatcggcgcaccggtggtcgatgatctggagtccgtcatcgataattgcgacgtcatcattgatttctctaccgtggagatgggcatgcgcagtttggctgccgcaagagcccatggcaaggcgctgatttgcggttccaccggcttcaccccggatcaggtaaaagaattccacgacgcggccgccgatattccggtaatgctggcagccaacacctccaagctggtaaacatcatgttcaagctgattcaggaagcggcagagctggccggtgatgtggacgtggaaatcctggatatgcacgataatacaaaactggatgcgccaagcggcaccgcgaaggaaatcggtgagatcgtggccgatgcccgcggcgtctccctggaagaggaagcggtatacggacgctgcggagtcagccctcgccggcacggaaacatcggtttccattccctgcgcggcggagacattccgagcagccacaccacctacttcgtgggaaccagcgagcgcctggagatcacccaccactccggcagctttaagtcctttgcagccggtgcagtagatgcagcggagttcattcaggacaagccgaagggcttctacaccgttaaggaagcatttggactgtaaaagtgttaaggaaactttcggactgtaaaagtgttaaggaacaaaacctgcaccggtcagcaatgtcaagttgttgctgaccggtgcaggcttttcattataattctcattctgtttttattctggtttcgcaaaagtctcaatcacgtgataagccgcccggatgccgtcgcaggccgcggaggtaattccgcccgcatagccggcgccttcaccggccggatagattccgcggatttcactctgcccgctttcatcccggaggattcgaaccggggaggagcttcgggtttccacacttttgattttggcgtccggcaaatcatagcccttaatcttgcgggcaaaatgaggtaccgcttcccgcagtccttccaccgcaaaatccggcagggattccgtgacgaagcggctgtttcccgtgccggtcaaaaactcctccatggtgcactccggcgcccggaaaatctcgccgtgttcttccagccctttctcatacgccagccgctcgtatttctcctggaagcgaacgcccgccagcacatcgtcggactcaaaatccgatgtgcgcacatcgcagaggatgccgctgttggcggtaccgctgtctcgcttgctgttgctcattccgttcacacaaagttccttttcccgggtggagcagacgatgacttcgccgccggggcacatgcagaaggaatagacccctctgccgttggaggcgcggtaggatactttgtagtccgccgggggaagccgccgctcctctccgtactgggcccggtcgatcagggcctgcggatgttccattcgaactccgatggagagcggcttctgctccatcggcagttttttctcatgaatcatttcgaatgtgtcccgggcgctgtgaccgattgccagaatcagcgcatcggtgacaaactcttcccggtttccttcatcgttcaccagcaccgcgccggtgagccggccctcttctgtctgaagggactccagccgggttccgaaccgcacttcgccgcccagagaaagaattttgtggcgaatatttacaatcacttcccgaagcacatcggtgccgatatgagggcggtgttcgtacagaattgccgggttggcgccggcctccgcaaagacctccagcacttcccggatgtgcccgttcttaattccgctggtgagctttccgtccgaaaaagtcccggcgcccccttctccgaacagcacgttggattccggattcagcaatcccttctgccgaaaggcttccacatctgccacccgttccgccatggcctgtcctcgctcaatgaccaccggccggtatcccttctccgccaatttcaatgcggcaaaaatcccgcagggcccgaagcccacaatcagcggccgtccctgaagcttttgggttccggataccggttctgccggtcgttcctcccccacttcctgaaggtttttgttcttacgccgaacgggttttcgggtaaaaaaatccaccgtatagaccagacggatgtccgacttgttccgggcatcgatagactcccgacggatgtcgtatttctgaatcatatccgaagaaattccaagcatcttcccgattcgccccgggattcggtccttgggttctccgatggctaattttatctggttcactctataatgatacattctctatatccccttctattttccatttatcctgcactttcccccggcatcccttccggcggcgctgccggtcagccaggcgtgattcaaattgtatccgccgcacgggccgtcataatcttgcagttccccggtgatgtacaaccccgggcagagcttggactctccggttttttcatccaattccgaaagtaccacgccgccggatgtgcactgcgcttccttccatccccggaccccggtgggttgaaacgccagcccatgcacctgagcacagatggtacggcattccgcttccgtcagttccccaatggtcttagccgtgtcgatttcggatctcgccaagacgtaggcggccaacttttccttcaaaacagaggtaaggagccatcccacgttcagcttcggcgtgcgcgctttccggtccgcgatgtaatccatcaaattccgttccgggcacaggtcgacttcgattcgaaaatcatcgatgccccttcccggcttgaaccgcatgtaccgggtcatgttgaagacacagattccggaaatcccgaaggacgtgaactgaatctctcccgactcttcaaaaaccttcttccagtcttctccccggtgctctttcagcgtgaccgttccttttgcacgggttcccccaattaaattgcagccgtctcccttgcactccaccggtgtgaggatgggaaccggtgccgtcaccgtatgtcccaaattccgcatcattttgtatccgtcccctgtggttccgtaatgcgggccggcttttccgccgaccgctgcgatgaccttggatgcggtgatgcgtttcgttgagtcggcagtttccaccgtcagaaggaaatcggacgtttccggacgcggcgaaatttcttttatgacggtgtcggtccaaagggacacgccccgggtcttcatctccattgccaggaggtccgccacgtccccggcggattcggagtaggggtacatgaggccggaatccagcgtccgaaccgcaatgccccatttctccagaagctgcaccgcctgccggctgtccttcgctttttcgttggaaatattgcatcggccgttgcccgtggcacggattttccgccccggccggtcgttcttctccaccaccaggattcgagccgccggattcacctccgccgcctccagagccgctgccatgccggacgcgccggcgccgataatgcaaatgtcaaatgattttttcatagtatcgtccgtttctacttcaaaaggcgcaagccccatgggtgactcacgcctttcgttttcattcgcgcttcccgtaaaaacaggattcaccgatgctgtttttaccggcaatgccgcattctatttgtaagcttctgccgccttcttcagtacctctgcccggtccgtgtcctcccagcgaacgcccagtttggtccggccgaagtgtccgtaagccgccagctgtctgtattgcgggcgcaggagatccagtgtcttaatgatggcacccggtctcatatcgaagtgctcgcgaacgatcttcacgatgtcctcgtcggagatgattccggttccgtaggtattcgcgtagacggataccggctccgctacgccgatggcgtatgccagttcgatttccaccttgcgcgccagtccggctgccacgatgttctttgcaatgtaacgagccatgtatgcaccgctgcggtccaccttcgtcgggtcctttccggagaacgcgccgccgccgtgactggcatatccgccgtatgtatccacgatgattttacggccggtaagaccggagtcacccttcggtccgccgataacaaagcgtccggtcggattcacgaagtacttggtatcctcgtcgatgtattccatcggcagaaccggctttaccacgtactcaatcatatcctttcggatctgctccagggatacgtccgggtcgtgctgtgtggaaataaccacggtgtcgattcgaaccacgcggtcgtcatcatattctacggtaacctgggtctttccgtccggacggaggtagctcagagttccgtctttccgaacctttgccagctgcagcgccaacatatgagccagtgcaatcggcatcggcatcagctcttcggtttcgtcgcaggcaaaaccgaacatcatgccctggtctccggcgccggtaagagcgtcctcatcgctgctctttccttctttcacttccagcgcttcgtctacgccctgtgcgatgtccggggactgctcttcaatcgcaaccagaacggcacaagtgtttccgtcgaagcatacatcgctgcagtcgtaaccgatatcggtaaccaccttccgaacgatgccttctacatcggcggtgcaggtggtggaaatctcaccgaataccattacgaaaccggtctttaccacggtctcgcatgcaacgtgtgcccgagggtcttctttcagaatagcatccaggatggcatcggaaatctggtcgcagactttatccggatgtccttcggtaacggattcagaggtaaaaagttttttcatcacaatctcctttgtatctcctgaatatttgtcatgggtccaaatatccgtatgttcagtaataatggataaaaaaaacgctctccaaacaaagagagcttccactctccttatcttccagattccgccggttctccggggaactgtgggatttggcaccttcgactgttattgccgaggttgccgcgagttcatcgggcccattccctacctcgctcgtaataaggattagtctatggtcattataatcatttatgccggtatgtcaagggaattccccctgctttttattgatactttctttgagaatagtgtataatggcatgatatgcaaaatgatataagaaagggtttggaaagccaatgaatgaactatatgcggtggaaggaaaacaatccttcctctacaatcatttcaaagactgcaaatgggacagctgtgtggccacggacacccgccttatgggcgttatcgccatgaaaattacctggaaatccggacgcagtaaaatctaccagattctgcatctggatttttccgaatacggcatcgacgattacctggaatacttcaccgacccggccatggcggaggtgagcatgctccacagccggtacgagtgtcaggaacagtggaagcgagtctccgaaagtctgggaggcagagaaatctccatctccctgggagcggccgttcgactgattgaaatggccatcgaaaccaataagggatacttccactaccacgatgtggacattcaggagttccgcagggatacgctaaaaagaattcgcctcatgctggaggcagccaaagaagattcggaatacgaagagtggacaccggaagaggccacccgagcagtctgcctcaaaaacgtctccatgtacgaaaccatcaactacttcgtcatgcggatgtgcgataaggattacatcggcgcttcggtgctctccacgatgacaccggaaatgcttcagagcattccgaaatggcagtaccgaatgatgaccttgattcacaaccgaacaacaaagggaaaggcgcccggagaattcttctgcacctctcaaatggaagccgatgacggatacttctacgcacgcttgattctccggctggacatgacgaagggaaagcggatggcgttggtatcttcgatggaatgtacctatttcaatcgtttctcggaaatcgagatggcaatgcagatgcggcgtccggagtacgtttccgcgtacaagattgtcaaagatccggaacacttcgacttggaccgctccatgatggcatcggattcacagatttctccggttcccaacgggattctctatcttctgtataacaacgacaatacccacgtggacacgtcaaactattacatgaacaacgacgtatacggtgcatatctgattacccgtgccgacgaactggtcatcatgagctcggaagtgatgaaaatttcttccatggaaatggatctcgcagccaccttcatttccggaaatctggaactcaccggaaggtacaaattcgactctcaggtgttccagacattctgcgaaatgcccggagccacctttgaggatattctccggtaaacacttatcaacactttgtaaagtgcttgatttcaagggatacgattttttccacaggattcggaaaaattgtatacaatttattgcacattggcatgttgaaaactttatatattttgatttccttgtatttcaaatgtttcacgtgtttcacgctatttttaacaaaaagttttccacaatttagacgatattaatccgttattttcttctctccacagaagaaaacggatgcaggaggttattatgacaacagaaaaatattatcagcacgacgtcgactgccgcgagctgaacggccgaattgaggcgattcaaaatgacggcaaaagcacccggattatcatggaccgaaccgttttcttccctacgggcggaggtcagccttgcgatacaggtacaattgtgaccccggacggcacatctgtttccgtcatcgatgtgcaggaagataaaaataccggcatcatttctcacaccatcgacggtgattcctccgcaatcgatgccctgcaggtcggcatgaccgtcacccagaagctgaacgaagaccgccgccgcataaatactcagcgccataccggcgagcacatcctcaccggtgcgttcattcagctcttcggcggagccaacaaaggattccacatgggcggagagtatgtcaccatcgatatggactacgacggaaagaaactgacggaagaacaggttcgggccgcagaaaaactggccaacgaagtaatctgggcaaaccttccggtgaccgtatccaccttcccgaaccgggaagaagcttctgtcatgccaacccggaaaccggtcacccaagacggtgaaattaccatcgtcaccatcggcgatttggaatccccccacgactgcgtcgcttgctgcggcacccacttccaccgcaccggtgaagtgggactgatccggattcacaaattcgaacccaataagggaatgaaccgcatctatttcgaatgcggtgaccgagcattggaaagcatgcaatccgacgatacacttctccgctccgttcaggaacgcttctccgccggcagccacgacctgcttcagaagatggatattcgggatgaaaaagaagccgagctccgtcaagactgcaccggccttcgccagtactaccgggatcgggagatggcgcgaatcacctccctgctccatcgggacacgccggacttctatcaagattcttttactctggtatccccggacgacctgctaaagctcggttttgccgtcatggaagatgaggccgcaccggccctcatggcgctggcacaccggcccagccataccgtcctgctcttctccgacggaagccgaaactgcggtgccctggtaaaagaacatgcgaaatccttaggcggccgaggcggcggcagaccggatcaggcccgggcgctgatgccgaacgaagatgccgtggagaaattcatcgaatcgttaaaggaataacgccaaagctcttatgaattcattccaattgtggtataataattctaactaaaggataggaggtcatcgctatgacacagaataaaatcatcgtaaccatcggtcgccagttcggaagcggcggacacgaagtgggccgcagactggcgtcggaactgggtatttcgttctacgatcacgaatttgtagatatggccgtgaagaaaaccggttttcacgcagactatgtgaaggataatgaagagaaagctccggatttcgtttccggcgccatgttctccggaatggaaatgtatcagccatctccatacgaccgcattcaggccgaggagtataaactgattcgagatatcgcctctaaagaaagctgtgtcatcgtgggccgagctgcggactacatcctcagcgatcagtcccatgtcagcatcttcctgttcgcaccgatggaggatcgggtaaagcgtaaaatggccctgctgaagccggaagatgcggcgaagatgactccggcagccatggaaaaagtcataaagcagatggacaaacagcggaagagatactacgaatactacacggatatgaagtggggtgctcgggattcctacgaccttctaatcaacaccagccagtccggcattgacggtgcggtaaagattatccgcacctacatcgatgaatgccgcggcgagagcatcatgccgaattaatcgaagtaaagtttggacatataattaagcaggagactaaccactagatgttcgtctcctgctcatttttttcaattctaagcatacgatatccaataccaatatgagtctgtatgtaatgcaccccatttttctcaggttccagtttttttcgaagcgttgccataaaaacccgaagtgaggcaacatcgttttccgaacaccgcccccaaatctgctgggtaatataagtatgcgtcaggacctttcccacattacgggacaggaggcagagcagtttatattcaatgggggtcaaatgcagttcttctcccttcagatatgtgcagccggccgtataatctatttctaattcaccattttcaaaaaccgaagtctctacctgttcccccgcctgtgttatggcaagccttctttgtgtgacacggatacgtgcaagtaattcctccacagagaatggttttgtaatataatcatcagcgcctgcatccagagcctctattttgtccgtatcctcacttctggcgctgattacaataatcggcatgttggaccaggtacgtactttctttattacctccactccttccatatccggaaggccgagatccagcagaacaatatccggattgtgggaggaagcctccaaaatagccgaagatccgttttctgccgcaaggtacttatagtcatgtgtttttaatgcagtgacaatcaggcttcgtatgggtctgtcatcctccaccacaagaattactgtcttattcatttaatgtcacctcgcttaatggtaaagtaaaagtaaaattgcatccatgcggatcacggtccgtcagaatcagtgttccgtcatgtgcttctataatagagaggcaaagtgccagaccaagtcccagactccgatggctatccgccaccgttgttttccctgtataaaacatctcaaaaatatgcggcttcatttctttcggaattccgggtccgttatcttccacgcttatctgcgctttcccatcggatttctttccccgaatactgattacagaacccggcggagtatactttatggcattatctattaaattcaccagaacctgtataataaggcggacgtccatacatgcaagaaccagctcttcacaatctaccacaattttataatcatcatgtttcctgctgatatgccgaagtgcctctgcaatcacctcatccaaaagctgatctgtgaacttaaatttcagtcttccatcattcagtctggtaatggaaagcaggttctccacaactccgattagccatactgaatcatcatagatatcagtataaatctgattctttgtaactccatccaggcggtcgctattgttaagaagcatatctgcattgccggaaatggagcagagtggagtccgaagatcatgagagattgcccgaagaagatctgcacggagctgctcatttttggctaaaactgcattttcctctttttcaatagcatttcgtgcattctccatggcaagcgcacactcatttatcacagaaagcaggatactgtattcaaaagaatcctgcttttccttttgcatcggtatcccaattacgccataaacattattcccgcttcggattgcaagatataaacatttggcctggggaaaatgttgtgtggatgcaccggcacgccgcctgttttcataggcccatcgagccacattctgctcttcttgtgttaaaaaatcctcagtatcttctttttccccggagaaaagtttcccctctgataaagttccatttttcacaatatatgctgtaatactgcggtttaataagcgaatcagctgtgtacaggtaactccaagaatctccgtttctcctttttccctttgcagcaggcagtctgtgtcaaacagaacttgcgtacgaaaggcaagctgtgcggaaagttttgcatgtgctttcagctttgctgcaagtgttccggtaagcacggacgaaataagcatgataaga

SEQ ID NO: 1077 - DNA, 1782 bp, Unknown
  16S sequences of unknown bacteria
ctcagcagtagcgagaccaccgccggattggaccccttgatcgccacgatctgcagcgtataggccacgccgctggagaaaatgcccacatagaggattggccaaatagacgcccaaatgctgctccagcaattctgctctgtgcacagcgccagcaccgccgagatcgccgccgtcacggcaaactgcccgcaggagagggccacgctgtccacaaagcgggtgaaatgatccagcagcaggatatgcaccgcgaagacgattgcgcagagcatcatataaaaatcgcccttggccagggaaaagccgtcttgaatactcaaaaagtacagcccgaccgctgccagcgccacgctgcaccagacgattggccggacccgcttgcgcaaaagcagcccaaaaaccggcaccagcaccatatacatcgccgtaatgaacccggccttgcccgccgtcgtatccgcgatgcccacttgctgcaggttcgtcgccaagcacagggccaagccgcaggtcaagcaccccagcaccagcttgccccggggctgcttttcccgcctgcggcgctgcagggcccaatatagcagcagcaaaaacaccgccgcaacggccgaccgggccgcgttaaaggtgaaggggccgatggaatcagccaccatattttgaaagacaaaggcgctgccccaaatcgcagccgccagcactggcaggacgacctgccggacatttttctgcatggtttctctctagttcctctcttttgttacttccacttctggtacgctgccaccgccagctcatcacagcggttgttctttggattgtcagcatggcccttgacccagtggtagtgcatttcatgcttttcgcactcggccagcagagcagcccaaagatccgggttcagcgccggttttttatccgccttccgccagccccggctgcgccagccgatggcccaacctttttgcagcgcgtcgatcacatattttgaatccgaatacagctccacgatacacggctgcttcaggcactgcagtgcctggaggaccgccgtcagctccatgcggttatttgtcgttttctcttccccgccggacagctcccgttcgaccccctgatattccaaaatcgcaccccagccgccggggccggggtttccagagcaagccccatcggtatagattgttactgttttcatctttgctccttttgctgctccagccagatcagcagtacggcaatatccgccggggacacgccggaaatccggctcgcctgcccgatggagactggccggatggcactgagcttctcccgcgcctccaggcgcaggccggcgatggccgcataatctgtgtccggcggcagctgccgggcctccgccttggcaaattcctccacctgccgcagctgcctggccagataccccgcgtatttgacctggatctccacctgctcctggaccgcctggtccagctccggtctgctcggatccaccggcgccatggcgtcatacgttatctccggccgccgcagcagctctgccaagcagatggagttttttacctccgccgacccatagcgccgcagcaacacattcagcgccggactggcggccacgccatttttctctaagcgccgaatctcccttgccacctgggcatatttttcctgcacctgctcgtagcgcgcccggctcaccaggccaatacggtagccgatgggcgtcagccgttgatcggcattgtcctgccggtgcagcagccggtattcgctgcg

SEQ ID NO: 1078 - DNA, 24780 bp, Unknown
  16S sequences of unknown bacteria
ttttgcccgaagccggcattccgattaaaacaatatttttcatcagatagtttttctcgcaaaggttgcgccgaaaagcgttcggaggattgtggaatcggccgtgggactgcttgcgggaattccgtcggtcgtttacggactcgtgggtatgcttgtgcttgtccccgggatacgcagtattttcggagtggccgacggagcaagccttcttgcggccatcgccgtgcttgcgataatggtgctgccttccataatcaaggtgtcgttaaatgcccttgaggcggtgccgaaggagtatgaggaggcgtcgctttccctcggtgcaacgcctgtggaaacgtattttaaagtgtcggttcccgcggcaagaagcggtattaccgcggccgtggtgctcggtgtgggacgtgccatcggagaagcaatggcggttatcatggtgtcgggaaatgcgccaaatatgccctctctttttgagagcgtgagatttctgaccaccgccgttgcaagcgaaatgtcctatgcctccggacttcagcggcaggcgctcttttccattgctcttgtgcttttcctttttataatgctcataaacgccaccctcaattttttccttaaagggaggaagcaaaaggcatgaagaaaaactacctttcaaaaaagcgcagaggctacatcggtcttatgaaaacccttatgggtctttgcgccggcataacctgtgccgtcacactttttataataatatatgtgctttgtaagggtctgccccatgtgtcgtggaatctgctttccacaaagcccagctatctcggcgacaacatcggtattcttcccgatattttaaacacgctttacatgattcttgccacgcttatagtcgtgcttcctctcggagtgggggcggcggtttatttaaacgaatatgccgcaaacaaaagggtggtcggcattatagaatatgccgccgagaccctttcgggaattccgtccataattttcggactggtgggcatgttgtttttctgtcagtttctcgacatgaaaacctcccttgcggccggtgccatgacccttgtaatcatgaacctgccaaccgtcatgagaacaactcaggaaagccttaaaaccgttcccgacagctatcgtgaaggtgccttcgggctcggagcgggaaagtggagggtggtcagaaccgtcgtgcttcccggctgcgtcgacggcgtcgtgaccggctgtattctgtcggtgggaagaatcctcggcgaatcggccgcgctgcttttcacggcgggctttgcccacacgctgaacggccttataaacgggcttaaaagctcgggctgtaccctgacggtggctctttatgtttatgccaaggagcagggcgagtttgacgtggcctttgccattgccgcaattcttatgataatgacccttcttatcaatttttcggccgacgccatcggccgcgctttcaaaaagaggagaaacaaatgagtgatattattaccgcacgcgatctgtgcctttggtacggccagacaaaggctttaaacggaattaacatggatgtcagggagcatagcataaccgctcttatcggcccctccggctgcggaaaatccacgtttttgaaaaccttaaaccgtatgaacgatcttatccccggggttaaggtgaccggcgaggtcaaatatgagaacaaggatattttttctctcgatgtaaacgagcttcgcaaaaatgtgggaatggttttccaaaagcccaatccctttcccatgagtatatatgacaacattgcctacggtccccgtacccacggcgtacccaaagccgagcttgacggtattgtcgagcagtctcttcggggggcggccatttgggacgaggtcaaggaccgactcaaaaaatccgctctcggcctttcgggaggccagcagcagcggctttgcattgccagggctcttgctgtaaagccaaaggttcttcttatggacgagcccacaagcgcccttgaccccgtttccacctccaaaatcgaggacctggtcaccgagcttaaaaaggactataccattgtttgcgtcacccacaatatgcagcaggcggtcagagtgtctgactatacggcattctttttgctgggggatcttatagaattcgatgcgacgcaaaagctgttctcccgccccgaggacaagcgcaccgaggattatataacagggaggttcggataatgagaaaccgatttgacagacagcttaaaacccttaatgaaaagctgaccgaaatgggaatggcctgcgaggaggttatcgcccttgccgccacggcactcacagaaagcgatatggaaatggccgcgagggtgcagggcgaggacgacgaaattgaccgtctcgagcgggatatagagtcgctgtgccttaaaatgctgcttcagcagcagcctgtggcgagggatcttcgccaaatttcggcggcgctgaaaatgataaccgaccttgagcgaatcggcgatcaggcgtcggacattgccgagataatactgttcttggacggcaaaagcggcatagaatgcagcgacatcaaggatatggcgacctctgtaataaaaatggtaaacagcagtatcgaggcctatgtcaagcgcgaccttgagcttgcaaaaaaggttcaggctgccgacgacgaggtggacgcccttttcgacaaggtcaaaaacgcccttgtttccatgataacaaaaagcgaaaccgacggcgagtttgccgtggatatgcttatgatagcgaaatatttcgagcgcatcggcgaccatgccgttaatgtggccgaatgggtggaattttccttgaccggcgtgcacaaaggcaacattgaaatgtaaaaaaagaccgagtgataatttcactcggtctttgactttatttttcagcttatctccattggaagttgacaagacccacaatgtaaataaccataatggcggcgggaacaaaatacataaatatcggtttcatccagtttttgaccttcatgcccttgccgatgttggcctcggccacaaggttgtcccaaccccagccaagctgcttgttgcagcagaagagggcaacgacgagggagccgaggggcaggaagttggtgctgacgaggaaatcccagaaatcgagccatgccgtgccctttgcgaagggctggaaatggagcacgctgtaaccgagagcggtggtcagggcgaggaggaaaattacgataccgcatatgaggcagcccttggggcggctccagccggtcatttctctcacgcaggccaaaatgttctcaaaaacggcaagcacggtggaaagggcggcaaacaccataaagaggaagaaaacggcgccccaccatctgccggcggcgcccatgttgttaaagacgcttgccatggtgttgaaaagaagggggggtcctgccgtgacctcaagattatatgtatagcaggcggggaaaattataagtcccgaaacaatagccacaaaggtgtcaagcacaatgacgttgacagattcgccgagcagcgagcgctccttgccgatatagcttccgaaaatggccatggagccgattccgatgcttaaggtgaagaaggcctgattcattgccgacaccaccacggtgggggtgattttggcaaaatcgggaacgagatagaatttgtatccctcggcggctcccgaaagagtggccgaatggacggcaagaaccgccatgaggaaaagcattactatcatcatatatttggtgacccgttcaagaccgccctgcagcttaaagcaaagggtgccgaatccgatgaaaacggcgattgcaaggaagatgacgttgattttcggatcggttatcatggcttcaaagccgagattttggttttgcccgatgaggaatttaaagaaataataaatcatccagcccgtgacaaccgtgtagaaggccataaggcagatgtttgcaaaaaatgatacatagccgtgaatgtgccatttggttcccggtttttcaagcttgtgatacatacgcacgggacttgcctgcgccgcgcggcccatggcaaattccattgtcataacgggaagtccgagaaccaagaggaacagaatgtaaatgagaacaaatccgcctccgccgttttgtcccgtcatccaggggaacttccacacatttccgcagcctatggcgcatcctgccgaaagcagaataaaaccgaggcgcgagcctaacttttctctctccataaaaaaatcctttcttataagccctgtccggtcggagccgcaagtttaagacacacggcgccgaactctacaacagagccgagttgacactttaaagcagtatagcacaaaaccgcgcaaaaagcaacaaaatttacagcctaacggagctgtttttgacaaaacgtaaccgcttgtttgtttttaaaataaaaattcccgaaagcattccgaaaatatcggctttgctttcgggagtttgtttttaaagcttatgcttttggaacatactgaacaaattcggcggtgtaggccgcaacgtcggattggtcgacggttataagacgtccgcctgcggtggatttgttgggcgcctcgccgtaatatccgccgtaggagtcataggcaagggatccgtcgtaggaaagctcgatgcccttataaattccggcgaatgtgtttgtgtggtcgtgggcggcattgaaagaaagcacgtctcctcttgccaaaagcgcgtcaaacattccgctgttggtgttggaggagcaaacggcctcaccgttgtgacccgtcatgtgggtgccttccttgtcgaggagaatttccttgaactcgggaatcggaatgtgggcaaacataattccgggaacctttgttccggccatggcctcgagacccgcagaggtctttttataccactcgatttgagcgggcattatatatgcgttgttgtctccgggaatgttgttggtgtcgtcaaccacaacgccgatacccgaatcgaggcaccaaagattgagcttaacttccttgccggtgctgtcatatacctggctgacatagttgcccacgcggttggcaggccagttttggtcggtggttacctcgcccgcaatggcaaggcaatggctcagcgattcgtagattttcatctgatcgtcttttgaaacgccgcactgatagtcgtgattgccgaaggtggcgagccagtaaacgttgcgctcggccaaaatggcgttgaaatcggtgagaattccggtcacgtccttgacgcgctgttcatagctccccgtgaaattgtgcatgatcgtgtcgccgttgagaaccaaaaggtcgggcttggtttcgtcaagcatttgggcgactgcggaagccgtttcggcgtggatttttccgtcgttgcggttgttgtgtatgtcggatatttcgaggattttaaactttccgtcggaggcgaaggtaagcttatgtttggttgccaatgatttgtcaagataggaatagagcataacttcaccgtcgagattaacattctttttgaccgagcgcatcaaaatcagcaatgcgtcggtaactgtcaccgagctgtcgccgtcggcgtcggccataaggctgccgaaggtgtcgagggaggtctttcccaccgaggcctgaagggcgagcagggcgtcggccgccgtgacggttccgcttgaatttacatcgccgaaggcaagcttttcgctttgctcaaagctgtcaagcgagggaaggggaatgtctggattaagggtcagacggatgtcgtccacattaaaaacaaggttgtcgctctttttgacgttgagccaggtgaaacaaatgcgttttatggaagttttatcggtggcgaccgagggctcgggaaggttggtcaaatcgagtgtgacgtcgtgccagccctttctccacagcttcatgttgacctcatagctgtatccgtcgtttccctcgtcggccgaggaaaggtcgattttaagtttgttgtcgttcatgataacgcgatcgacataaaatttaaaggtcagctcggagtagtttgtaaggtcgattatgttgcccgtgcgcagataaaattttccgcgaacgccgttttcgtcggcctggtctttggatgaaacaagcttgatacttgcgtcgccctcggccttgttttcggtgtcgacggaaaccgtcgattcaaggtcggcaacgtttctccagccctcgccgattgactcgcagcgggcgagagaaagggattttccctgctttttttcgctctcggccatgaccgttccgggcataagcgccgcagaaagggttattgcaagggcgagcagaaatgaaagatattttttcaaaatacacacctcaatcacaataattgtgttatcaaatcaaatatatcacaatatgtcacaaaaatcaagtgtaatatacaaaaaattgtgtgccgcggtttaaacttttgatgttgaaaaaaaggaaaatatgtgttattatagaaaagcgacataacctaatatttccctgccggagagtgtgtcttgtttcggtaaaaatgcaggcttcttcttttacgtactcaaggcgggtaaaaggttgtgtcgcagcagctgaggccttgtgtttttcggcgcggttggcttttgccttctgcgcctttttattttgaaaaaaaagccgccccgatcggacaaatcctttcggagcggctttacaataccgaattattcctctttttgcttttttatcatcttaaggcgggaatgttcctccatctctttttcctcaagtgattcggaaatggtggcaatctggtttttaaaccttgggatgacgatgtttttaagggcgttggcccgcttttgggtcttgcttatggcggtggcaagacggtatacgctgttttctatctcaagaagctcggttgtcagttttttgacccgatcaaacttgaaataggcctcgtcgagcatggagttggtggaataaaatccgtagtagtttttcatgggggacgagggctcgagggtgacggtgggaatttccacgcccataacgcttctcgaacttatggaaaggccgttttccacggggattgccgaagccagctcatcgcacagcccgagggttatgttggcgttttccagagccttgtaggcgtccttaaagctttggtctatctgaccctgaatgtttttggccgagtcgataaggcccatagtttctcgtatgagtatatttctctttcggtcgagcagactgtatcccgtttcggcaagggaaagggactttttagccgccatgaggtttgcctttgtggggcttactgcggttgccatatatgagcctcctttttaaaaattcaaagaattcagtgcttaccgtagtgctcgttgagagtcttttcgtcaatacggtcaagctcggaacggggaagaatggaaagcagcttccagccgaggttcagtgtctcgtcaatcgagcggttttcgttttctccctgagtgaggaattccttttcaaagcgttttccgaattccatatatatcttatccacgtcggaaagctcgtcttcaccgataaccgaggcgagggatcttgcgtcctgaaccttggcacaggcggcgaaaagctggttggaaacggcggcgtggtcggcacgggtcatgtcggcgccgataccgtccttcataagacgggaaagggagggaagaactcccacgggaggataaactcctgtggcgtcaagggtgcggtcaagcactatctgtccctcggtgatatatccggtaaggtctggaacggggtgggtgatgtcgtcgtttggcatggtgagaatgggcagctgggtcacagagccttttttgccctttatcattccggcgcgctcgtaaagcgaggcaaggtcggaataaaggtagcccgggaatccgcggcggctggggatttcgccctttgaggagctgaactcacggagagcctcggcataggccgtcatatcggtcatgacgacgagaatgtgcattccgaggtcaaaggccaggtattcggcggcggtcagcgcaagcttgggagtgagaatacgctcgataatggggtcgtttgaaaggtttaaaaacatgacgacccgctttaaaacgccggaggactcaaaagagcgtcggaaatattcggccacgtcgtttttaacgcccatggcggcgaaaacaacggcgaattcctcatccttgccggattttgaagaaagcttggcctgacgaactatttgagccgcaagctcgttgtgtttcatacctgcacctgagaaaatgggcagcttttgcccgcggatgagggtggacatggcgtcgattgaggaaattcccgtttggatgaagtttctgggatattctctcgaaacggggtttatgggcgagccgttaacgtcccttcttgctgaggaatatatctcgccgagaccgtctctcggttttcccgcgccgctgaaaacacggccgagcatttcgggagcaagggtcatttccatggggcgggcggtgaagatgagacgggtatccttaagcgaaattcccgatgtgccttcaaaaacctgcaccacggccttgtcgccggcaagctcgacaacacgtccgacgcgctcctctcccgaggcggtatatattcttacgacttcttcgtttgcaactccctccaccccttcaagggcgatgagggaaccgcttatttctttaagtccgatgtgttcggtaatcaaaaaatcgacctcccttatgttcagtgtttggagcggcctgcaacggccacagcttcgtcgatttcttcgttaaggcggtcaaaagcagcggtgtcgtcgttgccgatgtcgctcttcattttgagcagcttttcgaaaatgccggtttcggtgagtctggccagcggaatgccggcgtcggtgaccgtcttggccttttcgttaaggttgagaatggttttcatcatgaggaactgtttttccaggggaacataggtgtcgtccttatgataggcgttctgctgcaaaaatcccacgcggatgaccttggcaatttccattatcagcttctgataatcgggaagaacgtcggagccgataagcttgacgatttccataagcgagctttcctcgcggagaatggcaagcagctcgccgcggcatttcataaaggcctggtcaacattggaattataccaattggcaagatcgccgtcatattccgaatagctttccatccagttgatggcaggatagtgtcttgcataggcaaggctcttgtcaagcgcccaaaagcagcgggtgaaacgcttggtgttctgggtgacgggctcggaaaagtcggagccttggggggagacggcgccgataacggttatggagccctccttgcccgacagggttttgaaatttcccgtgcgctcgtagaaagccgaaagacgagagggaagataggcgggatagccttcttcggcgggcatttcctcaagtcggccggaaatctcacggagagcctcggcccaacgggaggtggagtcggccatcatggccacatcatagcccatgtcgcggtagtattccgcaagggtaatgcccgtgtatatcgacgcctcacgggcggccacaggcatgttggaggtgttggcgatgagaacggtacggtcgcggagctccttgccggttctcgggtcgataagtccgccgaattcgtcaagaacctgggtcatttcgtttccgcgctcgccgcagccgacgtagattatgatgtcggcgtcgcaccattttgcaagctgatgctgggtcatggtttttccggttccgaatccgcccggaatggcggcggcaccgccctttgcgatggggaagagggtgtcgataacgcgctgacctgttataagaggcttgtcgaccgtaagcctctcggcggtgggtcggggctgacggatgggccagaactgacaaagggtcagcttcttttcgtttccgattttgtcctttattgtgacaatgttgtcgttaagcttgtatttcccgttcggcgcggcaaacacgacctctcccgaaagaccgggagcgagcatgattttgtgcacgattgcgggggtttcggggcaggtggcgtatatttgaccttccttcaggaagtcgccgaccttaacggttaccgtcacgtcccattccttttcggtgttaaggggagcggtggcgttgcctcgctgtataaagggaccgaacttttcctcgatttcgggaagaggacgttcgataccgtcgaatatatttttaagaattccggggccgagcacaagggcaaggggacttcccgaagccacaaccggctcgccgggtttcagtcccgtggtcacctcatatacctgaatggtggtggtgtcgtccttaatgccgatgacctctccgaccagccgttcatttcccacatagaccatttcctgcatggaaaagccttcggtctccttgaccgtaacgaccgggccgtttattccgtaaataacctttttattcaaagttttcgcctccggtggggactattctatgaccagtcccgaattttccataaaccacttctgctcggccgaaagccgttcgtcaagggtgtcgtcgatcatcatttcgccgtttttcgacttgacggttattcctccgagctcgatggaattgtcgatgtgaagggttatggaattgccgagataagagcatatttcggcggcatattttttgtcggcttctctgatgataagctcggcgcactgaccttccatctgctctcttatgcgctttgccgacgcaatgagaaggtctttgtatttttctgtttgggtgaattcgccgatgcgctttctcgcctcctcgaaaacctcgagtcttacctcttcgcgccgtttgaaaagacccgcgcgggcctcgttttcggcggccgagattttaactcccgaggcggcgtttatttcggaaatgcgctgacgttttaaattgtcggtctcgattttgagacgtttttcggccttttcgagggcgtcggaaaggcgtttctgagcaccgtttaacgtctgttcggccaagtgctttgcgcttttattcatattttccattatgttatccgctttggaaacagccatttttcacacctcaaatcttaattccgatggcctctcgaatgtatcttgtaatggagtcgcccgcccttcccgagccgtggcggtcgggaatttcgattacaaggggctttgggcggcggagtttaaaatcgtctatctcctcttcggcaagagaaaccagcttttcggttatgagcacggcgcccacctgttcgtcggcggtggcgtcctcaagagcctttttgaccccttcccgatcatggacgatgactccctcgatgcccgcaaggcgcatgcctaaaagggtgtcgtggttgtcgcttataagggcaaaacgcattgccggtgcctccttttttaagcgttgatgatcatgaaggagatgataacgccgtagagagcgagggtctcgcccagagcaacgaaaatgagcgacttaccgaaagccttggggtcctcggtggtggcgccgattgcggcggggatgccggctccgagggcgataccgccgccgatggccgcgataccggtgcaaaggccggctgcgagatatttaagaccgtctccgtttgaggtgactgccgcagcggcgtcgccggtgtcggcaagggcggtcatggcgccggtgatgcaaagagcggttacggcgacaagtgtagcaaaatggattttcatggccttggtgggagcggcgcccttcttatagcagcgaagagcgttatagattgcgaaaaagatggccacgggggggataaggaacattacaacagaaaaagcagacattttaacatacctccgaaggttaattttaatattttatgggttggaactcatgtcccgagccctcaaagaaacggttgaacatctcgtagaattcaagacgcaggctttgaacgccgacaagcagtccctcgagcacaagcacgaagatgttgccgaaaacgacgacaatccaaaagcctatggaatattctccgaacatatttgcaagggagaagaaaacgctcatcattccggcgtgaacaagcacgaaggcgccgactctgaggaaggaaacggtgttggtgacataggaaagaaccgcctcaaacagctcgaagaagccttgggtcatatatccgccccagctttcgggcttccagtcctcctcgccgtcgcagagcttgataagcggctctttgagccatatgcaggcgatgggaacgatgattccgattataagaaggggaagggtggggagggagagcgaaagtatcgcgtttgccgcaagaagaatggctcccgcgtagaaaagcagtccgcaaagaccgttttccgagaaaatcgcctcgccgatttcccgctgcttgaatttggagtagatgttgagcacaagagcgagcaccataagcaccacgccgattcccacggcgctgtaaagaatggtcattatgttggacattatttcaatgggcttatgttcgggggaggaaacaatgcctagcttatagtaaaggggattgaatatttcctcaaagccgaaacaggagccgaaaacaagtccgaagaaggaaccggctattccgcagggaacaagcagctttccgaggtccatgccctttattttatacatcaggtaaccgacgagagaaagaaccagtccctgcccgaagtcggcaaacatgatgccgaaaagcagcgtgtaggttatggccacaaaggcggtggggtcgatttccccgtatttcggcataccgaacatttttatgtagaactcaaaggggcggtggaggggagagttcttgagctttatgggcggagagagcttggaaatgtttttgttttcggtaaatgagaccgaaacgccttctttaccctcaaaaagctttgtcagacggtcggcatcgcttttgggaacccagcccatcatgacgaagtggtcgccgtgccgcgagacgtattttctcagctcaaaccttgtgttgagcatacaaagctttgaataaaagccgtgaatgctttcgtttcggctttcgaaataggccttgaactcggcctttatgccctcagctcgctgtgagtcggaggcaagctgctcgttaagcagctcgattgcttcggcgggagagtcgacggcgccgggaatgtatatcttttcgaaaagcagtcccgaaaaaattctgtcgacctctttggcatattcggtggggacgagatacataccccaataatagtcggcgtcgtgggagaaggaatagaatatgacgtcggggttgtcggcataggccgccagcatacggtaaccttcaaccggaagccgtccgaaccgcaccgacacaaattcggtttcaaagaaatcgtttatgggaatgtcgacggtttcgaaatgcttcagaatgtggatacaggatttacagtattcctgctcattttcgataagggcaagctcgttttgaaattcgcttatgtccttttcgattttgtcaacctgaaccttggcgtcctctcccgaaaggggaagctcgtcatattcgccctcggtcatggttacgccggccgatttaatcaggctgttgagacggtcaagctgcgccttgtaggggttgtcctcggtcagtctcgacgcgccgccgatgagcgacatattttcgggatgaaagcaaccggcatcacggcacaggtcaagggtctcgtcaagcttttcaaagctgccgctgaccgttgcaagctccattttttcaactgacattatatcacctcaaatcagatgggaagaagttgtattattttttcgccgccaatggagtatctgactccttccacaagggtggtgagacagtcatactgatttttggcaagcagcatatatgccgaaagcaccgacgagggagaggtgtcaaaccgcatggtcttgcggcagaggtctctcacggcccgcccggccgcaatgtcggccgaaagggtgccttcaaagtattcggaatatttcgattcggccgcaaagccttcgatttcctccgccgaacggtcgcaaagcgccagcagcttctttctcgggaaaagcccgtgaagcgaaagaagtctcgactttatctcgtcgggagaggcggaaaagtatttcttttgccgcaaaatcatttgaagattgagcacgtcggaacgaattccgaaaatgtttatgattttttgatcgccgtcggcgatttcggtgacctttttgcaaaaataatcctcaagaagatattccaagaaggaaaggtcaataggcttgttctcctcgggacggcagagcgaaaccatgagcagcaggtcgcggcgctttatgcagccgagcaaatcgtcaaaatccttggcagcgcacatggccgacaaatcaatgtcgagatgacgctcgaaaaattcggggagcgagggacggaaggtctcggatttgccggcgttgagacgccttgcaaagctcatgataaggtccttctcgcagtcgaccaccgaaagacggtagagccccgaaccgagggcaaaatcaaacccgaaaagccccgaaagatcggtgtaaagccgctcttttaaaatgttttcaagggtttctctgttgacggcggcgtcgcttatgttgccgaagccttcggcgtaaaaggaattttcacgaattgaagcggccacctcctgaagtgaggagcaggaggccatttgggaaaacttttccttggtgaaaaatccgccgtatctcgcacgggccttttgggcggcggcgatttccgactttaagttggcagacatgaagtctacacctccgttacggcgccgacgatgcggtcgagccaagaatttttatcggcggcgtatttttcgtcgatggcgacgagctgtttcttatattcctcggcctgggcgacgatgcgcttttcggtttccttctttttcttttcttcatattcggcaatttccgaatcgagagccgcataatatcggtcgtgaagctctttgacccgagcgtttatgccgcggtcgatctcatcccgctgcttttcggctttgtcgacgtcctctctgaggcgtttgtcgagctcgatgatggccgaaacttcctttatatccacttttttcgcctcccaaagcggttgaataaaataggtaaaaccgccgtttccggcggcttataattactggtgatcctcgatataatgcacaaggtcgcctacacagcgaagcttttcgacttcctcgtcgggaatgtcgacgtcaaactcatcctcgatcgacatgatgatgtccacaaggtcgaggctgtcggcgccgagctcatcggccatggaggactccatggtgatttgggacggctgaagctcaagctgttcgcagatgatgcttctcaactgttcaaagaccatatctaaaatcctttcagatttaatacttataacacatacggataatataattctttcaaaagtgtttgtcaacacaaattttaatttttttaactttatgccaaaatattcccttaaagcctttgtaaaattgcctttatagacatacccgaaagatatgacttgcatacaaaataataaatgaacaggatgtgaactcttgcgaaatcccctttatttttgtcgaagcctgtagtataataatgtatacatctcaatttgctttttaaacctattccgagggaggggcatttatgccgaataaaataaaactttcggtgggcggtatcgaatatatggtggtcaccgacgacgacgaggcccgcgtcagaaagattggcgcaaggctcaatgaacagctcgacaaggtcaaaaagggcaatccgcgtctttcgaccacgatggtggccgtgctgacggcgcttgatttgtgcgacgccctcgacaaaagcgaaaccgagtgcgaacggctccgcctgcagcttaaaaaggcggttgaggattcggcctgcacacgctttgacggcgaagaggcgagaagggaaatcgagcgtctgaccggcgaaataaaggctcttaagcagcgtcttgagtaggctttttcatctttttggcagtaaaaagagccacgctgcggggtgtgtcagtaagtatttaacagattttatatacaatgtgcacaaattgtgaatgagtatattgtttatatggtggaaaaagtggcttgaatcccataaattcattgacattgaaggtggttttagataaaattgaaaggtgtaaatccaccaaaaatggttttatggatttgtatggtttatacataactttgttcaaattgtacatttcccgtccgaaaaattactgcaaaaagtccaaaggctttttgcgggtttggtttttgtgtcagtcatgccgccgcgcgcccgtttgccgtcggcttgtttgacccttgtgaaggtatgtaaaggagcgtttattcaatgaaacattattcccgaattattgcggcgtttcttgctgcgataatgctgacctcatcggcgggctattcggttgccgccgacggcgaagacaccgccgggaccgacaccgccgccgcgcaggtgacgggtacggccgatcccgaggatgtcgaggagtatctgaaggcccgtgaggagaacacggtgttttcaaaattcacctacaccgaatatattgcccagtatgccgacgtccccgatgcgtccgaggtcatcaccttcggcgccgccgacccggcttatctgactgcaagctccggcagcgtcaaggccgattcgacctatgatgacgctctgcccgaaaacggcattgccggtcagtccctttacatgggcgacagcgaggacggcgagaccgtttcggcaacatggacggtgaatatcgaaaaggacgggcttttcgttattgatatgctttactacaccgttcccggaaagaacaattcaattgaacgttccctctacatagacgacaagtcccccttcaccgaggcgggcggcatcgttttcccgagagtttggaaggataccgacgagggtatcactcttgaccaggacggaaacgacattcgcgcaagctcggaagaggtcagcggatggtatgacggtaaatgtatcgataccagcggtaagtacggagaatatttcaaattctacctcaccgccggtacccacaccataagactcgagtctcagaaggaggcggttgttttcaaccgcatctccctccagaaggctcccacactcatttcctatgctgaccttcagaagcagtatgccgagaagggatacaagctcggcacgtcaagcgcaagcgattacgcactcggcacaaaggacgccgagaccaagaacaatcccatgcgccgccaggccgagaatatgtatcttaaatcggcggccaccatctatcccgagtgggacagaacctcgccgctgacctatccttcgtcctccgacgttatcaagctcaaccaaatcaagagcgacaagttcagcgccgcatatcagtggatcgaatgggaattcgacgttgaggaagccggtctttacaatataaccacccgtttcaaacagaccgaccgcgacggtgctttctgtaaccgcaccgtttacgtcaacggagagattccctgcgaggaagccaaatacgttcactttgcctataaggacggctggcaggtttccaacctcaccgctcccgacggaacccccttcctcttctactttaataaaggtaagaacaccattcgccttgaggtcaccctcggcgagttcggagatcttcttgccgccgtcgacaacaccatatacagcctcaacaactgctaccgcggaataatgatgatcaccggatcttctcccgacaccttccgcgattacaacttcgatgtaaccattcccgataccatcgaagaaatgacaagggatctcgagacgcttaaaaccgtcgttgccgacattaaagagctgaccggagagcagaacggctccttcacaagctctttcaacactctcatcaacgaccttgaaataatgaccgagaaccccggcactattgccaagaagcttgaaaacttcaagtccaatctcggtaccatatcaacttggcttgtcaatgccacggctcagcccgtcggttttgactggattcagatttctccctccgaggaggagctgcccaaggccaacgccaacttctgggaaaacctcacccaccagtgcaagatgttcgcctcgtccttctatatggactataataatgtaggacgcacggccgacaatcgtgagcagacccgcgacgtcaccgtctgggtcgccaccagccaggaccagtcgcagatcatccgccgactgatcgacaacagtctttccaaaaacagcgaccttaaggtcaaccttaagctggtttcggccggaacaattcttccgtcgatcacggccggcataggacccgacgtcgtgctcggcatcggaaactcggaaccgcttaactacgccatccgaggcgcggttatggatgtttctcagtttaacgattccacaaaggtaaatcagaccttcgatcaggtcatgtcgagatttaaccaaacggcatacacgccttaccaatataaaggcaagacctacggtgtgcccgaaaccttctccttcggaatgctgttctaccgcaaggacgttttgtccgagcttgaaatggaagttccgaaaacatggaccgaggtttatgactgcatagtcaagctcaacatgaacggactctacttcggtataaccgacgtgttcggaacgctgctttatcagaacggcggttcctattataatgaagacggttccgcgtcggctctcgacagcgcactttccatcagttgctttaagcagtataccgaattcttcacctcctacggatgccttgtcaccttcgacttctccaaccgtttccgtaccggtgaaatgcctctcggccttgccgactataccgcatacaatcagttaagcgttttcgctcccgaaatcaagggactttggggctttaccgatattcccggcatcgaaaaagaggacggcaccatcgaccacaccgccctgtcggccggaagcgcatcggtcatcatcagcaatgccaaggatcccgaggccgcttgggacttcctcagctggtggaccagcaccgacacccaggtgtcctacggtcaggaaatcgaaagtattctcggtacttccgcccgttacaacacggccaaccttgaggctgtcgcacagctcccctggtcgtcaagcgattacaaggcaatttacaatcaatggcaatcggcaagatctcttcccgagtatcccggaagttacattttgggacgttatctcagctttgctttccaggccgtcgtcaatcaggacgccgaccccggcgaggaacttctcgataacgtaaggcttatcaatgaagaacttaccagaaagcagaaagagtttgcggataacgagaacaagaaataagcggttgcttatccaaattcataacgagggagaaaaattttttatgaagctttttaaaaggcagcctcgggaagatcgcaagaaactgaccggcaagcaaaaactcatgagaatatgggacgaccgcgtcggttatctcatgagcgcgccttatgtaattcttttcacaatattcaccgtgcttcccgttgcggtttccatgtttttcagctttaccgacttcaatatgctccaatggccgaattttgtcggacttgaaaactattcgagacttatacttcacgatgaaatattccttatcgctgtgcgaaacaccgttatccttgccggaatcaccggccctgtgggatacctgctctgcttcttctttgcatggtgtataaacgagttttccccgaaggtccgcgcatttatcacactttgtttctatgcgccgtccatttcgggaaacgccttccttatatttaccctgatgttctccagcgacagctacggccttgtaaacgccttcctgcttaagctcggagtaatcgattccccgatactttggtttaccaacactcagtatatgatgcctctttgtattgtggttatcctttggaccagtctcggcacctccttccttgccttcatcgccggcttccagggcgtcgaccgtacatactacgaggccgccgctgtggacggagtccgcaaccgctggcaggagctttggtttgttaccctgccgctcatgcgtgagtctcttatgttctcggccgttatgagcatcaccggcgctttcggcgtcggcggcgttatcaccggtctttgcggtttcccctcaaccggatacgcggtacacacaataatgcaccaccttgaggactacggcgggatgcgttacgaaatgggttatgcctcggcaatcgctaccgtgctcttccttgtaatgataatcaccaacaaggtgattcagaagcttctcagaaaggtgggtaactgataatggcaagaaatcgagtaaaccgctcgaccggcggcgacgtgggaattttcataattctctttatcttcggcgttcttatggttctgcctatgttctatgccataatcacctcgctgaagcctcttgacgagctgtggattttcccgcctcgtttctgggttgcaaagcccacgcttaaaaactttgccgacctcttttccaacctgagcaattcatgggtgcccttttcaagatacatattcaataccgtgtttatctcggtcgtcggtaccttcggccatgttataatcgcttccatggcggcttatgcgctcagtaaaaaaagattttacggttcgaaagctatattcaaggtcatcgtgacctcccttatgttcagcggttccaccgcgatccccacatttatcataatgtctaagctcggctttatcgacacttattggtcgataatcctgcccgccttctcctccaccctcggtctctacctgatgaaacagcatatggagtcgatggttaaggataccattatcgaggcggcaaagatcgacggcgccggagaaatgagaattttctggacaatagtaatgcccatggttaagcccgcatggctgacccttatagttttctccttccaaggcctttggaatgccaccggctccacctacatctacaccgagcagttaaaaaccctcaactatgcaatatcgcagataatttcggcaggtatttcccgagccggtgcaggcgccgcctcggtggtgtttatgatgatactgcctattgccgtgtttatgttctcacagagtaacatagtggaaaccatgtcatcctccggtattaaggagtaagctcatttccaaccgatattgtaacaaggggatatttgaatgcgaatatttaagaaaatattaagtttaacaatagcggtgattatggtaacgggcgtgtgctgtgtgactgcttcggccaagacggtcgagtcatcctccgtgccctatgatacatatatgtatgattacaacggcaatcccataatcactccccatgcctacattccgagcagcaccttcacgggcgcggatctcggcataggggactttaccaaccctcaggacatcgaggtcgataccgaaaacaatgtctacattgtcgataccgattacgatgtggccggcgttgaggccggaaccgccgtggccggagaatatgttgccgaggaggaaaccgagggcgacgccgttatcgtggataccaacgccaaaatgggacgtcttgtcgtgctcaatcccgactattcggtcaagttcgtcataacaaccttcgacaacaacggcaaggaggattccttcaaccgtcccgagggcgtgaccattgctcccgacaagacaatctatgtcgccgacactcagaatcagcgtatagtcagatttactcccggcggaaaattcataaagacctatgacagccccgtcaacatggagggtagtcagcttaaaagcctcatcgacgaggactatgtctaccgtcccaagaaaatcgccgtcgaccagtcggaaaatatcttcgttgtcgcacagagcgtcaacatgggtattcttctgctcgaccgcgacggagagttcagcggattcgtcggagcacagaaggtaagctacaacgtggtcgactatatttggaagaccatgctttccaaggaacagcagagccagatggcctccttcgttcccaccgagtataacaacatccgaatcgatgacaagggctttgtttatgcaaccacaagctcgataagcgccgacgagatttcctcctgcataaacgggcggacaaaggactccaagtattctcccgtcaagcgtcttaaccccaccggcaacgacgttcttgtcagaagcggttattattcgaccgtgggcgatataagctttaaatacaattccctcggtcaggcacaggtttcggtcattgccgacgttgcgctttctccgagcggaagatacaccataatggacacccgcaagaaccgtctcttcacctactcggtggacggcgagctgctctacgctttcagcggaaccggcaaccaggtcggaaattccgtcacaccggtgtcgattgcctataagggcgaggatctcatccttctcgacgcggacaccaagggaagcagcttcacggtgttctccataaccaactacggaacacttatcgacgaggcttatgactgctacagcagatttgagtatgacgaaagcgttcagtattggaaacaggttcttaacgaaaacgcaaacttcgacatcgcctacgacggtatcgcaaatgcccagatccgcaccgaggattatgtcgacgcggttaaaaactttaaatattcaaacaacgtaacgagatattcggtggctctcggcgaataccgaaatcagatcatcgaaaataaccttgtgtggatagtcctcgtctttgtggtcatcgtgttcctgcttgtcaagctgttcggctggatcggaaaacgtaaccgcgacgaaaaatatgcagacaagcgagagggcttcttaaactccttcctctatgaattttatataatgctccaccccttcgacggattttgggaccttaagcatgaaaaacgaggaaccgccccggcggcaaccctcattgtcggattgcttgcacttgttcagatttgctccaagctgttcaccaactaccttttcaacggcagctacggaacccaaatctcgcccattaaggaaatagcaatggttgttatgccgctgctgctttgggtgcttgcaaactggagcgttacgacccttgcaaacggcgaaggaagcatgaaggacatttataagttcaccggatatgcgcttatgcccatggtgcttatgaccgtcctcaacatcggactttcccacatactcatcctcgacgagtccatgtacatcagcttcttctcctccctcggcgttatttggaccggtattcttctctttgtcggaaataccgtcacccaccgctacaccgtggcaagcagtctcggttcgatactgctcagcggcgtcggaatggcaataatcgttttcgtcgccctgctcataatcacgacatatcagagaatttacaactttattgacagtatagtcgtcgagctgacatacagaatgtagccgacagtaaataagacaaaattatgcaaaaggatggaaagctatgaaaaccggatttaagcacttgagcgtaatacttctttgtcttgcactcgtactgtcgataaccggctgcggaagctcgaccgatacgaccggcgagagcggcgcagaatcgtcttcatcaacgtcctcttcgtccgacggggaaagcattctcgacatcgaccttaataatcttgagggtaccaaattcacctcgagaggtcaggccgatgtggaaggatatgaccttgttgccgacaacagcaattatcagttgatgatagaccccgatactttgactgtatgtgttaaggtaaagagcacgggatacatttggaaaagtaatttgagcgaaagcgactttgaaaactccaccaccgtggagcccacaaaggaaaaatatctttcccagattcttctcaactattacgactccaacaacaagagcacggtctttacaagctataaggacgcgctgctcaacaacagcgaatattctcccaccgttgcgctttattccatggataacggcgtgcgtgtggcatataaaatcggtaccaccatcgactattacctccttcccgacgtgctgacggtggacaccttcaacgagatttgcgaaaagcttcctgtggctcagagaaaccgttttgagaatttctacattctcaacgattacagtcaaatcgacaaggagcagcagcaggcaatcgccagccagtatcctcttatcaaatccgaaaacctctacattatccaaagcatcgccaagaccatgaaaaccaaattcgtcagcgaggcgctccgtcccatcggatggacggtggaaagggtagaggaggagtacgaaaagatcggttataattccgaaactcccgccgaggccaacttcttcgtaaccgttgaatacaccctcgacgacaacggactccatgtgaacgttcccgccgaccaaatcaaatatgacgacgacaacttccacct

SEQ ID NO: 1079 - DNA, 2386 bp, Unknown
  16S sequences of unknown bacteria
gacgatgaggatggtgccgatgaccaggcacggagccgcgacgccgagaagcgcgctgcccgcctggaccgcgtttgcctgcccagagaccatcgccgcgaatccgatgatgcccacgagggcgagcacgccgcccgcaatcgcgacgtacgtgaacggcttggagagcggcgcgaacgtctcatcgcccaccttggcgagcatgagcacgagcgcaccgagagccacgccgcccgccagcgcaaagcccagcatctggagcggaaccagcacggaatcccacgactgcacggtggggatcatgtacgcggcgccgacgaacagcgcgaacacagcgcccagcacggccacgacgattgccaaccccttgcgggcaccgcccaacttgccggcgagcgcgaggatgacgtacacgagggcgacgagcatgaagaccatgccgatgcagacctcgttggaaagcggcgaggagcccagcccggtgaagatgccgaaggcatgggcgggatttgccgcatgggccatcgaggcgataaagccgatggccgcgacgacgaacgggacgagggtcatcttgtcgatggccttgagctgctcgtcggagaacttgcccgccgtaaaggcgatggcgagcgcgatgaaggcgcctgcgccgatgggcgcgagcgtggtgaacactgccaggggcagttcggcgagtgccgtctccattgctacatcacctctttcacgttgatgacggaaccgtcagcgctgccggcgggacgagcctcgtcgcagggcttgatgtacaggttgggatgcgtgtaggagctctcgggaagcggcgcgatgttggcgcgctcgccctttgccgacatctcctcgaccgtgccgaagtccagcgcgcgcagcgggcaggagtcgacgcagatcgggttcttgccggcggcgacgcgctctgcgcagccgtcgcacttgaccgagtggccgagcacgcggtccaccttgggcgcgttgtaggggcatgccatgtggcagtagccgcagccgatgcacttgtcggcatcgaccgaaaccagaccggtctcggggtccttgtgcatggccgccgtcgggcacaccttcgtgcacgccgggtcatcgcagtgattgcacgacatggagacgtggtacacgaaggccgtggtctcgtacgtgccgccgcccttgtcttcccacgagccgccctcgtagtcgaagaccttgcggtaagcggtgttctggtcgaggtccttgtagtctttgcacgcgagctcgcaggtcttgcagcccgtgcagcgcgaattgtcgaaatagaatgcgtattgcgtcatcgtttacccctccccgtctacgccttggcaacctggacgattatcgaatccgagggcccgttgcccttggcgagcggcgtcggcttgtacgtggtcagcgtgttgatgcagccgccgtggtcaaccttgtcgccgttcatgtcggcatcgtgccaggcgccttgcggaatgccgatggtgccggggatgatgcggttggtcacgcgcgcctcgatgcggatctcgcccgcggggctcttgacggagcacatgtccccgttctcgatatggcgcggcgtggcgtctgccgggttgatccacacctgctggcgtgccgcctgctgcagctcctcgatgaagccgaacgaggagtgcgtgcgggacttgtggtggaagccggagcagtacagcgggtactcgtcggtcaccgagccatagccctggaagccggggtcgaactcgggcagcgcgaagatcttctcgtctttctccaactcccacgtgtcattgaggttggcgagcgtctcggagtagatctcgatctttccgctcggcgttcccagcggcttgcccttcgggtcgtcgcggaagtccttgaggccgatggcgggctcgcatttgcgcttgtacacgccctgggccttgatctgctcccaactcggcatgtccttgtccttggccatgccctgctcgtagaggtactggacccactcgtcgtgcgtgcgcccctcggtgaaggcgtctttcagcccgaaggtgtccgcgatgtcggcgcagacatcgtaggagctgcggcactcgcccggagcctgctgtgccggaccgcccacggtgacgcccgtgtagtactcggagtagccctgcgtctgcatgttgagctgctcggagcgcatcgcgtcggggagcaggatgtcggcgtacttggcggagtcggtcatgacggtgtcccacaccaagatgaactcgcacttggattcgtcggcgaggatgtcgtgcgtgtagttgatgtcgccatgctggttggtcaggcagttgccggcgtagttccacaggcacttgatgtcgctgccgag

SEQ ID NO: 1080 - DNA, 2695 bp, Unknown
  16S sequences of unknown bacteria
aggccttcctgaacctgctggcccagcagctggcggcggaggtcagccggtatcgcaccgccatgacgcccgccattatcctgatccccggcgtggccgggaacacggagcagggcatccggagcgtcaagcagtccgtcgagaaggcggtcggctccgatatcctgttctccaatcaataagaaaggtgggtgagactgcccatgagtaaaggtacgatcaaaaaagtcgccggccctctggtcatcgccgagggaatgcgcgatgcaaatatgttcgacgtggtgcgtgtcagcagccagcgcctaatcggcgagatcatcgagatgcacggcgatgaggcgtcgatccaggtttatgaggagacctcaggcctgggccccggcgagccggtcgagtccatggaggtgcccctgtctgtcgagttggggcctggcctgattgccagcatttacgacggcatccagcgcccgctggatgacattatgaagatctccggcaacaacctcaagcgcggcgtcgaggtcccctcgctcaagcgcgaccgagtttggcactttgtccccgtggcaaaggtcggcgaccaggtttccgccggggatgtcctcggaaccgtagaagagaccgccgctgtgacccagaagattatggtgccctacggcgtcagcggcacggtcaagagaatcgaagccggtgattttattgtcaccgatcccatcgcggtgctggactgcgatggaaaagagcgccctgtgaccatgctgcagaagtggccggtccgccggggccggccgtaccagaagaagctgcccccggcaacaccgctggtcacaggccagcgcgtcatcgacacgttcttccccattgccagaggcggtgtggccgctgttcccggtcccttcggcagcggcaagacggtcattcagcaccagctggccaaatgggcggaggcggatattgtcgtctacattggctgcggcgagcgcggcaacgagatgacggacgttctgaatgaatttcccgccctgaaggacccgaagaccggccgttccctgatggagcgcacggtcctgatcgccaacacgtcggatatgcctgtcgccgcccgggaggcgtcgatttataccggcattaccattgccgagtatttccgcgacatgggctattccgttgccctgatggctgactccacatcccgctgggccgaagctctgcgtgagatgtccggccgtctggaagagatgcccggtgaagaaggctatccggcctacctcggctcccgcctggcccagttctatgaacgcgccggcgctgtctcgcctccgggcggcgatatctccgagccagtctcccaggcgacgctgcggatcgtcaaggtcttctggggcctggattcggccctagcctataagcgccatttcccggccatcaactggctgaccagctactcactgtatctggattctatgggcaaatggtttgatgagaaggtctcacccgaatggatgcgctgccgccaggcgatgatgagcctgctgcacgacgaggcggagttggatgagatcgtcaagatggtcggtatggacgccctgtctgccggtgaccggctgaaaatggaagccgcccggtccatccgtgaggacttcctgcaccagaactcgttccacgaggtcgatacctattcctccctgaaaaagcagcttctgatgatgcagctggtgctggccttctacaagcaggcaaagggagcactggcaacgggcgcttccattcgtgatctcttgaaaatgcctgtccgtgagcggattggtcgattcaagtacacgctggaagaaaatctggatgtggaatacgacgatatcactgaggcgctttgccatgaaattgctgtgtgttgtagctaggaggacctctgatgccgaaagaatataaaaccattcaggaagtcgcgggcccgctgatgctggtccacggcgtggaaaacgtattttatgacgagctgggcgagatcgagctggccagcggcgagattcgccgctgcaaggtgctggaggtcaacggcgatgacgcgctggtgcagctgtttgaaagctccaccggtatcaacctctccaacagtaaggtccgcttcctgggccgtaccatggagcttggcgtctcggaggacatgctgggccgcgtcttcgacggcctgggtcgtcccatcgacggcggcccagagattctgcccgacgcccggatggatatcaacggcctgcccatgaatccggcggcccgaaactatccgcaggagtttatccagaccggcatctccgccatcgacgggctgaacacgctggtccgcggccagaagctgccaatcttctcggcctctggcctgccccattcgaatctggcggcgcagatcgcccggcaggcaaaggtccggggcaaggacgagcagtttgccgtcgtctttgccgccatgggcatcacgtttgaagaatccaacttcttcgtcgaatccttccaggagaccggcgccattgaccggacggtcctgttcatcaacctggccaatgacccggccgtcgagcggatcgcgacgccccgtatggcgctgacggcagcggaatatctggcctttgaaaaggggatgcacgtcctggtcatcctgacggatatcacgaactacgccgacgcgctgcgtgagatc

SEQ ID NO: 1081 - DNA, 4617 bp, Unknown
  16S sequences of unknown bacteria
atcatgaccgaaaaagacaaacaggatatcgcgctgctcagatattccattattttgattatttcgcgtcaaggtctaagttttccagagtggcgtaatattcatcgacacctgtcagctgtcctaccatggcgcaatcaactcttccgtcaagggacatcatcatgtgacaaacaatatagggttttttcaacttagcttcacctccgctgtccattctattctgacactatgtcagcacacttactatagcgctgttctgacactgtgtcaatataaagactgaagaatttttctcctgtactgaaacgatgcgttcaaagtacaaaagccagaggatctgatgatgaggctagtggaattatctgatcgaaacgtgaagatcatcgatatgctggggataacgctgatcctctatgcgttaatgcggaatgcctacagttggacggatcaaggacagtgctgatttcatacggtcacttgagcggtagagcggctgtttttgaaccaggtggggatcttcaagaagatgatatatagcagcgcaaatgggcaggacaaaacataagtgacgctctgcagatttcttctttgttcgctgtacacacaagttgccgctgtctgggacgatgtagttatgcgttttaagcatgaacgacaattgaatataagtatttcacatgatcgagcggaagtcttatcattttcttaggggataagtacagtggtttgacctatccggagaggagatcggttcatgaaacaaatcatgttatctaatggcgtacagatgccgatggaaggctttggcgtctttcagattccaaacgatgcgtgtgaagcggttgtcttaacggcattgaagacagggtatcgtctgatcgatacggccagttcttatcaaaatgaaaaggctgtcggagatgcgatcagaaaaagcgggattcctcgcgaagagctgtttatcacgaccaaagcgtatattcaggagatgggatatgaaaaaacgaagctggcgtttgaacggtcgttaaagaatttaggcttagactacttagatctctatttgatccatatgccttttggcgactattacggcgcctggagagccatggaagagctttatgaacaaggaaaaatcagagctgtcggcgtctgtaactttttaccggaccgattattggatctgtgtaaaaatgtacggatccggccgatgatcaatcagatcgagcaccatccgcatgatcagcgagatgaggagatcgcgttgatgaagaagctgggtgttcagccagaagcctgggctccgtttgcggaagggttaaaggggatgttcagcgaaccgctgatcttggagctggcgcaaaagtatcataagactccggggcagatcctgcttcgctggaatattgagaatggctgtgccgtgatccccaagaccgttcatgaaagtcgaatgagagagaatctggacatctgggactttcaattgtccaagcaagatttagagcggatgaaagagttggataaaggtgtcccatctatgttggatacgcgtgatatcaatgaaattgaacgagtttatgcctatttagatgaccctgtcttgacgacattaaagtaggagggatacgatgaacatcgttgtattagaaggaagtccgaacacccatggttcttccaatatgctggcagatgcctttatcaaaggcgcacaggaaaaaggacatacggttgaagtctttgatctgccgaagatgaatatccatccgtgcatgggctgtgtccgctgcggctatgaaggaccatgtgttcagcacgatgatgtcacacaggtgcgaagatcattgttgtccagtgatatggtcgtctttgtgactccgttatattattatggcatgtcggcgcagctgaagacgatgatcgatcggttttgcgccttcaactcaagtctgacatcccgccatctaagatcggcattgatcagtgccgcctggaatgatgatccttggacatttgatgctctggaagcgcattatgataccctggttcgttatcttgatctggaagatgtcggaaggatcttaggcagaggctgcgggacgccaagcatgacccggcgttctgcttatgttcaacaggctggtgaactggggaaaagcttagatcgttaagaggaggtattcgcagtatggaatatgctaaattaggaaatacagatatcgaggtatccaagctctgtgtcggctgcatgagctttggaaaggccgggacgcttcatgactggacggtggatgaggcagaaacggaaaagatcgtcaaacatgcgttggatctcggcatcaacttttttgacacggccaatggttattcagaaggaaccagcgaggaatatctggggcgggcgatcaagaaaaatatcgcaagagataaagtagtgatcgcgtcaaaagtctactttaatccaggacgcctttcttcggcagcgatccatcgggagatcgaagggacattggaacggctgggcacagattatctggatctatatatcatccatcggtttgactatgatacgccgattgaagagacgatggaagcactgaacgatctggtggtgtctggaaaggtgcgtgcgataggagcgtcagcgatgtacggctatcagttttacaacatgcagctcgccgcaagagatcatggctgggcacagttcgtagcgatggagaatcattataatctgctttatcgggaagatgagcgggagctgatccccatctgccgtcagatgaatgtttcgctgatgccatacagccctctggcagcggggcatctgacccgcccggagtggaactcggactccatccgcagcaggacagacaaggcagccatggggaaatacgacagtacccagaagcaggatatggagatcgtgcgcagggtgcatgcgctcgcggaaaaatatggggtcaagatgcagcagatcgcactggcctgggaatgggcaaagggcgtgacttccccgatcatcggcgcaacgaaagcgtctcatttcgatgatgcggcaggcgcgtttgccgtcaagctctcagaagaagatatcgcttatctggaagagccatatgttccgcatcggatcgtcggcgcgatcgatcacaatccggaagagggcgtcaagctgctggatgtcaaaaaataaccggaacggaggagagacgatgagcataacgatgcacctttattatgccggcaaaaacggcaatgcccgcaggtttgccgaggaaatggaacagggcggaacagcggacctgatccgtgcagagccggggaatgagggatatgcttactttgtctcgatggatgatccggaaacggtcctgttggtcgatcgctggaaggatcaggcatctcttgatgcccatcatgcgtcttccatgatgaggaccatcatcgaccttcgaaaaacatatgatcttcatctgcgcgcggaaagactgatctcagatgatgcagggatcccagattcagatgtgagattcatcaacgaatgatgcacgtcaaagcatggatcgatgtagggacaatattgataagatcctgtctcatgcttgcgtcagcgctatttccatcctgcacccttctcttcacagagggggtgttttcatgtcgtgttttttgtaagaaggacagaatggtgagcagatctcttggcggatgaacaaaggatcatcgcactttcggcgtaaggcagacatagaaaaagccgggacatcgtaccggctgagcgatcatagcaggcggcatagacacatcaagccgtgtctatctttgcctgttcttgcagaaatcgctcacgatctctttgacgatcctgagtatcgtttccttttgcttgaggctgcaaggcgcgacggtcagggcgaatcgcgcgctgatctcgtcatcatcagcgcccgtgctgtttgccagcaccttgtctacggaaatagacagcgatgaagcgaggatggcgacgatctccagcgaagggttggcgatcccgttttcgatctttgcgatgtgccgcttggagatcccggtcaggtctgagagatcctgctggctcaatctcatttcgcttcgggcctgtctgatcgcttctccgaatgccttgatggcttgctctggcatgatgaatcacctcaatgacattttatcgttccccatttctgctttacatatcctaatcattcctcaaaacaaggtatcatcgtgcgtcttgaccgacctgtttttggacagggaatgggcttgtgtgaaggggcatggtataatgatcctgttcaatcatgtcgaaggaagggaggagctgtcatggatatcctcatggcgctgatcatgatcattgccggatttttctttctggtcaagggggcagacttatttgtggatagtgcctcaggcatagcggggaagctgggcatatcaccggtcgtcatcggcctgaccattgtagcgttcggcacgtcgatgccggaactggcggtcagtgtgacggcggcgctggaaggcgcgaatgagatcgccctcggcaatgtcgtcggctccaacatcttcaatctgctggtcgtcgccggcggg

SEQ ID NO: 1082 - DNA, 3135 bp, Unknown
  16S sequences of unknown bacteria
ataggtaatatgttgtttcttgttttacaatcttaacaatgtcgcaaaccctatcagtcttgttgatagccaagtacctaatacagttgtaacagagtaaactttgttgcaaagggtgctgtcaaccaccctatgatgtaacgccactttaggtagcaatatctattggggttaaaggtcggaggtgtaagccgttagtacgactgggcagttacaagcccatgacctttaggtcatgggtagttgacatactttatactcctgtcatatattgatgatgataccggggtcaaaaggccgaacacctcaaatccgcacttccctgtttttcttctcttccggccagttgcactctgcatctgctgcacagaacagacacatacgagaagccttatcagcccggtagagagctccggccagcccgccagcctctccggtctttttcgctctgtgccctgcaatcgcatcgcaaatttccagacgttctgcatccgaaaagccacaatcccgcaaaatctctcctgcgagcattacgcttccctcctcatgcggaatcccctgctcatattgcaaatgccgcccgatatcatgaagaagtgctgccgcataaacatgctccttttccagccccagctgctgctccaggttctcgatccaggccagccgtgccacatccagaaaatgtatcacatcatgcccgcagaacactctgtcctgctccagctcctcaatccgttttctgctcgtctgccagagcggatgccggcagatcgcgtttactctttgcagctgctcttccttttctttctgcatttcattttctcactttctatctgcacccggaaactttccgtccctacttattgctctgcgcgattgctgccgggatcccccttaccaccgctcagtgctccgcgcacttgaagctggggaatggttatctgcgttcaggaatgcctcgacattcttgctgcgtgattcgcgtcatgcaatgcatggcatactttctcattaccgacgctcaatcatacggaagaaccggttctgcagctcttcattgttatcaaacacacctcttgtcactgcggtcaccgtcttcgttccgggctttttaattccgcgcatcgtcatgcacatatgctctgcctcgatcagtaccataacccccttcgggttcaactcctgcataaatgcatctgcaatctgcgcactgagccgctcctgcagctgaaaacgctttgcatacacttccacagtccgtgccattttacttaagccgaccacttctccgtccggaatataggcaatcgcaacggtgccgtaaaacggaagcatatggtgttcacaaaaagaataaaaatgaatgtctttttccacaaccatatcattattatccacatgaaaccgctttgccagatgctttgccgcatcatctgtataacctgctgccagctcctcatacattcttgcaatccgatccggcgtctccagcagtccttcccggttaatatcttctccgatgccgtccagaatcagacggacaccttccataattttttccttatccataatatctccacatttccttttctgtttctgctcagcctttcattcctgtctggctgctttttcttcctgatagctctctaccgcctgctctgcctcacacaggtacgataaagatccaaaaataacaactacatcatctttttcggctctttgaaggcttttatgaactgcctcgcggatgctcgctgctgcttctaccgaaggattcacctctgctaccgcctgtgcaagctcctttgccggaagtgcacgcggattgtccggtgtctctaccgtaataatatgctctgcaagcggcgccgtaagtgctatgaccgccggataatccttatcctgaaacattccgaatacataatgcagccgacgacccggaaaatagatctggagcgaatcccgaagtgtctgtgctgccgccggattgtgtgcaccatccatgatgacgtacggttccttctgaataatcgtaaaacgaccacgccaagtggtcttttgcagtccgtcccggatctgctgctccgtaagattatatcccatccgctgcaatgcccaggctgcctccagagcaagtgacgcgttccatatctgatagcttccggcaagtgatattttcacatccgtccagttcttatatgaaaagctctgcgtcccgcatccatagtggacatctttgattgcttccggatcaacgcttcgcagcgagcattcctgccggtcgcacacctcacggatcacctgctccgcttccatctcctgctttgcagagacgacactcgtatgaggcttgataatccctgccttttgctctgcgattttggcaagtgtattccccagaaattccatatgatccatgctgatcgaagtcagcacctccagcactgtggtcgaaataatattcgtggcatccagcagtcctcccattccggtctccagcacaaccagatcacaatgtttttccttaaaatacaaaatagcaagaaccgtctctacttcaaataccgtaggagttcctgcatttttttcctgcatatctctggttgcttctgctatggctgtcacatgtgctgccagagattctttgttaattttttcaccatcgacctgtattttttctctgtaagaaaataatgtcggggaaagataccttccaacccgatatcctgccccggacagaatcgttgagagatacgccagaacagacccctttccatttgtgccggaaatgtggataaatttcaaatcgttctgaggattgccaagccggttcagcagctctctcatattatccaagccaagtacacttccgtatttggacacctgatccaaatatactcttgcttctttgtaattcatgttactcctatccgggaaaatcccatatattctcagagaatttctatattctcttttgtcaattatacgccctttgtcatatgacttcaatcacataaattgttaaattattatcaatgccgggccgttattttccagacagtccatttactctgtccaatcaattaattttctgtaaagcaaaaaagacaccggatcactccgatgtctcatttc

SEQ ID NO: 1083 - DNA, 4188 bp, Unknown
  16S sequences of unknown bacteria
ctattatctatccagcagctcacataactgccacggctcatcgatcatcacatctgcaccgctttcccacagaacatcagtgcttctatatccccatgacacaccgacacccacgaatccggcattttttgcaaactgcatatcggtctcgccatcacctacatgcatgacctgatccggggtaacacccagagtctcacacagcagttttccggctataggatccggtttcagggggcgatcctgatcatttccccagacttcttcaaaaggaaggtcactgcagaaatggtttgccagcttctttgcagtcgattccactttattggtcacaattaccagccggattcctttggcagccatccactgcagagtctcccacattcccggataaaaacaggtctgttccgtacagtgctccggataccactccagctgataacgcactgcttcttccagtttttcctgagtcgcatccggacaaagttccctgtagatcccttttacaccatttccgatatagttagcaaaacgaaccggcggcataggcggcagtcctgccagtttcagtgcccgtctggcagctgcctccagatctgcctctgtattgaggatggttccatccatgtcaaaagatactactttgatattgctgtattttccactcatacccgtattttcgttcctttctgatctctggttccatttttcagcttctgtaaagatacttctttttctttataagtgatgatcttatcttcaccatctgtcatcacatagacctgttccagactgtctttgactgacagcttcatggcacgcacaccaatcgctgccttcttcttctccggaatctcctcaatagcaaatttcaggaagacaccttctgcggactgaagtacgatctgcgtattatccccgaccagacctgcatacaacacttcgtcatcttcgttcaatttggttgccgcactggttcttgtgcgcacatcatactcgtaaccgctgaccacctttgtcataccatatttagtcacgaacagcatggttcccataagcagctcttccatactgcaaatgcagatcatgcgctccttggaactgtcaaaattgctgaaattatcgatcgggaatgccttatcacggaattttccatatggcaggtctgcaatcttagccgtatgaagcttgcctttctctgtgaaaatgcaaagccggtcggtattgcggcaggtcagcacataacggctctccgcatcagccgcctctttatttctctcataagtcgccacatccatggtacggcagtaaccaaatcgatccatcaggaatttcaccggcatctcttccatcttcttctccacgaaaactgctgcctctgcattttccacagatgtctttctcggttgtgcataagccttcttgtaacggtcaagatccgctatgataaccttcagcatctcgtcatagttgttgaggatttccgaataacgggcaatgtttttcatggtggtatcatgttctttcataagagcttcaatctccagaccgatcaatttgtagagacgcatctccagaattgccgttgcctggcgctctgtgaaacgaagcttcgccgcctgtgcttttgacttctcggacttaaatgtaattccttctgtaacaccactcatgaggcaggcttttgccatctttagatcccggcttccacgcagcacttcgatgatcaggtcgatcacatcacaggctttgatgagaccttcctgaatctcttttttatccagctctttattcagaagtgtcttatattttctggtattcaattcaaactgaaagtcgatcacatggtcaaagatccgggtcagccccagagtctccggtcttccatccgccactgccagcatatttacaccaaaggtatcttccaaacgggtcttcttgtagagcatattggtcaactgctcggtatctgcaccctttttcagttccagcacaatacgaatgccttccttggacgactggttggtaatatccacaatatctgtagttgtcttagattccaccagtccaccgatatcattgaggaattttccaatattagcgccgatcatggtatatggtatctctgtaatgaccagctgctccttgcccccctttaatttttccacttccacacggccacggatcttgatcttacctgcgccggtgcggtagatctcggtcagttcatctttgttgaccacaattccaccagtagggaaatccggtcccggcatgatctgcaagagctcctccactgtcatctgcggatttttcatgtaagccttcatggcatcaatggtctcacccaaattgtgcggcgggatgctggtagacataccaacagcaatgccctctgcgccgttgatcagcagatgggggatccttgccggaagaacaccaggttctttctctgtctcatcaaagttcggaacaaaatccacgatatttttgtccagatccgccagcagcacatcttcactgaccttctgaagtctcgcctccgtatatcgcatggcagcagcgccatctccttcgatggaaccaaagttaccatgtccgtcgataagcggcagcccttttttgaaatcctggctcataacaaccagtgcctcatagatggagctgtctccatggggatgatatttacccatggtatcgccaacgatacgggcacattttcggtaagggcgatcacttcggataccaagctcatgcatatcgtagagagttcttctctgtaccggcttcagaccatccctcacatccggcagtgcacgggccacgataacgctcatggcatagtcaatataagacttctgcatgatgtcggaatattctgtttttatgatcatttcttcactcatgcttttcctcctacacatccagctctgcgtctactgcattttcatagataaactgacgacgcggcggcacttccgttcccatcagcatctccgttacagaggaagccagtctggcatcctcgatctctaccaggcgaagccgtctgtgatcaggatccatggtcgtctcccacagctgggtggcatccatctctccaagacctttataacgctggagcgtgaaggatcccgtgtgggtctttctgtatttttccaatgccttgtcgtcataaaggtattcttccttccctcttgccggcatggctttataaagcggcggcatggcaatgtacacatgtccctcgtagatcagctccggcataaaccgatagaacaaagtcagcagcagcgtactgatatgggcaccgtccacgtctgcatcggccataatgatgatcttatcatagcgaagctttgtaatatcaaaatcatttccatatccttcagagaatccgcatccgaacgcattgatcatcgtcttgatctccgcattggcaaggactttatcaatgctggccttctccacgttcagaatcttaccccggataggcaggatcgcctgataagcacggtttctggctgtcttggcagaaccgcctgcggaatctccctccacgatgaaaatctcgcatctggaagcgtcccggctctcacagttggccagcttgccgttggaatcgaaagaatatttctgcttggtcaggagattggtcttggcacgttcctcggtcttacggatcttcgccgccttttccgcacagccgataacgctctttaaggtctccaggttgcggtcgaaatagcggacaatctcgtctccggtgacctttgctgtggccttggaagcgtcctggttatccagcttggtcttggtctggccctcgaaacggggagccggatgcttgatggaaatgaccgcagtcataccgtttcgcacatccgcgccggtgaagttcgcgtccttctccttcaggatgccaagctccctggcgtaattattgatgaccgtggtaaagatggtcttgaagccggtcaggtgagtgccgccctcagcattgtaaatattgttacagaaacccaggacgttctcatgaaactcattcacatactggaacgcaccctcaactacaatgccctcggactcgcccttgaaataaacaacctcgtgaacggtctccttgttcttattcaggtcctccacgaagccgatgatgccattttcctcatggtactccacatgctc

SEQ ID NO: 1084 - DNA, 4273 bp, Unknown
  16S sequences of unknown bacteria
ccagattcacccgcgtcttctccccgccggagagtgccgcaaagggccgctgccgcatggccgccgggatctccaggccgttgcagatcttgtccaccgcggtgtcgatcgtatacccgccgccggtctcgtagcggttgaccaggctgtcatactgggaaagctgcgccgtggtgctgccctcggccatctcccgctccagctgggccatcttctttttcagcgcaaacagctccgcaaatgcgctgcgcagcacattttccaccgtgtattcttccgggtaccagggaatctgggagataaggccgatccgcttgcccgccgcaacggtgatctccccctcgtccggcagaagctgaccggtgatcatccggaagagggtcgtcttgccgcagccgttgcggcccagcaggccaacccgctccccctcccgcagctccatggaaaagccgtcgagcagcggcgcgccgatctcaaaggattttacaacattttttatactgatatcaatcatattgcctctccggggcgaattcccgcaaaaattcctcccgcgtatacagaatattcaaaacgtccagcagcgcattggcgctcagatgctccggcagccgcagctgcttttttagtgcggcccggcgctgggcgctgtctgcccggccggagagcccggcggcaaagaggtccgccttggcgatctccggcgcggcattctccgcctgatctgcgtcctccagcgggacgcccgcctcttccagtgcccggcgcaggatctccggccgcatcccctcgacgcccagcttgccctccttgcccggcgagcgcttgcgccgctccttaccggcgatgtccggcacgtaggcgtgatacacgccctgcttgggcagcgcgcccttgagatagttgcggatcacaaaacccgcaccgtccgggtccgtcaggataataagcccccgcttttgggccacgctgcgcagcagtgcaagcttggcccggtcgtgcatgacgccgaagccatcggtcgtaaagaccggcgcgtccaccagctgtcgcagggcgttcttatcatattttccctcaaccacaatggcctgtttcagtttaagcatgcttcacctcctgggccagttgcaatagcagcagctccagcagccgctggggcgtgtcatacgacgttttcagccggtagtccgtcagtgcgcaggcctgcagggccgccttgctgaagccctcggagagccgccgggcgtatcccatcgtctttttggccgggtagctgcccatgccgcacaggtgcatcaggctctcagcacccttgcccgccgcctgcagcagctgggcgcaatagatccgacgcagctgcatcccgatggcggccaggagcacgataggctcctgctgcagctggaaaagcgtctgcaatgtcgccagggccgtgtcatagcggcctgcggcgatggcatcggtcatatcaaagacataggcctccagcaccggctcgaccacggcgtcgatctccgtctttgtgatctcctccgccggggcataggccgcgaccttttcgatctccgaccgcagcgccgtcatcgtcccgccagtgcgcaggatgagatagcggcagaggtcaacgctgatttccttaccaaagcccgcaaaatgcttggcgatccaggcggcaagctcccgctctgactgcttttcaaagctgacggcactgccctgcccctccagaacaccatggagcttcttctgccgccggtccggctgataggccaccgtatcgaacacaaagaacacgtggcaatacggcgggatatccgaaagcagcaccgtcaggcgctcccggtccggctggggcagcttatagggatccacatcgtccacttggaccatcgtagcctctgccagcatgggcatggcctcgatggcattctgcagggcgtccatcgtcaaattttccgcgttgaagcggtggtaattgaatgactccgccgggccgtcggtcagcttttttcgggccagcgcaagataatgctcccgcagatagctctccggcccgtaaaagagataaagcggccccaattgcccggcccgcaggtcatttttcagccgctgcagcgcgccgggatctgttttttcttttcttgccatgccgctcacctcctgatggtcacagtaccgttttggtccgtccgatagatggccgcgccgcaggaacgcaaacgctccattgtctcggccctgggatgaccgtaccagttaccgcgcccaacggagatcaccgcgatctccggccgaactgccgcgagcagcggtgcacccgtggaggtcgccgcaccatggtgcccggcgagcatgacctcgaccttcggcagggtatgcagggccagcagccgcgcctccccgtccaggctcatatcgccggtaatcaggatatcataatccccccgggagcacagcacgctgagcccgccatcgttgcccggcaggcgggagaccggcccgaagatctgaagctggctttgacccaggtgcagcgtccggtcctcttgcaaatactccagcgtcgtgcccgtctccgctgcggcctgtccaattgccgtgcagagtgcactttccgtatcgaccggcgggagatacacctggcgcacagggatccgccccagtaaataggccgcgcccccggcatggtcggcatcgtaatgggtcaaaagcagcaggtccaggtggaactttccgtgggcaagcaaggcccgggccgcctgctccccggcttcctccgggttgctgccgccgcagtcgaccaggatactcttcccatccacctccagcagcacgcactgcccctggccgacatccagaacggtcgtctggacctcagccaggctattttccagccaagagaggcccacgctcgccgccagactgacagcaaggcacagggcaaattgcagcggccgcttctgcttttgcaacagaaacaccgccagcagcaaatacgcaaaaaccacccacgcggcaagatagacactgctggtatagaccgcggcaaacggcagcctggccgccccccggacgatccaccaaaaataacgcacaagccacgagagcagccccgcaaaaaacgctgcgacgccgggcaggacaaagcccaccaggcagatgacaagccccagctggaagcacaggctgacagcccacagcaccaggaaattcaccccgatcgcagccaggctcacaagatcaaacgagcaggccaccagcggcgttgtaaacaccattgcaccgagactggcggagaccgacgcaaacagcgcggcgcgcagctttgccgccactgcgggcagcttccggcgcgcacgtcgggtcatggcgtgatagagccggttgccaaacagcagcaggcccgccatggacgcaaacgagagctggaagctcaggtccgccaccgcccagggattttgcagcaggattaccagcatcgccgcgcagagggaggtcggcgtgtcctcctcccgcttgacaagcggcgccagtagcagcaggatctgcattacagccgcccgaataaccgacggcgccgccccggtcagcagcgcatagcacacgaccaccggaatgccgatagccgccgccaggccccggcggcgcaggaacagcagcagcatcgccaaaaggatcgagacatgcatcccggagatggcgacgacatggctcacccctgccagtgacagagcgtttttatccgcataggaaaagccgctgcggtcacccgtcagcagagcctgcaaaaatggcgccgtatcggcgggaaacagggctgtgattttcccctgcagctgccaggccagccacgcggggcaggcccaaagcgggcgctttgcctgcggcgtaacccgggcatcgcccttggcataggcctgtagaacatagccgcggctgcgggcatagaggttttcctcctccgcccgggcctggagactcgccgcttccacctccgccttgacggatagctggtcaccaggcgcggcctttacgtctgtttcgcgcaggtagagcagcgtgcggcagcgcgtgccgtcgcagtccagcagcacatccagccgctggccatagcgggtctgcgccgggtaggaggcaacggtcgccgtgatggtctgggcctcgcccgtcaggcacagggccgggcgcagctgcgtctggtaatacagccccgtccagagcagccccacgccgaagccaagcagcaggcagcagacgcgccgcagccttt

SEQ ID NO: 1085 - DNA, 32317 bp, Unknown
  16S sequences of unknown bacteria
tggggtggcttgtaaaccccttttttaaaaaagttttttgcgccgctttgaaacggcgcaaaagccttatttcattactgcatcatcagacgatcgaattcctcaaccgctgcgccgaactcctcttcactctcgatttcaaccaaatcgaacgtgtcgtcaccgttgtccttatatccgtaaatatatacatcatcggtgccatcatccggctccagtgcaatgtattcctttccgttcagatcgaatacacctgtaatgtagcactccactactgtaccgtcatcaaattccagtgtgatgaaatcatcttcagtttcttcttccagcagctctttgttctgatcttccgccatttcgctactctccttaccttcaacataaatgtaatttcccgattcaccttccttccggagagataaatcgtaattcaaaatataccatgaatatctttaaatagcaagttattgctgaaagaattccaaaacactttctgccgccttggaattcatcccttctgtttccatcaattcttcgtaggaagcctttcgaatcgcatcgatgctgcggaatttctccatcagcgccttccgccgcttcggcccgattttcggaatttcttccagcacggagtgtgtcatcttctttcctcgcgtacctcgatggaaggtaatggcgaaacggtgcacttcttcctgaatgtttcccgcatagctgaacagcagaggttccgacttcaaatcgatttcacttccgtcggtgaacacgaccgcgcgggttcgatgggcatcgtctttcgccaagcccaccaccggaatcgtcaaccggaacgcatccatcactgcttttaccgcatgcacttgtcccagtcctccatcgatgaacatgatatccggataccggctgaaacccggatccccttctcgggcccgctttagccgccgatacatcacttcctgcagactgccgtagtcgtcgccctcggcagttcgaatccggaactttcggtaatcgttccgcactggccggctgccctcgtacaccaccatggcgcccaccgtatccaggccgttcatgttggagatatcgtaggcttccacccgatactcctcttcatcgtcctcctccagcagccggggaatcaccccatcgatttccgccgcccggcgaatcagctccgaaatcttctgccgcagatttttctttcgttcctcgtctcgatcggctctctcgtccagagaacgggccagctccaccgagtccgccagggtcatgtccaggatggcctttttctcccctcgctccggtatgtacaaccgggttttgtggggcacatccgttcccgctttcgcgttcatctcatcgatgtggttcaaaagctcggaaatcagttcctcttcttccgggtgcaccggcacaatcacctctttgggaatccgggatgtagacaggtagtactgcttcagaaaagcgctgagcagctcctcccgggtggattccgtctcgtcgttcatatagatgatttcccggccgatcatcttgccttcccgcacccggtactgcgccacaatctgattgtggtgggtccgaatcgggatcaggatatcgatatcgtgctctcgcaccatggtggcccgctgcttctcgctgagggaccgcagcgcccgaatgtaatcccggtatttcgccgcctcctcatacttcaaagcatccgatgcttccatcatctttccttccagctttcggatgacccccgcatcctttccgcctagaatgcccaggatgtcccgaatcatctccaggtattcctcccggtccgcttttcccacgcagatgcccttgcattttccgataaaataattcaggcaggggcgggtgttttccggaaaatgcagggtactgcatttctttagggggtacatttcgtcaatcattttcaaaattcgccacacagcggtgctgtcggaatagggcccaaaataccgattctcatcccgcttgacctcccgagtgcggattacccgggggaactcttcgctcatggtcacttcgatgtagggataggtcttatcatccttcaggaggatgttgtacttcggcatgtatttcttaatcaggttgcattccagaatcagcgcttccatctccgtgccgcaggtgatatagtcgaattccgcaatgttggacaccatggaccgaaccttcggactgtgctgagaagaattccggaagtattgccgaacccggtttcgcagatttacggcttttcccacatagattaccgtccccaggcgatccttgtgcatatagacgcccggacaggtggggagttttttcaattcttcgttgatgtcaaacatctcttttccctcctgcacactccctcggttctctaccgataggtccagtttcttcttttccgatcctcttcaatttcgtattcccgcagggcaatttcccggattttctgctttcgccgacgctccgccagcaaccgtttccgtctccgaattcgccgaatgcggagcacgaagtacagcaagcacagcagcaccgcggcaatcaaaatcgtcagcccgttggaaatgtacagataggacggaaaccatccggttttcacatcttcttttaccaccagatccacagtgccggtcagttcatccgcaacgtagacctgaagttctcccgccttcgttccggcttttaccggcgcttccagcttgtcgtagatgatggtctgggtgcgaatcaggctgtcgcttccttcctttgggacataggcgtacgctttgcttttcgtatataccggaacccgggtacttgcgccgtggcgaattttgattttacccaccttggccccggccttccgaaccgcatggcgggcgaccttcccataactgtaatccagaagctgtttctgctgcgcatccttttccttagcagtggtcccaaaaatcacggaaatcagcttcatgccgtcctgctccgcgtacgcaaaagaattcaccgaatgctttgatgtgccgctctccaccgctttggccgccaccaaaccggagtaccggaaggtatcggaatggcgcagggttttcgatgcggtcttgcctaccgccgtcgtggtgcaggcctccgtcgtaaggtatttctcaatcagggaatacttaaacgccgcctgaaccagatatcccatatcctccgtggtggtatactgaagggtatcgtatttgccggtcaccgtggtgtagtgggtgttctccagctccagctcctgcgctttggtattcatcgcttccacgaacgccggcacgttctcggcagagtacaccgccagagctacggccgcctcatcggaatccgccaccagcatagccgccagaagatctcggacggtaatttggtcgcccttcttgaagagcttcccctttgatgccacatcccgggtaacggtaatccgattccgaagctctgctcggtcgtgcatgcgatccagcaccaccatggccgccatgattttggtaaaaccgcccggcgacagctttcggtccgtatgcagccgatacacagtctgccccgtagatgcggacaccacaaaggcagaatccgccccgatctccggcttagattccgcaaacgtttcatctaaaaagagggtggtcacccccatcagcaccatcagtgccgacaaaatgaccaccatcacgctctttccgatattattcgatttttgagtccgggtgtttgccctatttgttctcatcttcgaattctttcatgtatgcaatcagtgcatccacgccttcttccggcatcgcattatagatgctggctctcataccaccggttgttctgtgtccggccaggttgagcatgccgcgctctcttgcgccggcgacgaacttcttgtccagttccggatctccggttacgaaggtaacgttcatcagggaacggtcttcctttgcaacggtcggtgtgaacatttcgctgtgatccaggtaatcatacagcttacctgccttgcgaacgtctctctcatgcatttccttaactccgccgatgctcttcagatacttgaatacttcgccggccatgtagattgaatagcaaggaggggtgttgtacatagaacccttctttgcatgaattgcatagtccagataaatcggagtgttctccggtgcatgtcctaccagatccttccgaacgataacgattgttacacctgccggagcaacgttcttctgtgcgcctgcataaatcagaccgaacttggtaacgtcgatttcttcggacagaatgcaggaagacatatctgctaccagcagatgatctcctacatccggaacttcgttgtagtgtgttccgtaaatggtgttgttatagcatacgtatacgtagtctacatcttcacggatatcttccttcttgaacttcggaatgtaagagaagttcttgtctgccgaacttgccagtgcacgaatatcaccgaacttctgagcttcttcatatgctttcttcgcccagttaccggtaatgatatagtctgccttcttggaattggtcagcaggttaatcggaaccatggagaactgcagtgtaccgccgccctgcaggaacagtacatagtagtcatccggaatgttcatcaaatctctcagattctgctccgcatcatcgatgatcttctggaattccgcagatctgtggctcatctccattacggattcgccggttccttcatagtccagcatctcagcagctgccttcttcagtacctcttcaggaagggtagacggacctgcagagaaattaattgcacgatagcccattggtatttacctccagttaattaaatatagattcatgtacaagaattataactctttcgcaattgaaagtaaagttcaataatgatatactagcatgtaatgagagagttttctcattaaatatcatagaacacaataatggttgtatcacaggaggtaacacaatggcgaagtactcaattggtactctgaacaacatctctaaggtaggtctgaatcgtcttaccgatcagtacgcactcactgaggacattaacgaagcaaacggaatcgtagtccgaagctacaagatgcacgaaatggatttctccgacaatctgctggcaatcggtcgtgccggcgccggcgttaacaacattccgctggatcgctgtgccgatgaaggcatcgttgtattcaacacaccgggcgcaaattccaacgcagttaaagagctggtaatcgccggtctgattatgggttccagaaacatgtacgaaggaatcagctgggcaaacaccctggaaggtgatgtttccggccaggttgagaagggcaaaaagcagttcgccggaaccgaaatcgaaggcaaaaccctgggcatcatcggtctgggcgccatcggtgcaaaagttgccaatgcagcacacgcactgggcatgaacattgtcggcaactccgtagtcgttcacccattcctgaccgcaccatgcaaaatgtatgatgatgttgcagagatggtaaaagtatgtgactatgtttccatccacgttccgtccctgccggcaacaaagggcatgatcaacaaagatctgattgcaaacatgaaggacggtgccatcgttctgaactacgcaagaccggacctggttgtagaagaagatatcattgccgctctggaatccggcaagctgagaaagtacatgaccgacctggcagacgagaacctgatcaacaagccgggcatcgtatccactccgcatctgggcgcatccaccaaggaagcagaagacaactgcgcatccatggcagtagatgaactgatggattacatcgaaaacggcaacatcagaaactccgtaaacttcccgccggtatccctggatgcagaagccggaaccactcgcgttggtatcctgtacaagggcgaagttgacgtaaccgcactgctgaacgaagcagttggcgcagacaaggttgtcaaggttgaaatcggcaagagccgcaccgaatacggatacgctctggcactggttaaagaagacgcttgcaaggattgcctggcaggcatcaaggcagatggcgtaatcaaggttcgcgttctgtaattaaccactttaataattcaagtagagaaaaaaaggctgttccgctgttgcgaagcagccttttttgtgtaggcggaccgggaaccggacgcctgcaggctggcagccggcgcggtttgcggttcgcgctcccctctccgcaaagccataggtttcggttcccgggcgcgaacttcgggccggaagaaaggggcaagacggcccggccgccgtcagagtttgcgtacgactccccggaaacccattgatttcggttttgatacgcaaaccgagcgccgggatttttgaaaaaacaagtccggccggcgccacggtttgcgtacgactccccggaaacccaataaattcggtttccaagcgcgaacttcgggcctggagaaaggggcaagccgccccagtcaccgccacagttcgcgctcttctccccgcaaagccattattttcggtttccgggcgcgaacttcgggccgggatttttgaaaaatcatgtccggtcgccgtcagagttcgcgctcgcctccccacaaagccattattttcggtttccgggcgcgaacctcgggccgggatttttgaaaaatcaagtccggtcgccgtcacagttcgcgctcgattccccgcaaagccattgttttcggtttccaagcgcgaatctcgggccgaaagaaagggacaatgcggcccggtcgccgtcacagtttgcgctcgattccccgcaagcccattgttttcggtttccgggtgcgaacttcgggccgggagaaaggggaaagtcggtccggtcgccggcactgtttgcgtatgattccccggaaacccattgatttcggttttgatacgcaaaccgagcgccgggcactttgaaaattccggcccggctggcaccacggtttgcgtacgactccccggaaaccctttgatttcggttttgatgcgcaaaccgagcgctgggatttttgaaaaaacaagtccggtcgccgccacggtttgcgtacgactccccggaaaccctttgatttcggttttgatgcgcaaaccgagcgccggaatttttgaaaaagcagacccggccggcgccgctgtttgcgtacgactccccagaaaccctttgaattccgttttgatacgcaaaccgtgcgccaggcactttgaaaattccggcccggccgccggaaggttaattagtcggttcttcacaaatatttgtgaagaaccctctttttgacaaaaaaagcaactcgccgcggcaggggcatgccacggcgagttcccattttttcgtcaggatttatcaacaaaactatctatcggagtttttcgcttgatttgccaggagatcgcgaatttccgggattctctacacaatcagttcaattgcactctgaagggtgtgaatctccacatgatctgcgccctcctcatattccccgtccagcgtccagtgagtacccggctcaatgtccacctcgatgtctcgtgcactgaagaattggatgttcggtgcgtccagcgagccgtccagcagcgcccgcaccatttcattcaattcgatgagcgacgccggtgattcaatcagaagcacctccatcattccgtcgttcatatccacatcgaaggtatccagtttcagcagacctcccactgaagtagagttacaaatcgccccgaatatataatctccctcatggatttcctcatttggcgtcccatgatccgtaacgatttttgcgtggattttcttgatgttcacgatgtcccgaatgccctgcagcacgtaagccgtatgacccatgatgttcttcaggttctggggaacgctgtacgaagtactggtgaatgccccaaaagaagccacgtaagaaaagtatcttccgttaaaagaacccacatcgaaggtctgaggttttccggtgagaaccacttctgccgcgtccatgatgctcttcggcagacccacgctggatgcgaagtcattggtacttcccgatggaatgtatccgattcgcaccggggtttccgccgtaatcactccgtcaatcacttcattcaaggtaccgtctccgccggaaacgacgatggtctccacctccgacgcatactgaatggcaaactctctcgcatccccgcttgcctgggtcatcagcaccgaagtataaaaaccggcatcagaatacatctgcagcattcccgctaaataccggaatgcctgcatagttccggatttcggattcataataaacagaatccgatcccgcttcttctctaaatcactcatctaagaatcccctgtctcttctttcaatattttgtttcatctccgtgtaaagctcatccgctttcgcatcgatgatctgttttcttcgaatctcctgctgtttcttttcgatttccttttcgaaaccgtccacataccgcttgctcattttcaccgcaacggaatccagttccgggtaaagcaaatcatccggccgcacgaaaaagttctcatagctctgactggatcctttgagctgtgccttcagatatcctctcatcttcgtcagcgtcagccgatcccgtttcatcacttcatcccaggctttgttaaacatcattccgatgcaaagcacccaggaaatcagataaaaccacagcatcaacgccacgatgttggcgaaggttccgtacaggatgttgtagtgggcaatcttatcgctgtagaccgaatatgccgccgtcacaatcatgatgccgatccaggcaaacagcgcgccgggaagcaggcagcgaatcggaactttaattcgcggaagcaaataataattcatgagaatcatcaggaagaaaagtcccgccgcaattggcaaacgcaatgccaccaaatattcggcaaaccggctgtggtggaagagcgtttgaataatattctcaccgtatacgtagattaccagcgaaaaggcgatggccgcaatcgagataatcgccgtcggaatcgctttcattcgctccgtccagaattcaaaccgataggtaccgtttgtcagcacatgactctccagtcgccccagcgaaaactccaggctggatgcagaccagagggcgacgatcaccatgaccgtattggtgaactgcaccgacgtggcactgaacaaatccatcaccaggctgttcacattggagctcacatgggtctccagccacaccttaatgaaatccagcgatacgtcgaacagacccaacacctgggacaacacgatcagcgtcggcatactcgccatgaaaaagaagtatgcaatctgcgccgcaaatccggtgtaatacgggtcatcgaactgccgccatacatggaatgtgatattcaaaagattctttttggttaatctctctttaacatgaacatttttcacgaatcatatcctcaagtttctccagcgctcgagctcgatggctgatccggtttttctcttccggtgccatttccgcaaaagaacgattctctccttccggaaggaacagcgggtcgtacccgaatccctccgttccgtgaagctctgtcagaatcgtccctctgcattccccccgagccaccagctttctcccatccgggaaaagcatggtgataacggacacgaaagccgctccccgtttctcctccggaacaccttccagttccttcagaagctttcgattgttgtcttcgaaagtgcagttctcccccgcaaaacgggcggaataaactccgggagcaccctccagcgcatccacttccaacccgctgtcatccgcaatggtgatagtatgggcctcatccaggattgcctgtgccttgagaagagagttttcttcgaaagtcgttccggtctcttccacctcaaactccggaattcccgcatcgtcccgggaaatggtttccatgccgaacttctccaggattgcctgaatctctttcaattttcctttgtttctggatgccagaattactttttccataatcttccctcctattacgatgcctgaactattcctccagtcccagctcctgctcggccaccttcagcataatcgcgcattcgattcttttacggtggagttcacaccccagttcatatactttatcgatatccccgttggaatgatagttgttggccgaacatccgccggcacagtaccgcttcgcaaagcagtcccgacatttatcccgggtatatacgttatttcccttcagaaacatttcaacgatttccggatgggtgacaccttcgtacacgttgcccatgagcatctcatcgttgcccacgaactggtggcacggatacaggtcgcccgtcggcgttaccgcctgatattccgttcccacgccgcagccggccactctcttgtagatgcacggaccgccggtgaggtcgatggtgtaatggtagaagttgaagccttcacccttctttttccgctccagcatgccttctgccagctcttcgtactgctcgcagaggaacggcacatcctcttcgtggagcgcgtagtccacgtccggagcactgacaaccggctcgatgctggtttccttgaagcccatgtccgccatgtgaagaacgtccttcgcaaaatccttgttgtaagcggtataagttccccgcatgtagtaattctgctggttccgggcatccgccaggcgcttgaacttctcgataattttatcataagttccttccccggattgtgtatgtctcatgaaatcatggacttccttccggccgtccaggctcagaaccacgtttcccatctccttgttgcagaaatcgatgacttcatcatcgatcagcaatccgtttgtggtgagggtaaaattaaatttcttgtcgtatttcttttccagctcgcgaccgtacgccaccagctctttacagacatcccagttcagcagcggttctccgccaaaaaaatccacttccagattcttccggcttccggactgctctaccagataatccagcgcctgctttcccacttccagtggcatgattcccgcttttccgctgtaatctccctttccggcaaagcagtagcggcaatccatgttgcagccgtgggccacgtgaaggcaaatggccttcagcaccgattgctttctcttaatctttgacgccgccacttcgaaaatatcctcggagaagagggttccttccttctgaagctcttccaggtcatccatcacatcccgaatgtcctgctccgtcagattttccgaagcgtactttggcaggatttccttgcagatttcatcaaaatccgcattttcgtacatgccgatgatgtcgtacgccacgtcgtccaccgaatgaacggatccgctgttggcatcgattacaatgttgtatccacctaatttgtactgatgtaccatgttcttaattcactccaattctatgagtctgcaaatagacgaaagcgacctgtcaggagacagaccgccctaaatgtcagcaaaaagcgctgcgaaccgcagcgcttcacaattaattttccttgcactgttcgcaatgctgatttgctacgctgcaagaagtcttacttgcagactggcaagaagtctggcattcgccacaaccaccggtaacagatgatttctctaagtttcttgtggaaattgtcttgattcttttcattgtcttttcctcctatagtttcatttcagaataacaaaacatcgacgttttgtcaaattattttcattccgtcaggtcctcctgagcggaattaccgtcatcttttcgtatctggtaatggaacaccgcttccgtcttcatgttccggttcaccacgcgaatccggtcaatgacatcgccgtttccggcgttcaccggtatttccatcgtctcgccggtggagatatcggtgatttcttcatctccgttttccggcggaagatcccactcccgggtctccggattgtaggatcgatgaaggaaccgcacccggccccgggttacatgaatccggtagatgacatctccttctacgctcggcagcaggcattcgctctgcttcaggctgagtgcaccgcggagattcaccgtgctctccacgttccggtagatcattccccgatactcttctttcatattccgagcccgttcctgcaccaccagcacgttgcatccggcgtgtcggataatataggaagcggtcatgccgatggtattgctgtggttcaccttcgtggatttcatgatgacgatcatgctggcgccgatttcctgagcacactccacgattcgctgccccggttttccgatggcggtttttcgaacgacggaatatcgctccagattctttgcgatgatttccagctgggaatccagctcatcctgaatctgttggatggcctccttatccgtaatcatcatcaggttctcgtgcaccatcatcagcacgatttcgaaagccttcggagagaaggtggtcttaatgtgctccagtgcaatcaagctctttggcgatccatcgattggaacaagaatcctattcatgttctgcctcctaattctttcctatttcacaaacccgttcagcgaggtgataagttcctgcagaatcatataccacagcaggtactcgttatccaagctgcagattacatcgttttcgattaatccggtggattcaaagcgaattcgcggcgaagatgccatcaccgctttccgctctccgttcagggtcagaatataattcataccgatattgccccggcgaaccgcccggaaggattccaggcggaactgaccgtcggggccatccaaatagaacgcatcgttgttcgacgacttatcgtaatatacggtaccgtatttttctccggagattcgcacttcgaatccatcggtccgtttcttcttatctcccgtcaccgttgccacttcatttccgtccatatcgtagatgataatggacagcggttcgaacaccacggaggtgcgggcatagcagttctcgtccatatcccgaacggtggtatccgtactgttgtaatgatacagcgtgtacacgtccagggactccggcatttcatcggatccggacatctgagctttcagcagttcggccaaatcgtccatcaacacggcggtcatcaccttgtcgcctgcaaaagccgaataccgcttcggcgtaaccgccagattctccgtatccagaagctgatcgaaacgccactgttccgattccggcacagccaaatgatccgtatcggttccggataccaaacggatttccttttcgtcggcggttatcaagatgtaatccttgaacagggccggtccgaaaacaatgcatttttcgttattttcttttttcgaccccatccagcaagtccccagtggcgtctccaaagatcccagacgtttgcagatttcttccaaggtccagccggccgtgttctgcaccttcttatcgtacaggtttcgatgattgaagtccccgcctccagtattcatgtggatagccagtgccgccagaatggcaatgccgctgtacgtccactttcctaccgagaaaaacaggatggccagcaggattaccagtgccgtaaatattctgataagtttgtctttattcattctaactccgatatcttacttttcttcttcttctgcgtgagcctgcttcagcagctcctctttcctgctcatgatgtgactgtactctctcaatgccaccatggcattgactgcctgctccatggtggagaaggccggaattccgtgatctctcagcttcatgattgcttcacggcactcgtttccgccctggcactccatgatgaacggtttacccagcgtcttgtattgtttgtgaatttcgatgaccgtatccgtaatcgcttccacgtcggtaacagcggtcgggcatacggaaatcacgattccgtccacattttcatcccgatatgcggtacgcagcgcgccgccgtacatctcggatgttgcggtaccgctgatgtctaccggattcagcggagagccgaaggacggcatgtatttccgaatggcgctgcgcaggttctgagagatttctttcagttccttcagcggcattcccaggcgttcaaagtgatcgcaggccagcagtccggctccgccgccgttggtaatcattaccacgttgtctccgcgaagcggtgggcacattcccagcgccaaagaggtgtccaggaattcctgccaggtttcttctctcattacgccggattccaggaacagctgatcgtattccgcattgttatgtccggtattgtcggaagcggtgtgggcaaatgctgcttttacaccgattttcgatgagccaaccttgataacggtgatcggcttctcgcactccaggcatgctttcttgaatgcttccgggctgtccagagcttcgatgtatacggcgatgcacttggtgtgctcttcctgctctgcatacttaatgacttcactgaagtccacatctgccttgttgcccaggccgacgaacatgctgatgccgaagtggtccagctgggaagaacccagtgccgccagaaggttggaaccggactgagaaatcagggcaaccggtcccttgttcggcagatacggtacgaaaccgcagttatagttgtgatacggagttccgatacctaccaggttcggtccgatcagaggcaatccattctctctgcagtactcggtaatctcgttctgcaggttcttatttccgatttctccgaatccggaggaagaaaccacggcgattttcaccttcttctccacacactgttccagagcttcgaaaacgcccgttgccggaagggaaacaaatgccaaatccacgtcatccggaacatccagaatggatttgtatgccggcaggccggcaacttccgtcgccttcacgttaatcggatagataattccttcatacccgcatcggcgcaggccctgaatgaccttaaagcctacttttttctcattccggctcgcgccgattaccgctacggacttcggtttgaatgcgtaattgagtcgatcaattacatattgtcttgcctctttgatttccatttcctatatctcctttcagaaacaagttacaataatgtattaaagagatgccatataagtcatggtgcgaatcagctgactcacataactcatctcattgtcataccaggaaaccactctaacctcatagatatttgtaccgcaccgctgcgccaatgtctgggtcgcatcgaacagagaaccgtaactcatgccgattacatcggtggatacaatttcatcctcattataaccaaaagattcattttgctctgccttcatggccgcgttgattccttccaccgtcacgctgtccgtcgggtctttcagcgttgcgtccagaatggtgatggagccggttgctaccggaacacgctgtgccgaaccgattagttttcccgccagctccggaatgacgtttccgatggcctgcgccgcaccggttgtcgtcggtacgatgttaattgccgccgcacgggatctccggaatttgtcccctttgtccggtgcatccagaattttttgattgccggtatacgcgtgaattgtggtcataaagccggttctcacctcgcggtaatcgttcaatgcttttgccatcggcgccaggcagttggtggtgcaggacgcaccggaaacgattcgatcctccggcgtcagggtttcgtgattgaccccgtagacaatggtcttcatatcatttcccgcaggagcggaaatcagcacctttcctgcaccggcgtccagatgcgcctgagcttttgccttcgatgtatagaagccggtgcactccagtaccaaatcgatgttcagttccttccacggaaggttcgaagcatccggctccttataaatcgtgatttcttttccgtccacaaccaggctgttctccgtgctgtccacctgatgccccaaatacgccccctgtacactatcgtatttgagcagatacgccagcatcgacggagatgccaaatcgttaatcgctacaacttcaaagttctccagttccatagctttacggaaagccagtcggccgattcggccaaatccattaattgctaatcgaatcatagtgtcgcccctttttaatgtaaactatccaagcaatatgaatcaaaatattaaattgtcttattcaaacgggaaggtaatgtcgattccaaattcgtcccgcacttcgatgaactccttctgaaccgcttcgctcatcggaacacccttgtccgcacggtattccttcataatccattccttctcgcccgccgtatagatgcggtcctcacccggtgctttctgcgaatttctcagcgcacggagaatgtctccgcaggtcttctcaaaggcttcccgacccatgaatgcttccggatcgattaccacgaagaagtgtcccagatgatatggcttcaatccgccgttttcgtcatagcaggtcaggctcttcaggaaattgccctgtgccagcgccgccgacaggatttcaatggctgccgcgtagctgtagcccttgtatccggccatctcctcgccgatgccgcccaaaggtgccagtgccgcatctccggtggtcagtgccttcaggatgtaagaagtatcggtcagtgcggaaccgtctctcccgataaccatgcccgccggtgtatcctttccgatgtgctcgtagtattccagcttgcctctctgagtgatggaggttgccgcatcgatcaggaacggatacttctcatcgctgggaagaccgatggtcagcgggttggtacccatcatgttctccacgccgaacgtcggtgcgatagacggacgcgcattggtaccggtgataccgatcatgccctgatccgtcgccatggaagcccaatatccggcgattccgtagtgagaagaattgcggacagccacgcaggcggttccgtacttcttcgccttctcgatggccatatccatagcctgcttgctggctaccattcccattccgtcattggcatccagcacggcggtggtcggagattctctcagaatatcaatcttcgtcaccggattcagaattcccttcttaatacggtccacgtaaatcggcttgaatcgattcactccgtggctctcaattccccggcgatcgctctccatcaggacatcggcacagatcttcgcatcctcttccggcacgcccagcttcatgaaagcctgcgtcataaaagaacctgccatgtcccaagacatatacggtcttgtctcagttatcatacgttcctccttttattctctcgtccatcccggataatccccccggtccgtgactatttgatatccaatatatttcatccgattctccaggcaggcgtgacattccgccgcctcctccccggtacagatctttccgtcgtacagaaggtactttccccgcacctccttcggcgaaaggctcggcatgatgacattcgctccggcttccacgcccatctcgcgcccccttgggtcaatggttccaagcgccgtggtggcgggtaaaagcacgttcggaaacatcaaacggagtatgctcaagcagtacaaggtcatctccagggttccgtccggacaatcccgaaacggcgtgtcctgatgatggatgaacggcccgatgccgatcatgtgcggcttcagctccgccagatacagaaaatcctgcgccagatgttccaccgtctgtcccggcgctcccaccatgaatccggctcccacctggaacccgatatccttcaagtcccgcaagcaccgcatccggttggccagcgtcaattctttcggatggagcttctcgtacagcgcctccgatgccgtctcatgacgaagcagatatcgctccgctccggcccggtagaacgattcgtagctttcccggctccgctcccccaccgaaagggtgatggcgcagtccggaaactccgtccgaatgctcttcacgatatcgcaaatcgtctcatcgctgaaccccatatcctcgccgctctgaagcacgaacgtccggaaaccgaacccatatccggctctgcaacaagccagaatttcttccttcgtcagacgataccgatccgccttggcattgcttcggcgaatcccgcaatacaagcaatcgttccgacaataatttgagaattcaatcaatccccgcacgtaaatccgattgccgaacaccttctgcgccccttcctgtgccagctttctcatgaactccgcatcctccgggttccgctgttccagaagctccacatattccgtcgccgtcaaaatgtgattttcgtgcaatttatctatcaatggctgtaattttcccatattgctacctctaccgctccattttatcatacatgcattccatctccaatacatgggatgaaaaattgaacattcgagacaaatcgtttatattttttatgaaatatcacaacaggtccggacgcttccgcaatccgaacctgtttttttatagtttatgaatgagatatttcgtaaaaatactatacgatttcgccggcattggcgcgcgcctgttcttccggcgtcatctttgcaacggtgattccgaagaatgccattacgaagcatacgagcggcatcatgtagttgaacactgcccatggcagatactgtgcagtggttacacccagcgtggtggcaatgaacattccgcaggtgttccacggaacgagacaggatgtaaccgttccggcagattccagtgcgttggacaatgtcttcgggtgcaggccttccctccggtatgccggtgcatacattctgcccggaaccaggatggagatgtactgttccggcatcacgatattggacaggaagcaggtgagttccgttacgcccaccagacccgctgcactgtgaattttcttgataatcgcttcgattactaccgccagctgtccggtaccttccatgattcctccgaacatcatagcgataacggtcatcagaatggaagaagccatgttcatcaggcctccggtggtcagcaggctgttcagcgcatccacttccgtcttgcagaagaagccgtttctgccaacactcagaatatcaccaaaggtaacgccggtgtgcaggtattgcagtgagtcactgaaaatcttcagatttccctggaaaatcggtgccatcaccgctgcggaaagcagtcccaacgtgattcccggaatggccggaatcttcaatgcaatggccagaattaccaccagcggcggcagaagcaatatcggattgatgttgaaattatttttaagtccttccatcagcatctgtgcctgggaggtatctgcggttcctccggatgcaaatcggaatccgataaatccgaagaataccagtgcgattgcataggtgaacagagtggaacgaagcatgaacttcacgtgagtgaacacgtccgttccggccattgcaggcgccaggttcgtggtatcggacagcggcgacatcttatcgccgaaatacgctccggccagaatcgctccggcagtcggtcccaccggcattcccagcccgtgaccgattcccatcagtgcaagacccatggttcccatggttccccaggaagtacccgttgccagagaagtgatggaacaaatcagcaccgccgcaatcaggaagatggacgggcggagcaatgtcagaccgtaataaatcatggtcggaatggttccggacaacagccatacaccaatcatcattccaacgattgccagaattaagatggactgcatggctttggaaattccatccaccatcatatgttcgatttcactccagctaaatcccaaggagagggatacaattgccgcaataatcactccaataaacatcggaatatggggatctacgccaaatttcacaatacctacagacatcacaataacgagtcctagaaatgagataattgcatggtaaagtttcaccggttttttctctcgttcagcagtaaatatattcatataatcgttcctccgttctacggattgccagccagcctcgtttttctcaactgccaacatacactaaaactaatattgctattattataacacactgtttctttttattatatagatttatttgtaaattttgtgagattttctattgcgttttttttcaagaaaacatataataagttgagagtttaataagctagtactctggggtaaacaaaaggatgaggacctatgaagacaatagcagacaacattaaggcattaaggaagaattattccttaacacaaggacagctcggggaaattgctggtgtaacggataaggcagtctcaacctgggaaaatggtgtagccgttccacggatggccgtagcaagaagaatttcggaacattttggcatcagtctttctgaaattttggaagaaagcgatgaagcagcaaaatacgatgttgatccgaaggcactggcccttgcaaagacaattgagcagaacccgtcactcaagcaagcgttgcatgcattgcagaaacgaccggaaaccattccggttgttcagaaaatcggcatgctcacttccgacgaaatcgtaatgctgaaccagcttctcagccggttctacagcgtacgcacaaagaagtaaacatttccggtggtaggattgtgaaatagaaaaagcaactcattttagcgagttgcttttttgctttttggtatttccggcgggcgcacagcacctattccgcaagctcccgtatgtgggcccgggtctcccgcttgtaggcttccacgcccggctggtcgaaaggacacacctccgccagcagcgccgacacggcacactgcacttcgaagaaatacatcagcattcccacgtagtacgaatcctgactcggcatagaaatctcgatgaccggaatccccgccttcacgtgggcatcgaagacgccccgctccgcgcatttattgatctggttcagggttttgcccaccaggtaatccagtgccgtttccggaatcgggtaatccatggccgcgccggttccctcttctgagagggtgaacagcgtttcgaagaagcaaggatgaccctgctgcaggaactggcccatggaatggagatcccggctgaatattaaagtgtacggaagtattccttttccttcttttccttcactttccccgaagagctgtttcagccactccccgaagtaattgaaatagggatcgaaagactcaaagacttccacgttccgtccccgagcgtacagttcctgccgggcaatggcatagtccagagcatctccctcaaaagcctctgccttcgccagggcctttccgccgttcaggaattcccgaatggaaatccccgccaccgcaatcggcagcagccctaccggcgagaacacggaataccgtccgccgatgtttttctccaggctgaagcaagaaatgccttcttcttccgccttggtccggagatagttggactcctccccggtaatcacgtaggtgcgggaaacggcttccgacccgtaccgttccttcatccatttttcaaatatgctgtacgcggtcagggtttccatagtggtgccggatttggatatcacgcaaagggacacatcccggtcgccgatccaccgcatgatctccatcacgtagcgagcgctgaaattgtatcctgcgaaaatcacttccatgccggaatccggagactgcagcagatcaatcactgcttttgcccccataaaggatccgccagcccccagaaccagaaaaacctcgctgtttccgcgaatgccatccgccgtctcttccagccggcgaatctcttcttcgctgcaccgcaccgggtaatccacccaaccggtgtactccatttccccggaccacagcgcccgaagtttttctgctgccgcatctcttctattcttaattgcttcttcgtcgactcccgaataattcaggttcacgcgaatatccatccattcatcctttccggttaattctctcgtttcagcatttccattatgccgtcttcaatgcatcggagattggcctccgccttctccatggaatccccctgtgccatcacatagattttaattttcggttccgttccggatggccgaaccgccaggttgcagcggtccgccagctcgtagtagagcacgttggacggttccattccggtggacacctgttcgccggtggcacggtccagaatttcctgtttttcgtaatcccgaatccgaagaaccggaagtccgatttccgtcgggacttcttcgcggattcgatccatccgggcgcgcatcttctcgccagcatcaaatccctcgtactgaacggaagtggtgtgttcccgatagaacccgtatttttcgtagagcgcctgcagtgcctgcaccagattcatattccggtttcggtagtagcaagccatctccgccaccagcatggaggccaccaccgcgtccttgtcccgggcataggtgcccgccaggaagccgatactctcctcgaatccaaagatgaaattatattcgccggtctcccggaactccttgattttctccccaatgaatttaaatccggtgaaaacctcgtgaatggagacgtcgttcatttcgcagattcggttcgccatcggcgtggtgacgatgcttttcaccgccgccgcattctccggcagaattcccttggctttgcggaccgtaatcaagtagtccagcaagagcacaccaatctggtttccggtgagtgcctgatactcctcgccgttccgaaccaccacgccgcagcggtccgcatccggatccgttccgatgatcagctccgaatccttctccttcgccagggcgatggccatcttaaagccctccacattctccgggttcggcgacgccacggtggggaagttcccgtccaccaccatctgctccggcaccggaatgatgtgcttcattccgattcgacgcagtacctccggaaccagccgatatccggccccgtggaatggggtaaaaacaatttcaaaatcatccggcgccgcggccacgaactcccggcccacggactgagccagcaccgcgctcatgtatttttcgtccatctccgcaccgataatggtgagcagccctccggaggccgcttcttccagatcgatgagctgaatatcatcgaaaatatcgatgcgtgccatctcctgagacaccttctcggcatgctccggcggcatctgtgccccatccgcccagtacgccttgtaaccattgaattctttggtgttgtggctggcggtaatgttgatgcccgcgatggaaccggtctcccggatggcaaaagacagctccggggtcggtctcagatcctcgaaaagattcacgtgaattccgttggccatcagcacggacgccgcttcgcaagcgaaggcccgggaattgttccggcagtcgtgggcgatggtcacgccgtctccgatgctctctccgcaattccgaatgatgttggcgaatgcctgagtggcatggcgcaccgtgtacacgttcatgccgttcaagccggcctgcatcacgcctcgcagtcccgccgtaccgaactccagcatggaagtgaatcggctctcgatttcctccggattcccctggatttcccgtaattctttttttgtatcctcatccaccgcgtcgctttccagccagcggtgataattgtccaaataattcattcgttccagatctccttactctgcctgattcgggcagttctaatagttcacaatggtggcggtcaggtttttttccgtcgccacaatcaaggcgcaggaaggtttgctcccgccccgtggattcgtcaggctcccgggatttaacaggtgaatgcccgccacggtctcgttcaccggcacgtgggtgtggccaaaacaaacacaccggcagtcgtactcttccgccagatagcacaggttctgaaggtgccacttgacattctccgtgtgcccgtgggtcaccgcgattcggccggcgggagtttccagcacctgtacctcccgcgtcatctgcccatcgcagtttccatgaacgcaggttaccggcagacccagccgttcccccagtttcagggcatccgtgtagtggtccccgcagtgaatcagggcatcgacggtcatcccttcactcagccgccggtacatctcctctgcccggtcaatcgcgccgtgcgtatcgcttacaactaaaatattcatcaatccgtcccatccttcggaaactccgccgcgctagattcggtgcgtctccagatattcttcataatccatttcttttccgtccagcgctgcgtactccagggtgtcgtccaaagcgtactgcagctttagggaaaagaactcttcccgctcgcacagaaggctcagaaaaatccggtctcccgtccatagctccagcgttccgatttcgtccatgggaacccattccagcactccttcgtcgcagggaattccctcgccgtcaaaagccgtcgcggtgaacaggtgcatgtattccgtcacttcatcgccgtagcagaaggtcaccagcccccggaatcggtactcccgcaaggtgtaccccgtttcctcccgggtctcccggagaatgcattcctccggactctctcctttttcgaaatgacctcccacgccaatccacttgtcgtggttgatatcgttcttcttcgtcacccggtgcagcatcaggtcccgtccccggacctcctgctgaatgtagcacagagtgctcatcgccgtcttcatgggttactcttccgcctcctccgactcttcaagcacgtcgaagaggttgttcatccgctgtttggacagttcgtttcccacaaaaagaatcacgtcgttctcctgaattcgttcgtacggtcccggggaaatcacgtaatccgtgcttcttttgatcgccacgatggtggctccggtctgctgccaaatattcagctcgccgatggatttgcccagatatgcgcagtgctcatcgatgcggatatcgtacggtacgaaagaagcggtggaatggcttcgcttcgtctgccccaccagggttttcagcagcttggacagatggtccagctcctcctgctgccggttcacgcaatccgatatctcccggcgaatctcctgcatggataccgtattctgataccgctccacgaagaggtgggccttctcccgggaagccacataggttccgcttccctggcgaatggtcacgatgcccagatccaccagaatattcaccgctttccgcgccgtctccggagagacgttatagttgctggccagggtggaccgagcgctgattttctccccgatggtgtaccagccgtccgcgattttctgcgccagctccacagcaatctgctgatacctggattcatatatgtattttcgtttttttccgtttgcgtccactttgttgttcttcacatccattacggtcacctcgtttcttcatcccgactagcggatatccggatattcttcaaacagtttcaccgggtcttcgcccgcccggtaacgtttccgcaggttcgccatatgcttcatcaccatcagtttgcggatggtgtttccccggtagcgccgatcggacaccagcagggtgttctccgtcatggccgtggcaacgcccatctcccgcagcgtcagggcgaactgataatcttccataatcggaatctccgggaacatgcccgcttcgtagaacacttcccgcttgataaagagtccctgatcgccgaaaataatgcctttcgccgcccgccggttggaaatcaccttgttggtccacatgaagaagttccggctgcggaaacggattccgaagcagcccgcgtccaccttctccatcaccgagaggatctcttccaccggatgttccggcagctccgcatcgatgtgcaggaagaacagaatgtccccgttggccgcctccgcaccggtattcatctgcattccccggccctttgaactttccaggaaacgaatctttccgccgctctcggcttccgcctctcggagcaccgcccgggttccgtcactgctgccgccgtccacgaagataatctcgcaccggccctccagccgctccagattctccacaaaaggctgcaccagcgccacctcgttgtacacgggaacgatgacggaaatgacatggtgttttttcaagtactccccggaatggcctttcgcactttcccggaagagaagcagatcctcgatggtgtcgatatcccacttctcctccagaaggccgtaacccttccagcttggaatcatctccagtgtatcctgaagcacttccgaatggctgtactcgcccagggaaaaaagcggcttcatcatgcgctcttctccggcccgagctccgatcagccaatatccgccgtcttccgtaggtcccagcacgtaatccttctcccgaagaatggtgaaggaacggttgaaatccactttgtccgcgtacgggacatccgttccgatgaggatgcaccgctcatatcccacggacatggctcggctcagcgcattgtacatccgctcccccagaccgactccttcctgtttgaagaactgcgcccccgggaacagttcccggaacgccccttcgttgggtccgccgccggtatacgccacgaacacatccgcaatggtatccgtcaaggcctccgaaaggtcctgcaggaacgccatgtgcagtccggcacactcctccggcttcaaatagggcatcaatctcgttttggttcttcccgcttccgggattctggtaaaaacaactactgcctgattcatactaatccgattatcctatttcctatctgctgttcttatctcaaaaaaaatataaaaagtcataatgtttcatattattttatcataaacattgcttaatttatatcgattatttgttttctcggtgaccggcaaattcattttttgtgtttgccacagaatcgacatgttgccgtgtgctattataccacagtttgcattattattaatagcataatttaatattttttgtcaaaaaccgttcgctttgtgctataataaatatactttcgtgatattcaaaatatcttcttgtgatattctgcgtatcatttctacttatttatgcaacacaaagacaggaaaaagactatgaaaacatcactcgtaattatggcggcgggtatcggttctcgcttcgggggcggcattaaacagctggaaccggtagataccaacggccacatcattatggattattccatccacgatgccgtcgaagccggctttaacaaaattacttttatcatccgaaaggatatcgaagcggatttccgagaagttatcggaaaccgaatcgaagccgtctgccgaaagtgcagcgtggaagtgcactacgccttccaggatatccgcgatatcccgggagagctgccggaaggccgcaccaaaccttggggtaccggacaggcggtgctggcggccaaagatctgattcgggaacccttcatcgtgatcaacgccgatgactactacggcaaagagggattccgccggattcacgaggccctcacctcggagaacggagagcactgcatggcgggcttcgtgctgaagaacaccctgtcggacaacgggggcgtcacccgaggcatctgccacatgaaggaccattatctcacccggatcaaggaaaccaagaacatccgaaagacgccggagggcgcggaagcggacggcaccgccatcgacatcgactctccggtctccatgaacatgtggggattccggccggagtacctgcagcagctggagcagggcttccgggacttcttccgtaaggaagttcccgagaacccgctgaaatccgagttcctgattcccatccacgtgggcgatcttctggaggcggacgatatttccgtcaaagttctccccaccgacgacacgtggtacggcatgacctataaggaagacgtgccggaagtccggaagagcttcgccaagctgatccgcgacggaatctatacggaagagttgttcgacgatctggcgtaaaatatttttatgattgatatatgaaaggaatcgatatgaagaaattatccatggacaagctcatctccaccgttcaggcccggcgggaggctttggggctgacgaagaaggacctggcggagaagtgcggcatgaaccgaaccatgatcagccatatggagaaccacaactacgtgccttccatcaagcagctgcaggatctggcggaagcgctggagttcgacccgacggatgtttttgcagaggagcatgcggctcatgtaaaagcagaccggaagtacaagattgccgttgcgggcacgggttacgtggggctcagcgtagccaccctgctggcgcagcacaatccggttacctgcgtggacattttggaggaacgggtggacaaaatcaaccgccgggaatccaccattcaggacgattacatcgaggattatctggcccacaaagacctggatatcaccgccaccctggacggagaggaggcgtaccgaaacgcggaatacgtcatcatcgccaccccgaccaactacgacagcaagaagaatttcttcgactgctccgccgtggaagcggtcatcgagctggttctgaaggtgaacccggatgccacgatgatcatcaaatccaccattccggtgggattcaccgcctccgttcgggagaagtaccacaccaaaaacatcattttcagcccggagtttctgcgggagtccaaggcgctgtacgacaacctgtacccttcccgcatcatcgtttcctgcgatgaggacagcaaggaaaaggcccggaccttcgccaccctcctgcagcagggcgccattaaggagaacatcgataccctgttcatgggctttacagaggcagaggcggtaaaactcttcgccaacacctacctggccctgcgggtttcctacttcaacgagctggacacctacgcggagatgaagggcctgagcactcaggaaatcatcaagggcgtgtgcctcgacccacgcatcggcgaccactacaacaacccgtccttcggctacggcggctactgcctgccaaaggacaccaaacagctgctggccaactatgcggatgtgcctcaggagatgatgacggccatcgtggaatccaaccggacccggaaggatttcatcgcggaccaggtgctggagatggccggtgcatacggtgcgaacagcgaatacgatgcggagcacgatgcagagaagaatgttaccatcggtgtataccgactgaccatgaagagcaactcggataacttccgacagtcttccattcagggagttatgaagcgaatcaaggccaagggcgccaacgtgattatctacgagccaaccctggaagacggcaccactttctacggaagcaaagttgtgaacaacctgaaacggttcaaaaacaagtcccacgccatcatcgccaaccgttacgatgaatgcctggacgatgtcgtggagaaggtatatacccgagatattttcaagagagactaaggggggcgaacatgcagaatatcgatcttaccggaaaaacaattctcgtgaccggttccgccggtttcatcggttcgaacctggtgctggagctgctgaagtccgagtcggaagccaccatcatcgggctggataacgtaaacgattattacgatgtaagcatcaaagagtggcggctttcggaaattgaaaaagccgctgccgagagcagttgttcctatcattttatcaagggagatttggcggaccgcgctgtaatcgaccgtctctttgcggactacaagccgacggtcgttgtaaacctcgcagcgcaggcgggcgtaagatattccatcaccaatccggatgcatacattcagagtaacttgattggtttctataatattctggaagcttgccggcatgccgaaccggcggtggaacatctggtatacgcctcctcttcttcggtatacggctccaacaaaaaagtgccgtacagcaccgaagataaggtggacaacccggtttccctctacgcggctacaaagaagagcaatgaactgctggcccatgcctacagcaagctgtataatattccgtctaccggtctccggttcttcaccgtatacggaccggccggacggccggacatggcgtattttggttttaccaataagctgcggaagggcgaaaccattcagattttcaattacggaaactgcaagcgggacttcactttcgtggacgatatcgtggaaggcgtgaagcgcgtgataaaaggtgcgccggagaaagcggtcggtgaggacggactcccgattccgccgtatgcggtgtacaacatcggaaacagcaatccggaaaacctgctggatttcgtgaccatccttcaggaagagctgattcgcgcagaggttcttccggcagactatgatttcgaggctcataaaaaactggtgccgatgcagccgggagatgttccggtgacttatgcggacaccggtgcgctggaacgggactacggcttcaagccgaacaccgacctgagagacggactaagaaagttcgccgagtggtataaagaattctataaggtataaaatagtgaaacgccccgagggttcgtccaatgacgaatcccggggcgttttgcgtgggtgcaattttaccgacagttgcacattatttttatacaatttaagggtcttcactttttcctcggggattgccttttgtataaggtaaacattcttttcttaatgatagacatgagcgtgttggcgtgggcatgcccgcaaacccttggagctccgtcgggtcacgccaacaaccgaatctcattagcaggtacccggcgcaattgtttgcgtgggcatgcccgcaaacctttggaacaccgccggcccacgccaacacgctcagaattttcctggcccgccggcgcctttgttggcgtcgacctccccgcaaacctttggagcaccgtcgggacacgccaacaattgaatctcattagcaagtatccggcgcaaatgttggcgtgggcatgctcgcaaagcctttatcctccgtcgggtcacgccaacaattgaatcacattagcaggtatccggcgcaaatgttggcgtgggcatgctcgcaaagcctttatcctccgtcgggtcacgccaacaattgaatcacattagcaggtatccggcgcaaatgttggcgttgacctccccgcaaacccttggtcctccgtcaggacacgccaacatgctcaggattttcccggcccgccggcgcccaagaatgaaagaacctgcatccggaaagcaatctcagcttgacgatgagcaagagcatgctaggctgggccagccaggctggcacgagcggaggatccgatttaatgtgtggtcgtcgctctacgattgacgatcgcacattatttacatacaatataatgtgcgattgtcaaagtgaggtgagaagtatgaatgccaaagataaaatcgaagaactgctggaagcgtcggagggcggcacgattaccgcagcgcaggtgacgaaagccggactgcatcgcagcattttacaagaacttgttaagaacggtgaaatctaccgcttcgggcgtggtctatatgtacggagcagtgcatgggaggatgatttctacctcttgcagcgcaagtatgggcgcgggatttactcgcacgataccgccctgtatctgctaggctattcagaccataccccggcgaaatatacgatgacctttcccaagggctacaatgcatcgtcattaaagcaggagaacttaaccattaagcgtgttgtgccggaaaactacgacttcggcacaattgaaattgaatccccctccggcaatcctattcgtgtttacgatttagagcgaacactgtgcgatattctgcgtggcagcggcagcgatgtccaggttgtcggagaagcgatgaaacgctatgcagcgtccaaagataagaacattcataaattgagggtcttcactttttcctcggggatggattttttgcacggggaatagacaggaat

SEQ ID NO: 1086 - DNA, 32759 bp, Unknown
  16S sequences of unknown bacteria
atatgtccgacgtatggcactacaatatttataaggtcggatatgatgaatccgcgtcatatcgcaatatgataggtcagacggaaagcagcacttttgaatatgaagtgccgcacaccggcgagttttacatcatcattcagcccgaatcgaatcagggtatttacggcgaaggcttcaaaattaagataaacatagactgatagtaaataagagcggcaggcaaagtcccgtcgctcttgtttttgtgaaaaaggaaaaacatacatttccgaatttatttttttcgggatctgaatatcaatgcaacaagacacccgaaaactatcgccgcgcaaattcccgcggaagccgccgtcagcccgcccgtaaagatgccgagcaggcctttttcgtcaaccgcattttttactccctcggcaagcgcaaaaccaaagcccgtcagcggcacttttgcgcccgctttcgcaaattcggcaaacggtttatatagtcctgccgcaccgaggaaaacgcccgctacaacatatccgacaaggattctcgcgggcgtcagttttgttttgtcgagaagtatctgccctatgacgcacagaagtcctccgaacaaaaaagtccataaataagccattttcaaacgcccctaaatcgtcagccttatcaggtgtgaaatcgcgggaatgctttcgccctgctggtttgttgtcggactcatcagcgcgcccgtcgccgcaacgagaacatttttataaagtcccgcctgcatttgcggtaaaacgtatgccgcaagcacgcttgcgcaacagccgcaacccgaaccgcccgcgtgaacgtcctgattgtcagcatcaaaaatcatcattccgcaatcgagataatttgctccgagagagatattctccctttcgagaagcgttttgacaagttcgtgcccgatacttccaaggtcacccgtcagaataagatcgtaactgtccggcgaggtcttcgtgtctctgaaatacttcttcaacgtgtctgccgccgcaggtgccatagccgcgcccatattgtttatatcgctgatacccatatcaattatcgttccggggcaaaacgccgaaattttaggcatgttcggtatatcttcgtccgtcagcaacaaacagcccgaccccgttaccgtccattgcgccgacggcggacgcaccgagccgtaattgagcgggtaacggtattgcctttccgccgtgcagaaatgactgcttgttattgccacggctcgctttgcaaagctgccgtctatcgtcatcgccgcgattatcgccgcttcaatgaccgtagaacacgctccgtacagtccaaaataaccagccccgcgatcacggctgccgtaagccgaactgacgcactgattgagcagatcacctgcgaaaatgaagtcaacatcttcgtcgcgcaggtttgctttttcgaagacacggttcatcgcctccttttgcatttgcgcttccgctttttcgtatgtctcctgtccgaaatattcgtcgtttgaatacaaatcaaagtatttgccgagcggtccctctttttctttctgcccgactattgcctgccatgcgccgacggtgacagcagacgatggaatataggtgctttttcctgtttttttcatacgccgcagaccaactttacgatatagtatattatcccgtaaacaaccgatgccgccgttccgtaaacaataacgggtcctgctatcgagaatagtttgactcccgtgccgagtatgctgccctcggatttaaattcaagggcgggggagacgaccgcgttcgcaaatcccgttatcggcacaagcgttcccgctcccgctatacgcgccaatttctgataaagcccgatgcccgtgaaaagcgcgcttaaaaacacgagcgtaacgcttgtcaacgtggatgcgtcttccgcggaaaatcccgcaacatttgcgtaaaggtcggtaagcacctgaccgacgctgcatatcgcccctcctataagaaaagcaaaacagcaatccttgaaaatgggcgaattttttgttttgatgtccgtcagccgtgcataatcgtttttgttcaagcctccacatcctttcggaggtattttttctcattttgacgcaaatatactttaattgcataaaggcgcaaaaaaaagaccgcagttttgaactgcggtcaaattatctgcttaatataatcagtttgtaaatcggttttattttgcaaacttggcttttgcttcttcgtcgccgagatcggcagccgccttgtaccacgcttttgcatactgcgtgttttgcgggaacggacgtccctgttcgtatgcaagacctataaaataaatgaatttcggcgcggagggcatatcctcgttcccgtttgcaaacttgttaagtttggaaagcatctttgcaaggtcttttctcgaaatctgtctgccgacaaaatcgtattcttcggtcttcggcatttcttcaaggtctttgagcaagcgtgtaagcaatgttactatcgggtttgttttcggctcgggcttgaaaggacaacccggttttgcgtatacttcttctgctttttgctccgcgattatctttgcgtcgtctccgaaatccgcgtgcatacacttgccgtacagcgggcaaagttcaagtgcacgtttgaaatctttgaaaggcgtgtcccgtgtatatgcatctatcagcgccgcaacgggacgccagccgaattcgttgtaagattcttcttcctgcattttgcgaactatcatttcgccgataaaaatatactcttcaatgtcgcaatcgtttatgtccatatttttcaatgtgttttgaagagaataacgactgcaaacaccgaattttccctcccattggtcagcaccgcacttcgggcaatgacgcgccgaaccgaaatatattcttccgcaatcataacatttctgcatttttccgcaccccttaattccgtaagacacagccacagattttgcggctcgtcctttttggtatatcttattttttcaacggcgtttttattcgtctttcgaacagggaaaccaaaccgttgggaacttcttttgtattcttttatttattatatcacataaaaaaatgaatttcaatatgcgcgcaaacttttttttattaagatttttgcggaagatgctttgtcaataaaaaaaccgtccgcggaatttcgcggacggtttttatgtaaacagttatatcactttgtgattattgctgctttttcttgcctttggatacgacaaccgcaacaactgcgcctattgccgcaaccgcaacaacgatgataacgattatccaccatttgaagccgccgttgttttccgcgggtgcttccgtggttgtcgccgccgaattgtcggtggtcgaattatcggtattatctgttgtgggattttcttcattcagaacaagtcccgcatacgccgcaataagaacttcttttgcagcctttgcttcgtcggaagtatcgtcatccttgaacttcttcgcttcttcaagagccgcgttaagagtcttaacggattcctgtgtgtaaacggaaaggtccgttgcttcgatctgcgcaatgatctcggacagtttttcgctgtcgtctattgccgcagttgtcggattttcgtctccgttatcgggatttgtggtctcgacattgtccggaagtttgccgcttgcgtcagcaaggtatgcggtgttgtacttcttgggctttgtgcagatgttgtttctgttggtgcccgacccgtttgtgtaggtcgcgcttatgttgagaagtttctgatatttctctgcctgtgcggtgggacctttgtctgcaacgaatttggagtggttccaatcgtagtcaacaagaaggaagccgataccgaatgcagtgcctactttgccctcgatctgacctgcgtcaaccttgagagccttgaacggaatgaatgcttcaagagtgtagcccgttacgtcaaaacctctgttttcaaggtctttgcccgtggaagtcttaccgttaagtttaacggcgagtttaacgcccgtgctcttgttcatgtcaacccagcagtaatgctcgaaccatgtcgggccgtcttcggggaagataaggaatccgttacctgatcttgcggtatacggtgcaaacgtataaacctgacattctttgcccgtcagttttgctttgcgcgcgtttgtcgggtcaaagcaaagctgaacgcagtccatggcgttgattacgtttgctccgacaggaaatgcgaaagactgggtcttatctttgatctgccaaaggaaataaagaccgcctttgctgccttccgtccaaactactttaacggttccggtcgcgccattggaagaagtctgcgcccaaccgccgtttttcttaacagcagcgggagagatatctattgtgagcgcgtttttccacgcggcatcacttgcgccgccgtcaacagtgggtgcttttgttgcaagaggaatgttgtacgagggggacgccgcttcggaagcgaagacaaacgtaaacaaactgaatgcaacagcaacaaccataacaaggctgagtattgtttttttcatgtggtttaccacctttctaaaattacaaatataatatagcaaaaaagtgtacgaatgtaaagcctttttgccgataaataacagataaattacacattattcgtttttatggtattttcaacaataaccgaacgaattatttgttgactttgttttctccgtcggtttttgtctttttcgaggaacgttttacaagagccataactatgaatactaaaatcagcgcaaagagtgttcccgatcccgcgacaacgactaccacaatatattctcttgttccgtattccgccgaagtctgcggcacctcggattccggcaacgcttttatcgcgtcgctcaatgcattgtatgcgttctgtatctgacttttgctcggattcgaacttgaaagcagcgcggttgcttcttcaacgtatttgttcacatcagcgagttggtcttccgaatacttgtctttcagattctttgtactgtttatcagttcggtcagcttcgccatttcgtccgttgtgtccgtttgctgtgaggacgaatcaaggtcgtaacgcagcttcagtcctcgtatggccgcgataagcgcatctttgacttcttcctctgtttttgaggattttccgtttatgtaatcttttgcttcctgaaatgccttgctgtaaatttcccatgtttcgggggtgtaatccgcgttgttgagttgatcgtccttttttaatatctcttcaagcgtttcattgggcgtggcaaccacgtcgtcgggcttttccgtcgaattgtcatctgtttccgatgtcgtggcacccgaaaaatcagccaaaataattgtattgtaatttctcggatatgcgcagatgttctcgtttgtggttctcgttccgttagaaaagtctgttgtaacgtttacaatctcctgatattcggacacgtctttgagccgcttgttgtcgtaatcttccgtgtatgccgcatagtcaaagtcgtaatcgacaagcaaaaagccaatgcccatttttgtgcctatctttgcttcgggtctgcccgtcagtatcgtcagcgctttccatggcagatatgcctcgatatcgtagcccttcacgaaccatctgcgtccgccgtcctcgtccttttctgcgttgagctttgaagaaacgcgaaccccgagcgactcatttcttcccacccagtatatatgctcgtaccacgtcgcgccgtcttcggggtatacctcaaacccgtttccggatctggatgtataagggtcgaacgtatatatcattaccgaatctcttgctttcgctctgcgctgatacatcggatcgataacaagctgaaccgaatccatcgcgttggggtacggcgaatccttgtcaagcgcaaacgactgcgtctcgtccgtgacgctccacgagatatagagtccgccgtgcgttttgtcgtcgctccataaaagctttactgtcgcttttgcgtcgcttgccccaaacgggttcatcgcccatccgtttgccgcctttgcgttcagggaatcaagttctattgtcagagcatcattccattcgctttcggttatgttgccgtctatcgtcggaacggtttttgctttcggacaatagtatacgtttgatttcgccgcggaagaaccgaacgcaaacagcgataaaacagttgccgcacatattataaatgcagatatctttcgcaaaacaaagactccttaatgttttcttatatatattttatcagaaaaagcgtccgatgtaaataggcaataagtacatcggacaaacaaatcggttatatttttttgaacaatcggttacggtatagtgcaatttgcacataccgccggttcgtcttttttgtttcggaattattccgtttttattgtatgtcaagcccaaaacttaccgaaagcgcatgatccacctcgttcattgccgttgtgtcgagatgtcccattttttcgcgcagtcttcgcttgtcgagcgttctgacctgctccaaaagaataacggagtctctgctgagtccgtagtccgccgcatcgacccttatatgcgtcggaagttccgtcttgccgagctttgaagttatcgccgccgcgatgaccgtcggactgtgcttgttgccgaggtcgttctgcactatcaaaaccggtcggacgccgccttgctccgagccgacaacggggctgaggtccgcataatatatgtccccgcgttttatctgcgtcaagttttttcactctccctccgtgttgttttcaacactatttttgcacattgtactccgatttaaacatctttattatataatatgtttttttctttttcggagttctgcttttgaacgaagtctgccgtaaaaaggaaagagtaaatccatcgtgacacgaaaatccgtttttgcatagtatgaaactgaggacggcggaaaacgcctgccgaccgaaaaatacataaggaggtcaatggaatgttccgcaataattattatttctggacgcttataatcgcggcgcttataattttctgcgtcaactccgacagctgcggctgcaatacctgcaattcctgcaacgattcctgctgctgaaaccgaaaaaggacattgcccgaagatactgtcttcgggcaatgtccttttatgaatgttgtttgattcaaaacgggttttcttctatcgacatattcgcgtaagcgttcaatgtctcgtccgccgtgtgacccgcaagaaattcataatatccttgtgaggctatcattgcggcgttgtctccgcagtagcgcaggtccggcatgaaaagttgaactcctttttctttacattctttttcgagacgttttctcaacgttccgtttgcggcaacacctcccgcaagcacaagttttttgttgaaccgcgccgccgcctttgtcgcgttgtccgccagcacttccgtgaccgccgccgaaaacgaagccgccacatcgggaatgtttatttccgttcccgtctgctgtgcgttgtgaacataatttattaccgcggtttttatgccgctgaaactgaaatcgaactcgttgtccgcaaagtgtgtgcggggaaatcttatcgcgctcggatttcctgtcgccgccgctttttcgactttcggacctcccggataaccgagcccgataactcttgcaactttgtcaaaactctctcccgccgcatcgtcgcgtgttttgcccactaccgtgaaagtggtgtgatttcccacattgactatatgagagtgaccgccggagaccaccaacgcggtgaacggtggagtaagagtggggtctgtcagataattcgcggcgatatgcccccttaaatggtgaacgggaacaagcggcttgcctgcggcgaaagcaaggctcttgccgaagttgactccgaccagcaacgcaccgataagtccgggtgcgtaagtgacagcaacggcgtcgatgttttgaatgccgccgacgggttcaagcgctttgcgcacaagcgaggaaatcgcctcgacatggcagcgcgatgcgatctcgggcacaacgccgccgtaaagcgtatgtatgtctatctgcgaaacaacttcgttcgagatgacttttgttccgttttcaacgactgccgcagccgtttcgtcgcatgaactctcaattcccaagacaagcatttttctgtaactccgttatcatttccagcccgtcttcaacgggcttatcgtatagtttttttcttgttccgaccgctgtgaaaccgagtttttcatacagcgcctttgccgcattgtttgatactctgacttcgagcgatacagtttcgattccttcgttctttttctccgagagaatgtgtttcagcaattcggttgcatagccttttcttttttcggaggacgcgaccgaatttatctgcatttcgggaaaaactcctgccgttgcaacatggcagacgactttttcgtctttttcgtaaacataaagtccgaaatgcggggaagaaagcgaggattttatgcagctttcgctcatcggctccgaaaaattttccgcttcggtttttgcgacctgttttatcgcggggtcgtttgcgtccgttattcttcgagtccgagtctctttttcagacattcgtttatcctttcggcacatttttcatagacttcttcatctccgccgtatgggtcgggaacgtcttttccgtcggggtcgaacaattccgctttttccgaaagctcggggcggctgtgtatgagcagttttaagtgatctgtcgtcatcgcatatattttgtcggcttcggaaacggctttgagcgtaagcggcgtcgatatatgcgcgtcaagtgttgctccgtatttttcgaccgcgcgttttgcgttttcgctcgcgggagaatgtccgtccgcgaacagtcctgcgctgtcaacttcaaactcaagcccgttgtcttttatcatcttttccgcaagcgcctgtgccatcgcgcttcggcaggtgttgcccgtgcaaacaaagagcagtttcatttttacatctccgattattttgattcgtaccacgttttgcccgcgtttacgtccgcaagcaggggaacggaaaggtttgccgcgtgttccatttcgtatttgagcatttcgcttatttctttttccttttcgacaggcgcttctataatgagttcgtcgtgaatctgcaatataagccgagcgcccgtgcctgatttttcaagcctgtcaaagacgcgtaccatcgcaagttttatcaggtcggcggctgtgccctgtatcggcgtgtttctgcatacgcgggaagcgaatgcctgcaactgtttgttcttcgcgtttatgtcgggaacgtatctgcgccttgcaaacatcgtttcgacatagcctttttcttttgcgctttcgatgattccgtccatatatttcttgacgccgctgtatgtgcggaaatagttctcgatatagtttttggcttctctgaacgatactccgatatcctgagaaagcgaatattcgccgataccgtaaactatgccgaaattgaccgcctttgcgcgtctgcggagttcgggcgtcaccattgcttcgggcagtccgaacacctgcgccgccgttgccgtgtgaatgtccctgtcttcgataaacgcacgtttcatgttttcatcgtctgcaatgtgcgcaagcacacgcagttctatctgcgaatagtctgcgtcaatgagcgtgcatctctctcttgcctcaaacgcttttcgcagttgtctgccgagttccgttctgacgggaatattctgcaagttcggttcggtcgaacttattcttcccgtttgcgtgaccgtctgcgtgaataccgtgtgtattcttccgtcttcgccgacttttttaagcagaccgtcaatatatgtggatttcagtttcgaaagttttctgtattctataacgttgtcgattatggggtcttcgcaggcgtcacgaactttttcgagaatgtcgtttgccgtcgaataacccgtttttgtctttttgcctttcgggtagggcagacacatctcgtcaaacagcaccgcggcaagttgctttgttgaattgatgttgaactcgtgtcccgcataaagatatatcgccgccgtgcagtccgctatctccatgtcgagtttttcgccgaaatttttcaggaactccgtgttcactttaaaaccgtcatgctccatatttgcaagcacggtgcagagcggaagttcaatatctctgtaaagtgcggtttgtccgttttgttcaagtcttgtttcgaggtatccctccgcttcgggcaggtaataacactgttccgcaggcgtgagcgcagataccgaggaactttcctcgattatctgcgaaagcgggtattcggaactcgatggatcgagaatgtagcccgcaagcatcgtgtcaaattcaagcgttgccgaaacgcctgccgtcagcatctttttgagaagcggttttgcgtcgtgcgtgactatttttttgccgtccatcgctttcagtgtattttcgttaagttcaagcaaagaaacgccgtcttttgtcctgaccgcaatcatatctccgttgcagacaacgaaaagcctttcgtccgcaagacaggttgtgtccgaaaccgcagaaacctcgacttccgacgcttttgtttccttttttgcgtcggagacggacggcgcggtgctttcgtccaaaccgtacagtttgattattcttttaaggtcatattttcggagcagggaaagaaactcgctctcgttcatcttcggggggagtatgtctttttccgtgatgtcaagcaagtcgctttttctgattattcgaccgagttctcttgacatgaaagcgctgtcttttccgttttcgagttttgttttcagcgcgcctttgatttcttcgatgttttcgtaaacgccttcaagcgttccgtatttttcaagaagagttactgcggttttttctcctacgcccgcaacgcccggtatattgtccgaagagtcgcccatgagcgctttgaggtctatgagttggctgacatcaagcccgtatttggctttgatctcggcaggagtgtatatctcgtcctgcgttccgccctgctttgtcgttgcaagttttacggtcacgttctcgtccgtcaactggaacgcatcgcggtcgcccgttatgataacgcacttttctccgtcgtccgaacattcgcggctgagtattcctataatatcgtccgcttcaagcccctcgcgctctattcttacgactccgagcgcgtccagcatttgttttattatgggaaactgttctctcagttcttcgggcatgggcttgcgccccgccttgtaatccttgaacattttgtgcctgtaagtcggcgctttcaaatcgaaagccgcagcgacacgacactcttcctcttcttttaaatgcctgtgaagcgtagtcagaaaaccgtaaagcgcgttggtgttgacgccctgtgagttggtgagcgttcttatgccgtaaaacgcacggttcattatgctgttgccgtcgatgacgagaagtttcatggtgtttcctcttataaattgattatattatatattaacattattatctgctcttgtcaaggaaatatttacaaacaaatacgtttgtcacaaaagcgcggacgaaagcgttttcgtctctgtcataattgtgtatgcacactttattcggacttaaatcaccccgttttggggcggttcaaatgtttccgcgccgagtggggcgcggttttgggcgatttgtgggggattgggaggtgttttggcacaaaatggggcgcaatcccataaaagtttgtaaaaaatatacaatatcacatattaatatcacgatatatttggcgagaaattttgttaaaccccttgcaaaagcgaacgatttatattataatattgtcaagtggagcgaaagtggagaaaaaaagattgaaagtacatcacgctcccaagaaattttgtggaaacggaggcaggacaatatgctttgcatcggcagattcggtttgatcggcagttacaaccacacaatagactcgaaaaacagattgttcctgcccgcaaaacagagagattatctcggttccaccgttatcctcacaagaggtcttcgcaactgtctttatatgtataccgcggagggctgggaaaacttcatctccaagatagacaacgacaacgattttgagtccaacgacgaaacgttgtacttcctcggtaacgcgcaggaagcagatgtcgattcgcagggaagaataacggttcctcagacgctgcgttctttcttcggaataggcaaggacgtcaccatcgtcggtgcgggacaaagacttgaaatatggaagaccgaggactgggaagagttcaacaacgacaaggatctcggaaacagaatccgagaaaaactcaaagaaaagaagtcgtcgaacaatgagtaattttgaacatatcccggtattattcaatcagactatcgacggtctcgctgtcaagccgaacggagtttatgcggacggtaccgcgggcggaggaaatcattcccgagccatcggagaacgcttgtccgataaaggaaggctgatatgcgttgatcgagatacagaggctatcggagcgtgcagagaaaaactcgcggggttgaaatgcggtttgaccctcttgcacacggacttcgcaaagttgcccgaatatctgcgggaaaacggaataatgcttgacggactgctggtggatctcggcgtttcgtcgcatcaactcgataccgcggaacgaggattctcgtatatggctgatgcagagcttgatatgagaatgaacagggacgacgattttacggcgaagacgcttgtgaatacttattcaaaagaagatatggagagaatcttctttgaatacggtgaagaaagatactcacgctccgtggcttcggcaattatcgaatacagaaaacataagcctattgaaacgacacttgaacttgtcgatattataaaaagcgcaatgcccgcaagggcacttcgcgaaaagcaacatcccgcaaaacgtgtttttcaggctataagaatagaagtcaacgacgaactgaaacagataagcaacttgcttgacggtataatgccgcagatgaaaagcggcggcagagtttgcgttataacgtttcacagtcttgaagacagaatagtaaagaccgcttttgcaaaggcgcagaacccctgcacctgcccgccggatttcccggtttgcgtatgcggcaaaaaaccgctcggaaaggcgttgaagccgataaccccgacggaagaagagataagagaaaatccgagagcccgctcatcgaggctcagaatatttataaaggaatagggtggacaaggcaatgaagaagagaacgggaaaagagacttccaaaaagagtttcggcgcgtttgaaatactttcttgcatcgcaatagtcgcattgatgataatcagcgttaactgctatattaaaaaatatgaaataaactatcgcacggaagttcttgaaaaagaatacgacaaagcgtataacgagggcgaaagacttaaagtcgaatatcaaaaacgcaccgattacaacggcgtttcagagtatgcggagaccgttctcggaatgaaaaagataaacgattatcagattatatacatgcccgcaacggagacagacgagatgagagttgtttcttccggtgaaagttttgcggacaagatttcgaagacattctccatcgttcttgaatatttgaagtaaacttcgcatagataatagggagaaacttcctcggaatatgtgacgggaattaaactatgtcaagaccaaagtcgaacagtaaaaacagatatgcggttgtcagggtaatagcaatgattgccctgatttgccttattggaagacttttttacattcagataataaaacattccaaatatgagcagatagccgtttcacagcagacgcaggatatcgccattgaggcgaagcgcggcacgataacggacagggacggaaacatacttgcgataagcgcgaccgcttacaaggtcgtaatggctccgaaactgatagacagcgaagacctgcgcgaaaagatatgcgacggcttgtcttccgcactttccgaagacagagacaagatatatgaaatgacgctcaaaaatgttcagagcgtcgaggttgtgcgccgcgtggaaaaagacattgcggataaggtcagcgactttatatccgaagacaaggattatgcggcgataataaccgttaccgaagacccgaagagatattatccgaacggaaacacgctttcgacggttctcggtcttgtgggtgccgacaaccaaggacttgaaggtcttgaatatctttacgacgattatctgacgggcacggcgggaaaacttgttgcaaccaaaacttcgataggaacgtcgatgccgttttcctatgagcgtcaggtagacccgaaagacggatgcacggtagaacttaccgtggacctgaaaatgcaggcgatgctcgaatcggagataaataacgcaagagttgagcacaacgttcagaacagaatagcgggcgtaatcatggacgtcaacacgggtgaaatacttgcgatgacgtcgaaacccgacttcgacccgaacgagaactatgttataaacgacgaactcacgcttgaagcgcttgcggctgaatttgaggtcggaagcaccgaatattacaaggcttataacgaaaaatttgcggaatataaaaagaacaaatgtcttgaagcatacgaacccggttcgacattcaagatatttacggcttctatggcgcttgaagaaaacctcgtcagccttgaagaaacgttcttttgcagcgggcatctcgatataggacctacccgcgtcaactgccacaagagaacaggtcacggttcagaacatcttaaagagggacttgcaaattcctgtaaccccgtatttatgacgctcggtatgcgcataggacaggaaaaattctatgattatctgaccgttttcggactcagagacaaaacgggtgtggggcttcccggtgagcagaccggttatcaccactctctgaaaaccatgacaacgcttgaccttgcggaatccgcgttcggtcagacgttcaaaataacgccgatgcaacttataagcggcgtttgctccgttattaacggcggaaattatatgcagccatatattgtccgcagcataacggattcggacggaaatacggtcgtttcaaacaaacctaccgttgtccgccagaccgtttccgacgaaacgtccgcaataatgcgcgaataccttgaatttacggctgattcttccgaaaagtcccacgttgacggctaccgcataggcggaaagaccggtacatcgcagaaactcgacacaagagtaggacaggaggacaacgacaagcgtattgcttcgtatgtttgcttcgctcccgcagacgacccgcagatagcggttctcgttgtcgtagacgaacccgattccgaggttcagtacggttcttatatcgccgcacctctcggaacatccataatagtgcaggctcttaatcaactcggaatttattcgaccgccgaaaacgcggacagaacaactgttccgtatgtgggagaaatgacggttgacgaagcgtccaaaaagatagtcgcggacggcttgcaggttaaagttgtcggcaaaggcgagacggttgtatctcaacttcccgccgccaatacaacaatttccgtaggcagtacggtgttgctttataccgaagagggtgaacacgaaacaacgacggtcgttccgaatcttgaaggaaaaacgcctgcggaatgcaatcaactgctgacaaacagcgaactgaatatcgaaattctcggaagcaatgagtccgtcactccgataacgggttcgggcgtcgttgcatattatcaaagcatatctcccggtgagaccgtcgaaaagatgacgacggttcaggtcagattcaaaaaggtcgcaaaaagcggctgatgtttgggcagagtatgctcaacccaaaataacggaaagtgaaaaaaaataacttgaaaggttgtttttgaatgaaactttccgaactcctgaaaaacggtgaatttacgggcagatttgcccccgagacagagataacaaatgtctgctcccatcttgacagctgcacggacggcagtcttttcgttgccgtcagcggcagcagatttgacggtgccgcgcacatcagcgaagcgttttcaaagggtgcaaaagccgttgtgacggaaaagagcattgtcggagacaatgttttgcgctgtgaaaacgcattatccgcgcttgctggtatatgtgcggctgaaaacggcgatcctcaaaaagaactgacgcttgtcggtctgacgggtacaaacggaaaaacaagtacttcgtatatactttctcatatattgaacggcgtcggcataaagaccgaggtcatcggttccgtaaactttgaaaacaccacgcctgaaccgaatattctttattccgcatttcgtcgtatgaaagaggacagaacaaaagctgtcgtatgcgaaatatcatcacaggggcttgaccaacgcagggtagacccgtgccgttttcgcgtgggtgagtttctcaatttcggcagagaccatctcgattatcataaaacggtaacggcgtatttcgaaagcaagaaaaggttgaaagacctatctgatatatttattgtaaacggcgacgaccgctacgcctcgtctcttgtttccgacggggtaaaaacattttccgtactcggttttgcggattatgcggcaaaagacatcgttctgcaagaaaacggcagcgaatttttgattgaacataaagataagaaagtacctgtgcggacgggacttatcggaatgttcaacgtttataacacgcttgccgccgttgccgccgcagcagaactcggagtttctcttgaagatattgcgagaacatttgacgctccgatagttattcccggtagaatggagcgcgtttttatcaaagcaccgttttctgtctatgtggactatgcgcatacgccgcaggcactgacttccgcacttgtcgctttgagaaaaataacccgcggcagacttattgtcgttttcggctgcgggggagacagagataaagaaaaacgccctgttatgggtaaaaacgccgcaaggtttgcggatgaagtcatagtgacttccgacaatccgcgcatggaagactccgaggcgataatccgcgatattgttgcgggaatggaaaaagatactttttcggtcgtacctgacagacgcgacgcgataaaacttgcgctttcgagagcgcatgagggggatattgtgcttgtcgcgggtaagggacacgaaaagtaccaaattgtcggcaaaaaaagattgcctttcgacgatgtgaacatcatcgccgaatatgaatatgaaagatgaagagataggaacggagaaagagttatgttgctttcagatgtaggaaaaatgctgaatgtcacttgtaccggggattgcgaatttgatggattcgcaatagattcccgtgcggtcaaaaaggggaatatgttcgtgtgtctgcccggcgcacgcgtggacggtcacgattttgcggcaaaagccgaagcaaacggcgccgcgtgttttctctgcgaaagacctcttgacacatctcttccttgctgcattgttcccgattctctcaaaggtctgcaagacctcggcaaggcataccgtcttgctctcggcgtaaaggtcgttgcggttacgggcagcgtgggaaagaccacgacaaaagaatatatttcttccgtgttgagccgcaaatacagaacgcataagactgagggcaacaagaacagcgaaacgggcgttcctctgacgctgcttgccgttcgccccgaagacgaagtcgttgttaccgaaatgggaatgtccgcaaaaggcgaaatatccgttctgacgaacatcgcctgtcccgatattgccgttatcaccaatatcggcgtttctcatatcgaacatctcggttcgcaggaaaacataatgcttgcaaaacttgagattcttgaaggactttccgaaaacggaacgcttattctcaattacgacgacgaatatttgcgccatgcatataacgacttgctgctcggaaaaatcccgcagaagataatccgttacggcataaacaatcccgactgcgacataatcgcatccgagatagccatggaggacaacagccttcgtttttgcgtaaaaacgcccgagggcgatataacggtcataattccgtgcgagggagttcataatgtttacaattcgcttgccgctatctctgttggactttgcatgggcgtgcctctttccgatatcgtggcgggacttgccgaatttacaggtgttcctatgcgtcagcagacctattcgcgtgacggactgaacataatcgaagactgctacaacgcaagcccgtcttccatgaaagcgggacttgacgtactccgccgcaaaaacggcagaaaaatagcggttctcggcgatatgctcgaactcggagacttctcagacgaaatgcaccgcaaagtcggcgaaatgctgacggacattgacgcgcttgtcgcattcggacatttcaacgacagttacattgcaggtgcaaaaaacgcgggcgttgcgcccgaaaactgctattcgtgcgaaaataacgaagaagcggctgtcatactttcaaagattgcaaaagacggcgattatatccttataaaggcgagccgcggcatgagcggcgaaaagatcgccgaaaaactttttgagataaaggaacaaaaatgactttttctctgtcggcagcgtccgttgtcgcaataaccgtttcgtttattctctgcgttttgttttgtgcttttctgatgcgccccgcagagcgtgttatgacgcggcggaaaataaccgtggtcgaatatcccgcatggcgcaagcgcgcaaaggacgttcctcccgtgggaggtatcgccgtaattgcctcgtctgctttcggattcctgattgcggcgaccgtgggcggcggaattggttccgaatatgtatttttacttgccgttgcggtgctttttgccgctgtcggttttgcggatgatatgctgacaattacgcaaaacgtaagatttcgactgccgaggtttgttcctgtcgtgcttcgcgccgttttggctgtcggctttgcgttttattcttataattataacggcgggggatatgtttcgtttttcctgttctcggacggcacggatctcggtgttctgtatatcccgctctccgctgtcgtgatactttttttctcgttttcggcgagaatcacgaacggttcggacggcttaaacgctgctacctgcgttcccgtatttgcttatctttcgctttttgcgttgggacgtcagggtgttggtgatgcgaacggaacttttctttcgttctcacttctcggcgcggtgctcggttttcttatcttcggaaaaaatcccgcccgtatttttgaaggacattcgggaacatctttttgcggaacgtgtgccgttctgctctgctttttaatgaaatgtccgtcggttatatttatcgtcggctttgtttggctcgttcagggaatgagttttttgctttcccgtgccgtatattttttcacatgcggcaagcaccgtcttttgcctgtcgccccgcttgattcctttttgcgaagcgtcggcgtttccgaaaacgcagttgtattctcatattttgcgacaggcgttgtttttgccgcagtcgcatacattttgaccggaggcctttgatgaaagacaaagcgcaacagaaaaaaaatccgttactccgaaaaaaaggtctgcccatgttcgacataccttttcttgtcggagttttcgcattgcttttcaccgggcttgcaatgcttttttccgcgggttacgcagacgcgctgaaccgttacggagacagttaccattacataaaaagtcagttgtttgccgttcttatcgggctgacggcaatgcttatagcgtcgtttatatcgtataagttctaccgtcggtttgcatggtttttttacggtgtctgcgtcgtgttgctcatcgctgttctcatcttcggcaaaggtgagcagaagcgctggctcaacatcggttttcagttccagccatccgaacttgcaaaagttgccgttgttatggcgcttgctgattacatagcgcgaaaccgcgacaatatgaaacagtttgtaaaaggtattgtcttgccctgtattatatggggcgttccgtgtcttctcgttgccgttgaaacacacctttcgggcgctatactgattgcttcgataggtatagttatgatgatagcgggcggctgtcgccttgtgttccttgccgttcccgccgcaggtgcgggcgttttgggcacgatccttgcgttcagcgttccttacatgaaagccagaatagatacatggctcaatcccgaaacggatctgctcggagacggctggcaggtataccagtcgctgaccacgataggttcgggcggacttttcgggttcggttacggaaaatcaagacaaaaatatctttatatgtcggaaccgcagaacgactttattttctctatcgtctgcgaagaactcggctggataggcgccgtgttcgttatcgcgctgtttgcgttctttatttggcgcggcatatatatagcgatgcacgctcccaatactttttcctctctgatagtaatcggaatcataagcaaaaccgcagttcaggtcatattcaacattgccgttgttactggctccgttcccgttacgggcgttccgcttccgtttttcagtttcggaggtacggcgcttacggttctgcttgcggagatagggcttgttttgtatatttcaaggtttgcgacagttgaaaagggaagcgaaccgacagaggacgacaataagaaaaatttgaccgcgccgacgtccgatgagacggcgacagcggaggaaggtaatatatgaattatcttatagcctgcggaggtacttccggacatatcaatcccgcaatagcgatagcggacgaactccgtcgccgcgaccccgacgcaaaatttatttttatcggaatgaagcgcaatcttgagtccgaacttgttcccagagcggggtatgagattcgatttatagaaacctcaggcctcagccgcgacaaaagttttgcgggagtgagacacaacgtccgtatggtaaaaaaatttctcgactcaaagagagccgttaagcacataatcaatgaatttcaccctgatgcggcgataggcacgggcgggtatgtttcagctcccgttatccgcgccgcctgtgaaagacatatcccgaccgttatacacgagcagaacgcttttgcgggagttacgaccaaaatgcttgcgggaaaagttgacagaatactcctgagtttcaaacttgcaaagccgataaagggggttgaaaagaaaacacgcctcgtaggaaatcccgtcagaagagcgtttttggaacttgacagaaaaactgcgcgcgccgaactcggtatccccgaaaacgaaagagttgtgctttcctgcggaggcagcctcggcgcaacaaaactgaacgaggcattcgtcggctttgcaaaaaaggtggccgccgacggcacaatgagcctttatcacggcgcatcgagagattataagacagtctgcgatgagttggatgatgttgaaaacaaagataaaatacacgtttttgagtatatatacaatatgccgcaacttatggcggcggcagaccttatagtttcccgctcgggtgctacatctctgacggaaatatcggcactcggacgtgcgagcattcttgttccgtcgccgaacgtgaccgaaaatcaccagtatttcaacgcaaaaacattcagcgacgcgggtgcggcggtcttgcttgaagaaaaagacctgtctcccgaaagtctttatgatgccgtgaacgacgttatattcaacaccaataaactgaatgccatggagcgtgccgcaaagtcccttttcaacgaacgttccgtttcggatatagtcgatgagatattcgccgtcgcaaaaaagaaataacgcaatttctttaatttgataaacggtctcggacaacctgttttttcgaaccgtctttatgttttcgcatattatgttaatgtcgaaaactatgagaggaaagaaaaaaacaatgtcaagacttgtaataaacggaggcagaccgctttgcggcgttgttcgcattcagggcgcaaaaaacagcgttcttcccattttggcggcttcgcttcttgccgatgagccgtgcgttatctcgaactgcccgcatataagcgacgccgacacggcggttgaaattctcgaagcactcggggcgcgtgcggaacggtattcggacagggtggaaacagatgcttcaaacgcgttcaaatgcgttattcccgacggactgatgagaaaaatgaggtcttccatcgtttttctcggagcgatagtctcaaaatgcggcagggcacgggtcagttttcccggagggtgcgacattggctgtcgtccgatagacctgcacatatcttctcttgaaaaaatgaacatatccgtcctcggcaaaaacgggtttctcgaatgtcggaccgacggaataaaaggcgccgaaataaacctttcgtttccgagcgtcggcgcaactgaaaatattatgcttgctgcgtgcaaagcaaaaggcgacaccgtgatagagaatgcggcaagagaacccgaaatagtcgatttgcaaaactttataaacgccatgggcggagatgtccgcggtgcgggaacgtcacgcatagagatatgcggcgtcgaaaaacttcacggcgtaaattatcagataatccccgacagaatagttgcggctacatatctttgcgccgttgcggcaagccgcggctgtgctctgctgaaaaacgtccgtcccaatgacctttcctccgttatttcgcttttacgcgacgcgggctgcgatatttccgcatatgacgacagcatttcgatagactgtgagaaaataaaaagcataagaggtgtcgattccgttcgaaccatgccgtatcccggttttccgacagatgcggggtctccgttcgttgctttgatgacacttgcaaagggttcgacggtatttgtcgagaccgtttttgaaaacagattcaaatatgtcggcgaactgctccgtatgggcgcagatataaaaaccgaggggcgcgttgccgttatcgacggcgttgaaaagctgttcggaacgagcgtcgaagcccacgacctgcgcgggggcgccgcactttgcgtggctgccgtggctgcggagggcacaacggaaatagaccgtgccgaatatattctccgcggttacgagcatatagaaaaagatttgcgcgatctcggcgcggatatagagttttttgaagattgaaacaaagaaaattaaaatgaaaggagtgtttcgatgaaaaagcgcacgaagaaagtctcttccgaagatgaggaggaagttttgtcttccgatgagataagagcgcgccgcaaagcggaaagaaaacggcgtatacttcgcaacagactgatttttctcggaatacttcttttgatagtcggtgcgatagtctttcgcgtatgcgttgttgcaaaaacgataaacgtgacaaatgaaacgccgtatcccgacgaacaacttttggcggcaatggacgagggaaaggggacttttctgttctctttcagcgcggacaagattgccgagaaattaaagacggtttatccttatgtcggcagcgtcgaagtgaaaaaacattttccgacgactgttgacatcactttccgctgtgccgaaaaatcttatgcttttatgtccgacggatattatgtgttcacggattcgtccctgcgtgttttggagatttcaaaaactcccgataatgctgttcttacggttatcggcgctgatatcggcgaatgcgaaaagggaaagcaaatagactcttcgacgtttatttacggtgattttatcgcaaatattcaggctcaggcggaacggacgggagtaggcaatataaccaaagtggatatttcaaaaaaatacaggatagcatttcttctgaatgatacggtgactgtcgttctcggcgatttttccgacattgacagaaaattcgacactttgaaatacattgtcggcgaaaacgatatgtctgttgtcgcaactataaacgtcaaggatttttcgagaggaaaatattcgctcggttcggatatattctctgccgagccgataacgcaggagcctacgaccgctcccgagcagaacgaacccgacacaacggaaccgtcttcgtcttccgagcaggggacaagttcttcttatgacagcgatatagaaccgtaatttcaggaaacgcagaaaacaatttcccgtaaatagtcaaacttatcggtgcttgtgacaaaaaacgaaattttttttaattttaagacgcgaatactggaaatttgacgaaaagtgttgactattcgggtcagatatgctatattatattcgtatatatattgtacacaaatgaaaggatgtagacaaatggcattcaaaagtttagaagataaaacgctggtcaatatcaaggtcatcggagtgggcggcggcggaaacaacgccgttgacggtatgattcagtctgaggtcagagacgttgagtttatcgccatcaacaccgattgccaacagcttgaaaagcgttcgcttgctcccgtgaagattcctataggcgaaaaaatcacccgcggtttcggcgcaggcgcagatcccgaagtcggcagaaaagccgcagaggaaagccgtgacgccatcgcttccgcgatcaaaggcgcggacatgatattccttaccgcaggtatgggcggcggaacaggcacaggtgctgctcctcttgttgcacagatagcaaaagagtccggcatacttaccgttgcaatcgttaccagaccgttcaatttcgagggcaagaccaagatagaaaaagcggaaaaaggtatcgaagaccttcttaaacaggttgatactcttgttgttattccgaacgagaacctcaaactcgtttccgaaagcagagtaaccatgctcaacgcattcaaaatcgcggacagcgttcttaaagaaggtgttgagtccatcacaacgcttattcagagccagggcataatcaaccttgacttcaacgatatcaccgcaattcttaaagatgcgggcaaggctcactggtgcgttcagtccgcaaagggcaaggacaaggcagagaccgttgcaaacgcggttatccagtctccgctgcttgaatcttccatcaagggtgcaaagggcgttatcctttacttcaacgccgataccgaagttaccatggaagacatcgaacttgcggcacagatcatcagagaaaacgccgctcccgatgcaaacatcatctggggtgttaaccttgacgatactcttgaagacgaacttcaggtaaccgttatcgctacccgttttgaggacgagaacaagtctttcggaacacagcctgtgacgaatgcggcttatatcgctccgtccagagttgctcccgaagttcccgctgctcccgcagcacccgttaaccccgctcccgtagcgcctgcggcacctgttgcttccgcttcgaccgaggatgacgacgaattccttaaattgctcaacgatataacaaagggcaactaaatacgggactttgaccgagtccgaaacattcagcgtttgaaatttttatatacagcagggcagaccgattgtctgccctgttcttaaagaggaaatggataaagaatttatactgttcgatctcgacggaactctgaccgaccccaaaatcggtatcacgtccgccgttgcttacgcgcttgaacattgcggttataccgcgcccgaaaatcttgacgaactctgcccgtttataggtcctccgcttcatgagtcgtttatgaagtattacggggttgatgaagacgaagcggacaaactcgttgattcttacaggaagtattaccgtccgaaaggcatttttgaatgcaccgtttatgacgatattcccgaccttttgacgtctttgaaagagaacggcaaaaaggttttgcttgcaacatcaaagcccgaagatatggcggaggatatcctcgaccacttcggtctgatagggtattttgacggcgtttacggcgcaacgcatgacagaagccgcacggataagtcacttgtaatagcctacgctcttgaagagttcggcttgaccgaacgcgataaggcggttatggtcggcgaccgtgaatatgacatcctcggcgcaaaagaaaacggactttccgcgataggcgtcggttacggatacagacagaatccgcacgaatttgaaaaggcggatgccgttgcaaataccgttgccgaactgaaagcgatactgttatgatgccatatatcattgtcggcgcagcacttatagttatcggcgttctttggctttcgctgtatattttcacgtcacgcaaaacgaccgtggagactacggacatgaatcccgtaaacgccaccgaagcggatattgcgcgcgttgaagaagcacagcgcaaattgcgtgtgacatatatcaaaacggctgtcaatatgcttgttccgtgtttgtttatcggagtgggaatattctgtcttgccgttgccgttgttcgctttgcaggcttgatttaggcttgtctgtcttgattttaagcgtgacatatctttatttaattgcataaaaatcgcagaccgcagttttgaaccgcggtctgcttttgtgtttatcaagattttatctgagggggatttttgcgacttcttcgtcgttttctccgagcagacagaagtttcccaaattcggcagtctgtctctgcaatcgcattgccaaacgacttttttgtcgggtgtgacttcaaagacgggaacgccctctccgttatgcccgtgtccgagccagtttgtgcaaacgatgtttccgtttttgcggagttgtatgccgagcagccaacagatgttgatttcgggaacgtcttcgttcgtcaaagaccaaacttcgtttcctctttcatcgagttcgaaaagcccctccatgcaggagtaaacaacgttgccgtcgggacggataaccgcgccgaaagtgtcgggacgggtgtcaaactctttgagcgtttttcccgtttcgtcaagaaaaactattttctttgagccgggggagactatcatatacgttccgttttcgagttttctcgccatgcgcattgtttcgtgcggctcgtcgcctttataatcgaacggtatcgtttttacgatgtttcccttgtcgtctgtttcaacgattcgtttttgtctcaattctccgacgagaactccgccgttttcaagcggctgacaggtgaatacttcgtgttcggttgtatattggaacagcgtttttccgcttctgtcaatgattcttgcaccgcttccgtttttgccgtaatgacagaaaagtattctgtcatcggaaagatgccaaaggtcaaatacggtcagtgcggtgtcgattctccagataacctctccgctttcgttcacttcgacaagttcttccgtctcggtgtcagtcgctaaaaaagaatatctgttttcgcctttaacagtcttcatacaaagcgtcctttattcaaaatcgtatgccatgttgagtatggtcatcagtccgtctctgcctatcttcggaatggacggaagattgccgtccgcgtcgcagccgtgtgcgataacttcgtcggctatcttgtcaagatcttctttcggaacgttgacggatttaagatttacgggaacgccgacttctttgacgaacgcaacgaatttgtcagtgcactcgtcagcaacgtcgatatcttttcttccttctctgtcaagtctgaaaattctgtatccgagttcagcaaatcttgccgctctttcatcgttcaggtgtgcggtgtagcggaagaacgcgggcatgataaccgcaagcgttacgccgtggtcaatgtcgtaaagcgcagagagaacgtgtcctatctgatgacagggcgtgggtgctgcaagtcccgcttgcagatagccgttccaagtcagcgtggaagcccattgaagcgacgctcttgcctgaatgtcgtcggggtctttgaaaatcttcctgataagatccattaccgccatgagaagtccctcgtggcatctgtcctgaacaggggagttctggtcgccgttcagatacgcttcaagaacgtgggacattgcgtcaaccgcgcccgcagccatcgggaatttgggaagcgtcgccgttacgcaggggtccattacgcagatcttcggataaagaacgggcgcccagatatatgctttttcgtgcgttctgtcatttgttgcaaccgctacattgttcgtttcggaagaagttgcggattttgtcggtatcataatcgtgggaagcgtgtccgtcgggggaactgcaaccgccttgtcgtgacggaaaacaaacatcttccacgggtcgccgtcgtatttaacgcccgcacctatcgcttttgcggagtccataacgctgccgccgccgagcgcaacgataacttctatgccttcttttctgcatatatctatcgcttcttcgatgtcggaaagacgcggattcggttttaccttgaaaaattctgtgacggtaacgcccgcatctttgaaacttttatcgagttttgcaagcaattcgttgaaaaagtcgtgtacgtcgtaggtgacgagcattgcctttgtgccgtactctttggtatattttccgatattctcggcttcaccgggaccgaagatgatacggacagggttgtaaagttcaaagttaagcataaaactgccctctttcgttgttttattgatgttaatatcttatcatttattgtatgttttgtcaagagatattctctttttttcttgacaaacgggttattatattgtataatgtgaattggaataaaatgtcgtgcgcagaccgtttgcgccgaccgaaaggctgtgcccgaatacagtgaatcttgtgcgttttcgggtattgttcgcaaattaaatacaataacagagaggtgtccgattatgcagatgataatcaacggcgagtacagagattcgagatcaggcaagacttttgacaacatcaacccctataccggcgaacttgtttgcaaagtcgcgagcggtactgcggaagattttgaagaagccgcaaggatagcgaaagcgtctcaacccgcttgggcggcaaccccgttttacgaaagagcggcgataatcaaaagatttgtcgcttatgtccgtgaagaccttgaaaagattgcaaaagttgtgaccgcagagggcggaaaaacgataaccgacgcaagaggcgaacttgaatgtctttgcatggtttttgagtcgttcctcgaagccgcacgtcatctttacggcaattccgtaccccttaacgcagagccgagaactcagggcgacattattttcaccgtcagagagcccatcggcgtatttgccacgatcaccccgttcaatttccccatagaactttatgctcataaggtcgcgcccgttatcataacaggcaacgccgttataatcaaacccgcgtccgatactccgatggctgcgatgatgcttaccgaacttcttctcaaagcgggcgttcccgcaggcgtttgccacttcattacgggcagcggcagagaagtgggcgcatggctttcgcagacgaccaacgttgacggcgtaagtttcacgggttcgacgcccgtcggcagagaacttatgaaaggcggcgcgcataatcttcaacacgtcttcctcgaactcggcggcaacgacccctacgtcgtttttgattccgcggatatggaagtcgcggtaagagaggctgtcggcggcagagtttacaatgccggacaaacttgctgtgcgaataagagatttattattcagaataccgtcaaggctgaatttaccgaaaaacttatcgcggcgctgaaagatgtcaagataggcgaccccgcagatccggcgaccgccatgggctgtcttgtttccgaaaaggcggcaaagggtatagaggaagaaataaacaaggttatcgcagacggcggcaagcttctttacggcggcaagcgcaacggcgcgtttatcgacccgaccgttattgaagtttcgaaagattccgaagttgcaaacgaccttgaaatcttcggacccgtgttcccgataatcggcttcgacacatttgacgaggcggttgagatagcaaatcagacttcgttcggacttgcttccggcgttatcacgcaggacatcaaccttgcgatgaagttcgcgaacaaggttcaggcgggaacgtgcgttatcaactcttcgggcaactaccgctccgttcatcagccgttcggcggatacaagcagaccggtataggcagagagggcacgagccatactctttatgaggtaacgcaggaaaaatccatcgttatcaagaattgcctgaaataagacaacgctttaagatgtaaaaaaataaataatatatttgaggtgaaatgctttgttaagcgcagaaaaaatccttgagttaaaactcaaagccaacgagataagaaaagagaccgtgaaaacgatcgcttctatcggcgtaggacatatcggcggctctctttccattaccgacgttatggctgttctttactttgacgagatgaaagttgaccccaagaacccgaaatgggatggcagagactggctcgttgtttccaaaggacactccggtcccgcaatttacagcacacttgcaatcaaaggtttctttgacagagaaatgctgtacactctcaacaagcccaacacgaatcttccgtcgcactgcgatatgagaaaaactcccggtatcgatatgacgacaggttctctcggtcagggcgcttccgcagccgcgggtatcgcgcttggcaataaaatggacggcaaagacgacacttatacctatcttatactcggcgacggtgagtcccaggaaggtcaggtttgggaaatggctatgtttgccgctcacagaaaactcggcaaccttatcggctttaccgactacaacaaattgcagatagacggcgcaaccgacgatgtttgctctctcggcgacattgttgcgaaatacaaggctttcggctgggattgcgtaatggtaaacggtcatgatgttgccgccattcacgacgctatcgaagccgcaaagaccgtaaaggacaaaccctctatgataatccttgacactataaagggcaagggtatctccgcacttgaaggcaaggcaagctgccataacgcaaacgtaaacgctgaacaatgcgccgaatacgttgcggaacttgacgcggaagcagaagcaattaaggagggcaaataagatgggattcaaagtcagaaatgaagtcgttgcggaaaagaccgcaatgagagacgctttctgccagacccttatcgaactggcaaagaaagatgataggatctgccttcttgacgcagaccttatgggtgcaatgggaacaaaaccctttgcaaaggaacttcccgaaagaaccgttgactgcggtattcaggaagcaaatatgataggtgttgcggcaggtctttccgcagagggaaaaatcccgttcgctcacacgttcggtatcttcgcaacaagaagagcctgcgaccagatattcgtatcctgcgcttatgcgggacgtaccgttaaaataatcggctccgatcccggcgttaccgcagctctcaacggcggtactcacatgccgtttgaagacctcggaataatgagaggtatgcccgaagtaaccgttatcgagccgaccgacgtaaccatgctcaaagatcttcttccgaagatagcagccaaacccggcgttgactatctgcgtcttgtaagaaaatcctgcgaggctatatacgaagagggttcgacctttgaaataggcaaagcaaacgttctccgcgagggtgacgatgttgccatcatcgcaatgggttactgtgtgggacaggctctcatagcagcaaaagaacttgaagaaaaaggtatcaaagcgaccgttatagatatgttcactttgaaacctcttgacagacaggctgttatcgacgcagcgaagaaaacaggcaccgtcgttaccgttgaaaaccactatgtcaacaacggtctcggttccgccgttgcggaagttctctgcgaagagtgcccgacgccgcttatcagactcggttctcaggataagttcggtgaagtcggaagcc

SEQ ID NO: 1087 - DNA, 2671 bp, Unknown
  16S sequences of unknown bacteria
tcggcgttgtcctgccggtgcagcagccggtattcgctgcgggaggtcatgattcggtagggttcctgcgtgcccttggtcaccagatcatcaaccaaggtcccgatatagccgtcagagcgcttgaggatcatcggcggctcgcccttgcatttcaacgccgcgttgaccccggccacaaagccctgggccgccgcctcttcgtacccactggagccgttaaactgccccgcgccatacaggcccgggatctttttgcactccagcgtcgggtacagctctgtcgggtcaacgcaatcgtattcaatggcataggctgggcgcatcatctccgcatgctccagacccggcaccgagtgcagcatcgccagctgcacatcctccggcatactggaggaaaatccttggatatacagctcctccgtctccagcccacagggctccacaaacaactggtgccgcggcttgtcagcaaagcgaacgacttttgtctcgatgctcggacaataccgaggcccgacaccctgaatggacccatcataaatcgggctccggtccaggttccttcggatgatctcgtgggtttcctggcaggtataggtcagatagcagaccgcccggttctccggcgcctgcgccgtccggaacgaaaacggggacacggaggcatcgccaggctgcagctccatctttgtcacatcgacagaccgagcgttgacccggggcggcgttcccgttttaaagcgtcgcatagaaagccccagcgccgccagccgccggctcagcccctgcgccgcatgcatcccatccggcccggaggagacgcagctctcgccgatgatgaccgtggcatccagatatgtccccgtcgccacaatggcagcacggcagcgatacaccgcccccagctgggtcacaacgccgcagaccacgccctgctctgtcagaatatccacgatcatagcctgcttgagatctaaattctcctgcttttccagcgtatgcttcatgaaagtctggtacgcccgccggtcggcctgggcccgcaaggagtgcaccgccgggcccttgccccggttcaggatcctgtactgaatgcagcagtgatccgccgcccagcccatctcgccgcccagtgcatccaattcccgcaccaagtggcctttcccggtgccgccgatggccgggttgcagggcatattgcccacagcgtccagattcacagtaaaaacgaccgtccgcagccccagccgggctgccgccagcgccgcttcgatccccgcgtgcccggccccgatgactgcgatatcatagcttcctgcttcgtattgcatgcttttgcgttccccctcctgccgcacggccccgcggcccggcccgccgcatcgcggtgatctgcccggccgcctgccgcgccaaagagcgccgggggcatttcgcccccggctcgattttctctgcactatttcttgcgccgcgtgtcagcgcttcggttcgtaacggaattcttcgttaaaacccgtagccgtgccatagggcgtctgagtccgatattggggcgtgtacggaacatacggacccggctgcgtatagccgctatactgcggctttgcataggggtacgcccctgcacacggttccggctgcggtgcagcaggcggctgcatcggctgccgcggcccaggaccggtctgccgcagcggataggtcggcgcagcgggctcctgtctcgtctgctgcaccgccgactggttgctatgcgccacctgccgcagcaggctagtcgcgatcgtctgctgttccagcagctccgcaaggccataagcaaagcaggagccgtaatagaccagcagtgccagcaccgcgctacctaacacagacgcgatcacatacccgatcggtgcctctgccaaaagcagcaaaatgccgcctgtgatcccgcccgccgggatcagcaccagcagaatgaccgtaagaacctttgtaaagctttttagcttttggctgacattatcgtacatcgtcttccccctacgggtccgcgcccgttatacagcggcacaaattaccgtttctacacagttacatttataatacactaatcccccatctggtgtcaatcaccaacgcagcattccaagccgattaaatttccctgttgcatttttgtgaaggattcgttatgataggggaaagaatcgaaaacggtcgaattttatccctgcattcgtctattccaaattttaacagcgcttttttacacaaacctgcacatgctaccagtaagggaaggggggagaggcatgctgcaagaattaaaagctatactctcctgcctagctcagcctgcgtttatcctggaaaatggaaagctgctctatttcaatgatgccgcccagcgactcggcgtcagcaagcttccggaagaaatcacggaagctgcacaagcgcaagggcaacagaccttcgccattgctgggacgcagtgggcagcaacagtccattgcctggccgcttatcagcttgtcctgctgcaggcgcagcaaagcgagcccacccaggaagaaagccaaatcctcagtgcagccgctcgtgccctgcgccgcccactgcaaaagatgtttctgactgcatcccagcttttcccctatctggaggatttggatgacgc

SEQ ID NO: 1088 - DNA, 10502 bp, Unknown
  16S sequences of unknown bacteria
atcaccgacatgaagggacagaagcttgacttcacacatccctcgtccgtactctgcggcaaccgacaggctcacgaagaatggctctgcgaaatccgtgatatgtgacaaattaataaaataaaaaaatgagcgcctttccagtgtaaaatcgggacgctcattttgtttatttaagtttttccttgccttcgagagcttcgtttttgccttcgatgtcgcagatgaagccgtcgaaatatttttttgtacgcgtgttgatgtcggacgggtctgttgttccccatgcgactgttgtagctccgaggagatggttaagtctcagcgaaacctttttgtagtccgtaatacggtaagcgataaagtcgggctttgccatgaagttccacatcaggttttcgagtgtcagcgctatgagtctctggtgtctcctgcactggctcttgaattcgccgaaacgcatggacagcattccgcgggcgatagtcttgtcaaactttttgtactttctgagaaacatggggttgaaagattctatcgcgtaaacgcccttgtagtccttcatgatggagtatagtgcgcggggaagctcccatacgacacgtctttcattcttcatctcaatgagaagcggaactctgccgccgactgtttcaagcacctcggagagaagcggaatcttttcgtcggagtcaagaagacgcatttttgaaagctcgtcgtatgtaacgtctatgacaagtctgtcgtctccgcacatacgagagagattgtcgtcgtggaacaccacaagctgtctgtccttcgtaaactgcacgtcaagctcgataccgcatccggcttccgcagcggcattgaaagcgggcagggagttttcgggaacggttttgttgtcatgtattcctctgtgcgctaccggagcagagcagaacatatccatgttattgcggtggcgcagcttcgggcatatcatgaaaaggtataatccgattatcgctataaaatattttaacattatttatccttaattatagtatgattctcacgaaaaggccgcgcagtactgtctgaggataagagttttttatatcagtcaagaccgatggacttgagatattcgtagctcttcttcaggcagacaaacggatcttctccgttgcagtagtcctgttcgatataagcgagacgtgttccggactgaacgaaagcctcggtaattttttcaaaatccatagtgttgccgccgcctacccatgacatgagctgcttatctccgtcaattagcatatccttgtagtggacaacgggaattcttccggcaagacgcttgatttcgtcaacaacatcatatccgccggcttttacccagtatgtatcaagagtgaagcacatctcctcgggtgtgaagtcgtccgacatatggtgcatgagcggtctgccgtcctcaagctttgtgaggtattcaaagttgtggttgtggtatgagaactgaagtcctgcgtcgtgaatcttctgcgcgggaatttttatctcagacttgaatttttcgtaacctgccggaccgccaggcatacttcccagtccgattacggggcaggagaaaatcttatgcgccttaatggtgttttcggtatctttaatggttctgttgtagtcaaaatgtgtgattccgcaggtgagggaattctttttcagctcttccgccagccattcgggttcatacgcgcaggtacctgaaacctgaacagtggtataaccgatgtctgcaacctttttaagcgtttcggaaaaaccgtcaagagttttgcagaagtctcgtaatgtaaataactgagcacctattttcatagtaatcctccgaagtaaaatcaaatgttgtggttaaggtattactgccttcatacttaccatgtactattatcctctatttcgcacgatttgtcaagagtacaagcgtaatttttatgtataaataatatttctaaccaaatattaatttttgccaaatgccgccgcatatgtataagaagcacgtcagagtacaaaataatagcaggctcacgaaaagagaggattaattatgcagaaaatgacatatataatcagagacaaaaacggacttcacgctcgtcccgcaggtcttatcgtacaggcggcgaagggatataaatcaaaagtcagcatctcggcgggagagaaaagcgcggactgcaagaagctgtttcaggtgatgggactgggtataaaatgcggggacgaggtaacgctttccgctgagggagaggacgaggagagagcggtcggagacatcggaaaaacaatgcgcgacgcagggttataggagcagaggtatgaaatggaaaaagtttatggaaaagctgtgtccggcggtcaggtcatggggaaaatcatactgctgcggcgcaaaaaaatcaatgaagaagatgatgtgcgctcgtcggaagaagaaatcgaaaggttaaaaaaagccgtcgcggagcttgagagggaaaacgagcgtctgtacgaaaacgcactgtcaactatcggagagagcggcgcgtctatttttgaagtatataaattaatgctggacgacgacgatttcataggagaagctttccgaatcataaaagaagacggagtcggagcggtttctgccgtaaaaaaagcgggggagcagctgtccgatatgctctcgtcaatggagtcggaatacatgaagcagcgcgcggcagacgtaaacgcactcacagacagactgtgtgccgtacttatgggggagacgagcattttagagcttgacgagcgcgttatagtagcctcggatgatttaagtcctgcggaaactgttactctcgagcgcggaaaggttctgggatttgtgacggaggtcggcagtgagatgtcgcacacggcaattctcgcaagaataatgggcattcccgccgttgtttctgtcggaaagataccagaggaatggaacggcaagaccgcggtgctgaacggaaaagaaggctcgctgtgcattgacccggacgagagaacagtcgcggcgtacagtgaagaggtgattttgtccgagaaagaacacgagagacttgaaaaactgcgcggtgtgcggctgaaatcccggacaggcgagaggataatgatatctgcaaacgcgggagcgccggaggacatagtagaagccgtaaaaaacgacgccgagggagtgggactgttcagaagcgagtttttgttcatgcgcaaatcctctccgccgaccgaggacgagcagtttgagatatataaaaacgcggcagagcggcttcacggagaagagcttgtggtgcgaactcttgacgtcggagcagacaaaagaataccgtatctcacctcggacgttcatgaagcgaatcctgctctcggaatacgtgcggtcagactgtgcttagccatgccgtcgcttcttatcacccagttccgtgcattgctccgagccgcttatgactgcaatatttccgttatgataccgatgatatccctgccgtcggagatagagagggtgagggacattctcgacgaggcgcagagacagcttgagggagagggaatagcatacggaaagctaaaactcgggataatgatagaaactccgtcagccgcgattctttccgatattctcgcgccgatggtcgactttttctccataggaacaaacgacctcattcagtatacggttgcggcggacagagagaatccaaagctcgaatatctcacaaagcccatgccggagagtgtcagacggtgcataaaaatgacctgtgaagccggaaaacgagccggaatccccgtatgcgtgtgcggtgagcttggagcggacttgaccgagactgagttctttataaaatccggcgtaacgcgattgtccgtgtctcctccgaaggtgctggcagtgcgggaaaaagccgcggaagtattgaataaataaaaaaatgccgctgttacagaagtaattaatccgtatcagcggtgtttcgttagttaaacaggcttgcgaggtagaagagatccgctcctccgcgaagaacatcgtatgtcacgccgtctatgatgagcttgtcctcggatataacggatatcgtgtattttccgtcgtttgtgttgaacgttacggtgtagagtatctcggacggctcgggagacttttccttgacgcattttattccttcaaacttcatgcgtatgttgtccatatcggcggacgaaacaagagttacggtatttccgtccgaatttgtgacgtcaacagactgaacataaggatactgcgtctcggagtcgatgagcggcggaagactgtcgtcaagtctgtaaactcccggagcgtcgcaggatgacagaatagcgagacatataaatgcgcagacaaaggcgataacacgtttcataatacatctcctgtgataatttataacttaattatatccgattttcatatctattgcaacacggaagtaaatttcttaaaaaattgttttcaatatcggaaaaatatgatataatcaaaataaacgaaattatatcaagatggtagacagaatgaaaaaatttctcataattgacggaaacagcattataaaccgcgctttctacggtattcgtccgctgtcgactaaaagcgggataccaacgaacgccatctacggttttctcacgataataaaaaagcatctcgactcactctcccccgattaccttgcctgcgcgtttgacgtacacgagcctacattcagacacaaggcttttgcggactacaagggtacgagaaaaggtatgcctgacgagctgagaacgcagatgccgtacgccaaaagagctgcggaatatctcggcttcaaggtgatagaatgccccggctttgaagcggacgacataatcggaacgggcgcgagaatggctgaggaaaacggaattttcacctacatcctgacaggcgaccgcgactctctccagcttatcacgaaaatgacgaccgtagttcttgcaaaaacgaaagaagacgttgagtttaccgaggagaggttcgagagcgaatacggaataaagcccgcgcagtttgtcgacgtgaaagcactcatgggagacagctccgacaatatcccgggagtagcaggcataggggagaagaccgcgctgaagctgatacagacggcgggagatcttgacacactctactcaagcgaaaactacttcggacagagcgcgtctgtgtcaaagaagctgacggatggcaggaacagtgcgtatatgtcgcgttctcttgcgctgatatcccgtgaagctcccatatgtccggcagacgagctgttcaccgagcgtgaaatgaacgcggaagaatttaactccctctgctccgagcttgagttcaacggaatggcaaaaaagttcggcgcggagacggttgtaacggcagagtacgagccgcctgtgctgaacgtgtcgtttgttaaggagctgcccggctttgagcatgaagcggtgctatattatgacggaagcttcgcggcagtgactgaggacggcgtgaacatttctatgatgagcggagctaaaaccgatgcggtttccgatttcatgcagaagaacaaaatagtctgccatgacctcaaaactctgcttagaaccacgggaatttcgggagaccgagtaaactgcgcatacgacaccatgctcgcggcgtacctcatctcccccggcaaaggaaagtatgagcttggcgcgctgtcgtttgaatactgcggaaaagaagcgtcctctccggctgaaaaagctgcggcgatatacaaaatatggaaggacagcgagaaaacaatcgacggcgagggtatgcgctcccttatggatgagatagagatacccttgtcaaaggttctcgcgggaatggagagcacgggctttaagatagacgcggacggaatcagagcatacgcaaaggagcttgccgcacaggaaaacgtacttgcggagtcaatatggcttcaggcagggcacgactttaacataaactccccgaagcagctcggagaagtgctgtttgatgagataggacttccgtcaggcaagaaaacgaagacgggatattcaacggacgccgacacactcgaagcgctcagaccgtaccacacgataatatccgacattctcatgtatcgacagacctcaaagctgcgcggaacatacggagacaccctcgcaaatcaggctgacgaaaacggcaggattcacacaaagctcaaccagacgggaacggcgacaggcagacttgcctccagcgatccgaatttgcagaacatccccgtcagaggagagatggggcgtgagcttagaaaatactttgtcgcggaagagggatatactctcattgacgcggactactcgcagatagagctgagacttctggcggttctctcggacgacgaggccatgaagaaagcttttatcggcggcgaggacatacacgcggaggttgcttcacaggtgttcggagtggcactggatgacgttactccggagcagagacggcgcgcaaaagcggtcaacttcggcatagtctacggaatcggcgagttttctctggcgaaggatctcggaatcagccgcaagatggctaaggaatacatcgaaaactacctctcgacctactccggagttgacaaatacctgaaagagaccgttgaagaagcgaaaaagaacggctacaccacgacaatgttctcgcgcagaagaaatatacctgagctaacctcgaccaacaaaaacatcagagcgttcggcgaaagagttgcgatgaacagcccgatacagggaagcgcggcggatgtgataaagatagccatgataaacgtcgaccgtgcactgaaggaatccggacttgacgcgcggctcataatgcaggtacacgacgagctgataatcgaagcaaaagaagaatgcgcgtccgaggcggctgaacttcttgtgagagagatggaaaacgccgttcgtctgtccgttccgcttacagcagactgcggagtcggaaagagctggtacgacgcgaaataacggacaaaatatgcgcgcggcaggacaaaatttgctttccgttgcttgacacggggaagaacctatgctatgattaattaggttaataggaaacttctgatttaaggttataattcagagtatccttatgtaaaacgataattatgaaaaggtgttataaaatggaagaaatgttacgcggagctgctgtggttggtcagtccggcggtcctactgcggcgataaacgctacacttgcgggagttattaagggatattttgagtcgcgcgaggctgtaacgaagctgtacggcatgaaaaacggcattgaaggcttcctcggcgagagaatgtgcgacctcggcagtattttctcggacgaaaagggagacgttgacacggaaaagctctcgctcctgtctcagactccggcggctgctctcggttcatgcagaaaaaagctcccggatccttcggctgaaccagagttttacgaaaagctcatcgcgttgttcaaaaaatacgatatcagatatttcttctacatcggcggaaacgactcaatggataccgttgcgaagctgacaaagtatcttgaaacctcggactacaaaatgcgcgtgatgggcgtgccgaaaaccattgacaacgacctatgtgcgaccgaccatacgcccggctacggctctgcggcaaagtatatcgcaaccgtcacacaggaggtcatccgtgactgtgcagtttacaccgtaaaagccgtgactatagttgagattatgggacgtgacgcaggatggctgacagctgccgcggctcttccgagaatcataaacggcacggagattgacgcggtgtaccttcccgaggtggaattctccatggaaagattctactccgacattgaaaaggcgttcaagaagcacccgaatgttgtggtagctgtttccgagggcgtgagattctccgacggacactatgtaggcgagggcagtcagtcgggagcggcggatgtgttcggtcacaagtatctctccggcactggaaaggtactcgagaacgccgtaaaagagcatttcggatgtaaggtgcgctcgatagaactaaatcttccccagagatgcggctctcatcttgcttcggctaccgaccttgacgagtcgcagaaagccggagaaaccgcggtgaagaaagctgtcgcgggaatcagcggatgcatgatagcctttgtcagagcggacagcggagaatactccgtttcatacgaggcgaaggagatagcaaagatagcaaacgccgttcgtcacgttccgagagaattcatcaccgaggacggaagcaacgtcaccgacaaatgtcttgagtacatcaaacccctcatatccggcgaggttataaccagatttgacggaggacttcccattcattttgtaatagattaaggatactctgaattataaccttaaatcagaggattcctaagagtaaaggacggatatatctatggcggcaaggatctataaaacagcggacgagataataggtcacactccgctgcttgaaatgacgcatatcgaaaaaaatctcagactggacgcgagaatcatagcaaagctcgagtatctcaatcccgccggttcaaccaaggacagagccgcgagggagatgcttgacgacgccgagagacgcggacttgtgagcgagaaaactacaattatcgagccgacaagcggaaacaccggtataggtcttgcgtcggttgcggctgcgagagggtacaagattatgatagtcatgcccgacagtatgtctatcgaaaggcgcaagataatgaaggcatacggcgccgatgtaatcctctcagacggagcaaagggtatgcagggagcgatagaccgcgcaaaagagcttgcctccgctattccgaacagctttatccccggacagttcgacaatcccgcaaacgccgccgctcattttaagaccacgggacccgagatttggcaagacacagacggagaggttgacatttttgtcgcgggagtaggaacaggcggcacgataacgggagtgggacgatatctcaaatcaaagaatcccgggattaaaatcgttgcggtagagccggcgacatctcccgtactttcaaaaggctacggcggaaagcacggtatacagggtataggagcgggatttgttccgaaagtccttgacaccgagatatacgacgaggttatgaccgtgaccgacgcggatgctgtggctgtcggaaaaatgataggcatgaacgagggtatacttgtcggcatttcttcgggggctgcaatggacgcggcaataaagctctcacagcgaccggagaacaggggcaaaaacatagtggttctcctgcccgacacgggagacagatacctttcaacggcactgttcagcgaataaaaacaaagcttttccatgacaaacgggttgtggaagagctttttgttagtattgacgaacgttttacgcgagctttaaacaaaagttaacataaaatcagttgataatatattgcgggtggagtattatttattagcattcaatcgggtattattatattagattgaaagaaaatcattcagacggaggcgccgtaatggacatgagacttatcgcagctctggtgatatcccttctcggaggagtcgccatggcaagcgtgaactacgttataactaatgccgtaatgaagaaaaagccgaatatgctctcaattaccgcagttatccgtcaggtgataaacgttgcttatctcgctgcggtgtattttgtgtcgtccgctgtgctctcttcagtggtgtatccgctggtcggagcagtcgtcggactcacagtgccaatgttcattttcacctttaagctcgtgaagaaaaacgactaggaagcctctgatttaatgtttttttgcgataaaattccctaagttttagaattttatcgcaaaaatcctaattattcagagtatccttggcaaataaataaccccgcggatggcggaaaggagatatatcacttgaaatgggtgaaaaatctgaagttctaatcaaaattttcggtgttttcgatatcaccggagaagtgcttactatgtttgtcatacttgcgcttaccgccgtgctttcgataatcgccaaaagacatttgaagatgcgccccggaaaattccagaacatcatggaaaccgccgtggagtcgcttgacaacttcatctccggaataatcggaaaaaagttcggacgcaagtacttcttcttcctcggctcgctgttcatattcattattatggcgaactattcgggacttatcccaggcatgggtctgacaaagtacttcaaagcaccgacgtcctctctttcatgtacgctcggtctcggcgtcgcggctttcgtgttctt

SEQ ID NO: 1089 - DNA, 10338 bp, Unknown
  16S sequences of unknown bacteria
ccaacgagaccgagaacatcttccgtgtaccgaagagcctgatcgttcaggaggatgtatccaaatttaatgctacttctcttgaagcacgtgacatcaagattaagatcactaagattgatattccggtatcctttgcatctgcatttgagggcgagatcatccgtcgtggagatatgcaggttgagttcgatggttccagaaaagactgtttcgagcttgtatgtactaaggatgcaagcgaagttgaggatcacaagtttactcttgtgggaccggatttcgaccagatggaagttggaagcaaacagcagatcgcttacatcgtagatgtagcaggaaagaatatgcagtccgacttcgagccggtatttgagcgtaaattccacagctacattaactgtatcgagggtgttatgcataccggtcagcgtgatatgatccgtgttcgtatcagcaaaaatacattcgatgcaggcttcagagcaaaggatcttgcagaagttctgtatgcaaatattaaaaatgagtttgacgcagttgttgataaatgtgcaattactattgtaactgatgctgaagagtgtaccaagcttcgtcatgagctggctgttccggcatatgatcgtcgtgatgagagacttacttctctgactgatgagtccgttccggtatattatagctgtatcatgtgccaggcattctccccaagccatgtatgtgtagtaacacctgagagacttggtctttgcggtgctgtatcatggctggatgcaaaagctacccatcagctggatcctcagggaccgtgtcaggtaatcaccaaagagcgtgttattgatgagaatcttggacgttacgaggacgttgatgaagcagttgctaaattatcccagggtgctcttgagcatgtaaccctgtattccatcatggaagacccgatgacatcctgcggatgcttcgaatgtatctgtggtattgagccgttctctaacggtgttatcatcgcaaaccgtgagtatgctggcatgactccgcttggaatgaccttcccggatctggcaagtatgaccggtggtggagttcagactcctggattcatgggacatggaaaacactttatctcttccaagaagttcatgaaggctgagggcggtatcgagcgtatcgtatggatgccgaaggatctgaaggagcaggttgcagaaagattgaacgagacagcaaaagagctgtatggtatcgacaacttctgcgatatggttggtgatgagaccatcgcaactgatccggagacactgctggcattccttaccgaaaaaggacatccggcacttggaatggatccgatgatgtaaggaaccaaatccgcatagcggatttgccggatgtgctttgcacagacgatgaggctgccgccaggaagacgggttccttagcgataaaaatgcgaagcatttttagagcctatctaatgaatccgtacacagcgtaagctgtggcagatgtgcgaagcacagatgcgattcttgagcctgaattcaaaggggaaccctgtacccacacagggttgcccttttggaatgcatgaaagtcttttacaattcagatttttatgttataattttgacgaaatgtttttaaggaggaaatgtaccaatgccattcaatggaaaatcaggaaaattcaacgcttccatcaatacagttgagttcggctgtggcgataaagcagtgaaaatcggtggcgagaatgtattaccgttatatacatttgacgctccgatcgaaaacgcaccgaagatcggcgttatgatctctgaccttggtctggagaacgagccggcaggtgtaaaagcatactatgaaggatgtaccaccatcggcgagatcgctaaaaaagcagccgagatgccaggtgcagatttcgtatgcctgaagcttgagggcgcagaccccaacggcgcagacaagaccacagaagagtgcatgaaagcagtcaaagaggttgttgacgccatcgacgtaccgcttgttattgctggatgtaaaaatgtggcaaaagacggtgagcttttatccaaagccgctgaagttgctcagggtaaaaatgtgatcatcctgtccgctaaggaagaggattacaaaggtatcggagctgcagcaggtcttgcatacaaccagaaggttggagctgagtctgcagtagatatcaaccttgcaaaacagcttaatgtattactctctcagcttggtgtcgcaccgagcaacatcgttatgaacgttggtactgcagcagtcggatatggtttcgagtatgtagtatctactatggatcgtgtaaaagcagcagcacttggacaggctgatgcacagcttcagatgccgatcatcacaccggtagctgatgaggcatggaatgtaaaagaggctatggcttctgaagatgatatgccggagtggggaaatcaggaagaacgtggtattggtatggaagtatctaccgctgcatctgtacttgcctgtggttctaacgcagtcattctgaaacatccgacttctgttgcaacgatctctaagttgatcaaagaaatgatgtaagagggaggaggaaaatacaatggctttaaaaggattagacatctttaaattaacaccgaaaactaactgtaaggagtgcggaagcccgacctgtatggcatttgccatgaaagtagcgcagggtgctgtagaactcagcaaatgtccgcatatgtctgcagatgcacttgcaactctgtctgaggcaactgctccgccaatgaaatccatcaaagttggtactggcgacgcagagtacaccctcggaggagagactgttcttgcaagacatgagaaaactttcgtaagcaaaacaagatttgcagtaaaactgtctccggatatggatatcgacgctgctctggctgagtccaataaagttgattatgagcgtatcggtgagagaatgcatgctgagatggtatatgtagagtatacaggagatgttgctgcatatgttgaggctgttaagaaagtaactggtatcggcaaaaccatcatcctttcctgtactgatgtagaagctgcaaaagctgctctggaagtatgtaaggctgaaaaaccgatcctggatggagcaaatgcttccaactacgaggcaatggttgaggttgctaaagcagcaggtgttgtacttggtgtatctggcgctgatatcaacgaattgtatgatactaccgcagctattgagaaacttggttacaaagaccttgttctgaatactacaggagctacgatcaaagagaccttctcaacaactgttcaggtcagacgtgcctgcctggctaagaatccggacagaaccttcggatatccgtctatcgttaatttgtgcaagatcgctccgaacgatgagccgatgcagatttctctggcatctgtattcgttctgaaatatggttccatcgttgttatggataccatgaactacgcaagagctcttccactgtatggactgagacagaacgtatttaccgatccgcagaagccgatgaaggttgagccgggcatctatgcactgaatggcggagatgagaattccgtatgtctgactactgtagactttgctcttacatatttcgtagtatctggtgagctggagcgttccggtattccgtgtaacctgatcatcaacgatgcaggtggactttccgtactgactgcttgggcagcaggaaaactttcttccacatctgtatccaagttcattcaggagaccgtagagccgaagatcaaatgcagaaagctgatcattcctggaaaagttgctgtactgaaaggcgacatcgaagcaaaacttccgggttgggaagtaatcgttgctccgaacgaggctgtacagcttgttaaattcctgaaagatctgaaagctaacggcgaaatctaattgaaaatcatcgcagtacctgcccagttaggacatttcctttgggacaggtatctgacgaattaaaaaggagaacaaaactatggcaaaatttgttaccattggtgagagactttccaccacagcaccggctgtaaacaaagcatttacagagagagatccggagccgatcctgaaacgtgcaaaacagcagctggatgcaggcgctacctatcttgatgtaaacatcggaccggcagagaatgatggaccggagcttatgaaatgggctgttgagcttcttcagagcaacttcgacaatgtaccgctggcactggatacttccaatgtagcagctatcgaggctggtatttccgtttacaatcgtgcaaaaggaaaaccgatcgttaactctgcagatgcttccggaagaattgagtatgttgatcttgcagcagcaaatgacgcaatcgttatcgctctttgcaacggcgaaggaatcgctaaagacaatgacgagcgtatgatgtacatgcagactctgatggagcgtggtatggagcatggtatggatgttgctgaggatatgtggttcgatccgctgttcctggttatcaaaggaatgcaggacaaacagatgcaggttctcgagttcattaagatgatttctgatatgggtatgaaatccaccggtggtctgtccaataactccaacggtatgccgaaacatatccgtccgatcatggactctgctatggtagctatggctatgatgaacggtctgacttctgcaatcgttaacccgaacgatctcagactgatggagaccatcaaatcctgtgatatcatcaaaaataataatctgtatgcagactcctatctggagatctaattctgagaaggcaggaggcacaattttttgtgcctctatgtttttatattagctatttacaatgtctgccctagtttaatgacttcaggacaggaaaaattttatgggaggcatgacaaatgagtgctttaacagatctgatttacagtggatcaaacgcagtcgctggattgacagaaggtgcagtcaacgatgcaatcgcaaaatatggtgaggataagaaagtatcttttggagatacggcatattttcttccgaccatctatgcagcaaccggtgtaaaggttagtcgtcttggcgatcttcctgcctgtgtaggagtattaaaaagcctgatcaccaataaagaggaactgggagatgccctgaatgcaggacttgcaactgcagttggtgctgagattctggaagctctgaaatatgtggataacgagaatccatatgcagaggacagcggaatcggttttgttccggatccggttattcgttccctgggtgtgccgctggtaacaggtgatattcctggtgtggcggttgttcttggtaaagctgataatggcgctgatgtggcaaaaattgtaaaagattaccagaacaaaggtattatgacattcctggtaggtgatgtgattgaacagtgtgcagaggctggtgttaagatcggtcttgactatcgtctggttccgctgggacatgatgtgacttctgtgatccatgttgtaacggttgctattcgtgcggctttgatctttggtaatatcaaacctggagatctacctggactgcttgcctatacaaaagagcgtgtgccggcatttgtcaataccttcggagctttggatgcggtgactgtgtctgcaggcgcaggtgcgattgcactgggattccctgttgttgctgatattgatcttggcgatatgcaggttccgggagcactggagtcagttctcaaccatgaagagaccgtaaagaagagtcttgaacttcgcaacattaagatcaaagtaacagaaatcccgattccggttgcattttcctccacttatgaaggtgagattatccgtcgtggtgatatgcaggtagagttcgatggatccagagtagactgcttcgagttggtatgtaccaaagaggcctctgaagtagaagatcatgagttcaagctgatcggaccggactttgatcagatggaagttggaagcaaacagcagatcgcatacattgtaaatgtagcaggaaagaatatgcagtccgactttgaaccagtatttgagcgtaaattccacagttatcttaactgcattgaaggtgtgatgcataccggacagcgtgacatgatccgtatccgtatcagcaaagctaccttcgaggccggtttccgtgcaaaagatctggcagaagtactgtactgtaacattatgaatgagttcgacgcagttgttgataaatgctctgtaacgatcatcacagatggtgttgagtgtaccagacttcgtcatgagctggcaattccgacttacgaccgtcgtgatgagagacttgagtctttgactgacgagtctgtaccggtatattatagttgtattatgtgccaggcattctctccaagccatgtatgtgtggtaacacctgagagacttggactttgtggtgctgtatcatggctggatgcaaaagctactaatcagctggatccggagggaccgtgtcaggtgatcaccaaagagcgtgtgattgacgagagattaggacgttatgaggatgtagatgaagcagttgctaaattctcccagggtgctctggagcatgttactctgtattctattatggaagatccgatgacttcctgcggatgctttgaatgtatctgcggtattgaaccgttctctaatggtgtcattattgcaaaccgtgagtatgcaggcatgactccgctgggaatgaccttcccggatctggcgagcatgaccggtggtggagtccagacacctggattcatgggacatggtaaacactttatctcttccaagaagttcatgaaggctgagggcggtatcgagcgtatcgtatggatgccgaaggatctgaaggatcaggtaagcgagcgtctgaataagactgcaaaagaactgtacggaatcgacaatttctgcgatatggtcggagatgagactatcgcaacggatccggagacattgctggcattcctgactgaaaaaggacatccggctttaggtatggatccaatgatgtaaggaatcaaatccgcatggcggatttaccggatgtgcttttgcacagacggtgaggcttccgaaggaagactgatttcttagcgataaaaatgcgcagcatttttagagcctatctaagctgacagaatcaggtacacagcgtaagctgtggcagatgtgcgaagcacagatgcgattctggagccaaagggctttagagcccaataacctgaacaaaaggccccgcagacctgcatttggcctgcagggcttttttagaaaatatggagaaataatattatgccaaaagtaacatttcagtatgaagacggcacttcgaccatcgttgatgtgacagccggagagaatctgttggaggtagcgcgtaaagcaaatgtagccattgatgcaccttgttcaggcaacggatcctgcggtaagtgcagagtcagatatatcagtggcgaattagagagtgaacagacaagacatattacagatgaagattatgctgcaggatggaggctttcctgttgtagtaaggtaaccggcgatgtgacggtacttgtacccgatattgcgtctgcatataagagccgcatgaaagtggcagatcttagctcaccggaagaagtcgccatctttgaccgtgcaaagcaggatgtggcagatgcaggaattacttttgaaaatgaatttacggttgtggaacttcagatgatagctccgtcattggatgataccatgccagataatgagcggttgtcctgggcaattgaggcagcaaccggaatagagaatgtaaaattaacttatcaggtattgaaaaagctgccggatgcactgcgggacaatgatttccatgtgaatgtagttctgaagaaacttcatcacagtgtactggtttatgacgtggtacctgtaacagagcagagaatctgtggagcggctattgatattggtaccactaccgtatcaggagttattctggatctgagagatgggacgatccttgccaaggcatctgccggaaatggtcagattcgttatggtgcagatgttatcaatcgtattattgaatcccggaaaccgggtggagaagcgaaacttcagaaagcgatcattgatgagacattgaatcccatgcttcataatatgtgccgtgcggcaggtatcaaaggaagccagatttatcatatgtgcattgcgtccaatacgactatgaatcatctacttcttggagtcaatgcggatccgctccgtatggaaccttatattccggatttcttcgagacagaagatgtcagtgcctacgacctgcacctggatgtgcatcccaatgcaaaggttatcatttctccgaatatcggaagctacgtaggaggagatattacagccggtactctggtcagcatgatctggaacaaaccggagtttaatctgttcattgaccttggtaccaatggggagatcgtatttggaaattctgatttcatgatgagctgtgcatgttcagccggaccggcatttgagggcggagatatcagctgtggtatgcgtgcaacggatggagctatcgaggcttgttctattgatgcgaagaccatggaaccaacactgcatattgttggaaacgaaggccagaagccagtaggcctttgcggttctggtatcattgacgtgattgcggaattgttccgctgtggaatcatcagtccgaaaggtaaattcatccgtgaaggagaccgtgtccgtcatgatcactatggaatcggaagttatgtactggcatttaaggaagaagcagcaggacataaggatgtagagatcaatgaagtcgatatcgacaattttatccgtgcgaagggtgccattttctcggctatctgtacgatgctccggtctctggattttgatgtgtccatgatcgaaaacgtatatgtagcaggtggtattggaagtggtattaatatgaaaaatgcagtgaccatcggtatgttcccggatgtggagatcgataagttccattacattggtaactcttctctcacaggcgcatataatatgacgctttcggtagaagctgagcataaagtgcatgagcttgctcataacattacatacatggaacttagtacagatccaagctatatggatgaatttgtggctgcatgctttattcctcatacaaatacagcgctgttcccaagcgtaaaacaggaggaaatatagttggaaatcgaaaatcacaaagaagaagtcccttttgagcattacttagacaaatttcatacattagatcccaaagaggcagcacaaagattgaacattctgtatgatgaaaatgcaaaaaagtttcagcttcgctttcttggacatctgtatgaagtggaatatccggacttccatgtgactgtattagacaaaacgcaggaggatatggaaaaagatcttcttatgaccagtcttcctgcacagacatttatcatgcgttatctgctggaagggcagtacattgcctccagcggaaaattcatgactttcagggaagtacccacttacggagaattgtatattcagccgtttactggtcgctgtatcaagcgtcttacttacggatttggctataaactgaaggctttttcagaagcaatggaaaagatcccgggctgtgagaagattgatatgggagatgtggcctacgaatttgagctggtcaatggatatcgtatgagatttattttctgggaaggggacgaggaatttccaccttctgctcagatcctgtacagtgataatttccagtttggattccatgcagaagatatggtagttgctggagacctttcaatcacaactgtgaaaatgctctgtgtatagtacaaactgtatgatgtcaaaaaattatcaaagtaatataatttgaccagtgcaagggggaaagagataaatccctttgttaaaaacatcacaagaacgcaagggcgtgagaacacaaaaaatattcactgtgttcattaaagaaaggagattttcttttatgggattcaaaactgacattgaaattgcacaggagtgcgaagcaagaccaattaccgagattgctgcaaaagcaggtattgatgacaaatatctggagcagtacggtaagtacaaagcaaaaatcgactacaatttattaaaagaagttccgggtgagaacggaaaactggttcttgtaactgctatcaacccgactccggcaggagagggaaagaccaccacat

SEQ ID NO: 1090 - DNA, 32759 bp, Unknown
  16S sequences of unknown bacteria
tttatcccctgtcaactctttttatctactttttttaaattttttttattaagtgatttatattaaaatttcgcggccgtcatgtcgctgcggcttggaataaaaacgcggcggacaaatttcgccgcataaaaactattttatataagactattatctttgcctgaataaaagcaaacagcggaaaaagttttaatcataaaaagcgttacagcttaccttaccgcaaatacaccacgcggcttacttccccacgcgaaggattcaggataaaaaccataaactgcattatattgtttgtcgcacgacgaaacggattgcttttataatctcagttcgctactttaaactttaatttgaacgtaacctttgttaaataaaaaaacacactacatttcacttttgaggaagtatagtgtgttttgttttagatcgaaagctagaaatgcgacactgataatcgccgtttcagtcttttataaattcaacaacgtcttctgttttgcaatcaaggtatgcacaaattctgtcaagcgttttcatttcaatgttttggtttgcttttaatctgcgaaccgttttgctgtcaataccgcattcttccctaagcctgtatgtggaaacgcctttttttccatcgttaaaaataatctgtcgaatttaaacattttaacccccgagtgtttgcaatttataatatgggaattataatcattttttaagggtatacaatccgccactttaacaaaggtcgtgaaacttttatggaattatggatagaaaaatccgcaagtcagtcaggctaatgcaacttatacgcggaaaagttttgcattattaaacataaggtgaatttattcggcaagcgtgcaggcgtgaaattcgccgtcgtaccacaaaaacgaatttgccgaattttctttgggaagcgaaactgaacccggattaagcaataatataccgtccttttccgtgcagacaggaacgtgagtatgcccctgcaaaaagaccgcgccaaaaggaagaggcggcagattatcgaacgaaaatccgtgcccgtgcgtacagaaccaggttttgccgtcaacgaaaagctgaacatctttacagagcggaaactcggaaatcatgcagtcgacatctgcgtcgcagttgccgcgcaccgcaataatcttatctttattcccgttaagaagctccgccactttcatgggcgcataacctttgggcagcggatttctgggaccgtgataataaaggtcgcccaaaagcagtattttgtctgcttttcttttgtccgcttcttcgatgagcgcacgcgtataaaattccgaaccgtgcaaatctgatgcaatcaaaatcttcatgttttaatgatattccttttttgattttgtaaatattcaggcttatgcttaaaaatttcttttgtttaatgctgcgatagaaaacgtgaaactacggttaattacggacttaaaatattatttttaagacattaagcgttatagccgattaaaaattattttaaagttaacggcataagcgtagtaacccgaagtcatttttactcttcgtcgggataaggagtgaaactcacgtcatactgtccgccctgagcgagcgcgcttatacgcacgcttaaccccaaaggcgaacttacgtccaccgtgaatgtgcccgccgaataagtgacgctgtatttggtaagatacaattctgccgagccgtccttcgccgcaattcggaaaacgggaattttcccgtcagctttgaaaacgcagtcaagacggtactcgtcgccgtattcgtcggacaatgtatagacggaattcatacccgaaagcaccgacaaatcccatgcgggagcgggaacggcgggacgagtttgacaaataaccccttcacggtaaaaaccgattctaccgctttgaagaaccgcggtatagcattttacgcccgcatcctccgcaacttcaaacgtcagttcatgtaaacccgagctgtttaacgataccttgacttcagacgcttcttctccgtcgacggtcacaaaaggctgaaattcggcgttgacggaatcggttgcggcgcctacaaccacggttttaactgccgatttccccgcttcttctatcgtcacgctgtaagtccccataaaacagttggggtcgatttccggcttaaaatattcgcctaccgtctcgccgtcttccgaaagcgtaacgttgccgttttcaaaaaccgcggtaaaagtataagcggacgcaccgaatccgcaactaatcgaagctgtcacagtgttgccgtccacagacaccgagtcgaacgtttcgggatcgccgtaatattcgtcaagactttcgccgtaattgtaaaggaacgtaaaatcgggcaaaaccttgaataccggaacgtaatcggacgaaaaataatcgcctatcgcttcaagtttgcttagggctgaagtgcggatataagttccttttaccgattgcaggctttgtttgtcttcggcgcaataaataagcgtttcgaacattgctccgtccgagtatgtgacagccgtaacaacaaagactcctttggcgtcttttgacaaagagtattcacatatatttgtttcggtagcgtcgcccgtaagcgaaaaatcagcctcggtgatgctgagggtcccgtcggcggcaaaacttatgctttcgtcgataactgcccctttcagcacaaacgaagagttgagaatttccgaaaattcctccgtggaaacgaacgaacgtttttcgccgtcggaaagattttcaagcacaacgtaaggcatctcgaagtatctgtacaaagcaaagcgttttccttgcgcctcaaacaataatgctgtatgttccgctgcagcttccgcatttatataataaccgtattcgaacggatagggcgcgccgttgtataaaatccgactgctgtcaaaatccaaagaaacggtaacgggattagttccgcccgtcgtataaaggtcgctttcggaattaagacctgctttaagagaagttttcagtttttccgtagcgtcagccgaataaaacgcccgcgaaacaatgtaactctcttcgcttttttcaattaacgccaacacgccctcttctgcccagacgaggtaaaaaccctcttccgcacaaagcgccgcgatgccgatatcctcaagtcccgagggctcgtttaacgacctttcaaaatcgggcaatgcggtaaaaaatgcgtttttcacaactccgtcaagcgtaacggaataatcgccgcccaccgttaaagcgccgtaatttcctttaaatgagtcggcaaccgccttggaaacgcagtaaaagcccttatcggtctttaagtccgcaactgcgataactcctttaccgtagccgacggggtaaagtccgtaagtcacgtcatccgccgtgaaagaaaacactacggcgttttccttgaccgtacctttaatctcatatctttcgccgccgatataaacgttttcgccgtctacggtgaaattaactgcgcccacccattctcccgtaagcgacgtcaaatccgctttaacggcattttcgggctcatttgtgccgtacagaacggcgccgtcagtcgaatagacgagaaaacattcttctttgtcagcgataaaacggatacatgaaccgtattcgcaggtcgtaacgttgtaattaaaagttttaccttccacacttacggttttggcggaagtatcgagtttaatgttcctgccgctttgcgtcacgtaaaaatcatagaaagcgacgtccgcgggaatatatacgagattttcgtcgggagcggtgacaaaaccgttttcgcccacaacgtaaactatatttgcgctgcttacgaattgcacaacaggtttaactccgtcgaaaaccagccgagtctttgccgtgtaacgcaaatcctcatcgtaaagagaaccgtccgcattgataagagtccagccgaaattaccgtccgtatctgttttctgaataaaaagagtatatatatccgagtcctcgtcctctattgtccaaagcccgttgaaccgcgcgtcataaggcataaattcggtttcggttccgtcggacagggatttaagtataagtctgccgtccttgttaagcgaaaaagtataagccgcgccgtctataaccgcattaagcacggtttccgcgccctcgcccgaagcgtcggtaagatagaactcctccgcgcccgtaagcgtcatgtcgctgaggtccagagttttgtccgcgcttacccacttgccgttaaacgcacccgccgtcgccaagggagcagtcaccgcggtaagagctgtgtctttttccaccgtgaatgtataacttacgtcgcttgatacgtttacgccgtccgtaaaccagccgacgaatttctcgcccgcaccgacgtcagcggtcacggtaacggacgcacccgcggggaaagtcccgccgccagtgccgcccgaaaccgtaacggtatattcttttgttgatttaagctcggttaccgcggttaaactgatgttgcgactgacggtgaaagtataaggattgctttcggaaacagttactccgttttcctcccaccttaaaaattcgctgccaccatcaattacagcggtaacggtacattccgagcccgacgcgtattccccgccgccagtgccgcccgaaaccgtaacggtaaaaatttcggtttccggggtgcaagcgcaaaacgcccagaacgaaagcgacagcgccgcgattaaaaggactgtttttattttcttcagcatggtattaactccttttcgggtaaatgacataaaacaattttgcgccctctttttatagtgtgtaaaaagtataaacggaataaacccgctgcgtcttaaatacgacaaaacgggcggatttattccgtccgttccgccgacttaagcgcgtaatcggtcttattttgcctctataccgagagaggaaagaaatttttcaaaagccgcgacgcccgcctcgtcctttttgaatacagcggtgttgtcgagaatacattcgcagacgcggttaacctcgtctttgacgttaagttcggcttctttaggcgtgcatttgggattttccttcataagtttttcaatcatgtcggcatgcactttcatgtcgtcggcaagtttttcacgcgaatatttgacttcacgggtcaaatactgctggacttccgcaagctgacggtccagtctgccgggaagaataaacaatcccatagcctcaataagccctatcgactcggacttaatgttctgatattccgggtggacgtgatatatgccgtcagggaattgttcggacgtgcagttgttgcgtaaaataagctccacaatgtacttgccgtcgtttgattttcttgcgataggcgtcacggcgttatgctgaccgttttcgtcggcgccgatgatacccacgctttcgtccgagtaagccttccacgcagatatgattttgccggcgtactcgacaagcattttcttgttggtgctttcaaggcgaataacggaattgtaccaatccacgattcccgtatcgatatagggatattcggcggacttaaagcgttttaaataaggagccttgtgcatgggcagctgtttaagtcccgcctggaagtggtcgtgcgtgagtatggagccgcccacgatgggaagcgcggcgttgcagccgatgaaatacgaaggattgtaatcgacaaagtccaaaagtttttgcacggtggaagtatccactttcatgggagtatgctcggagtttatcgctataccgtgctgattgaaataggaatagggcgaaaactgccagaaccactcctccccgcccaaggtaagcggaatagtgcgcaaggtctggcggaacactccgtgacccgcatatccctcgttttccttacaaatcatgcaaggcggataagaggtgtttttctgcttaagcagttttgcggtatccttattgttcttttcgggacgcgaaagattaatggtgatttcgattttgcctttagtggactttgcttcccaatgcttgtttttggcgattttggtttgctttacgtaatcgtttttaatcgagtaatcgtacagccagtcaaacgcttttgcgggcgaagtagagtgaagactttcaaacatatcgacgatttcgctgggcttaaggctgacggtatccatgattttgtcggcaaattcttcccttccgtcctcggtgataatgccgttttcgactgcgtagtccacaatgggattgagcaccgcgtcgggacaggtcatttcttctattgcgtcaacgtccgtttcgtactgcacgtaatcttcaagcttaaggctttgcataagcttattgcgcacatagataacgtccagatcgtcaagaagcagatgcgactgggcatactgcaaaagattttcgatgcaggaatagataatcatattatttgtctccttttatatggaataaatttacttgttcagcgtggagcgaccacattgacgtgacgctctatctcgaaaaacttccacggcgttttatcgagcggcggataagccacgaaaaccatgggaagcttggttacaggatgataaaaccttaattcgtacgcccacagcgcaaggttgtgaccttttgccagcgtatcgccgccgtagcgcacgtcgccgaatataggcgtgccgatatgctgcatctgaacgcgcgcctgatgcgacctgcccgtaagcagcttgatgtccacaagcgtaagcttaggcgtggtctccagaactttgtaaacgagttccgctctttttgcgccctctatggcggcgggcactactttcacggtattgtttttctcgtctttaaatagataatcggaaagccttgcctgacggtcgcgcggagtacccaccactaccgcgagatagcgtttttcaaaactgccgtcctttatctgctccgacagtcttgcggcggccttgcttgttttagcaaaaaccataactccgccggtgggtctgtccagtctgtgcacaagccccgcaaacgcctcgccttttttatcgtaagtttccttgatgtaatccttaaccatggaaagaagatccttatcccccgtggaatcgccctgagaaggaacgttctggggtttaagaaccacgataaggtgattgtcctcgtataaaattgtaagtaagttgtctgccatttgaatccgaaaccgatttatttttttgtccacaatccgctgcaaccgcagggaagttccgtttctcccatcgacttgtccgatacgggcaaggtaagttcgtatgcgtccgcacttcctttttcgccgtgcatgacaagcgaaagaatgttttttatcacagtgggctgaagtcccgtcgtataactgtttatgaggtaaaaaagcggcctgtcaagcacttcgcgcaccagcgaagcaagctcgtaaagactgtcctcaagcttccacatttcgcccgaaggtcccctgccgtagctgggcgggtccataagcacggcgttatatttttttccgcgctttatttcgcgcaaaacgaactttttacagtcgtccacgatgtagcgtattccgtcctccggaacgccgcttaaccgtgcgttttgcctgcacctttccaccatgcctttcgccgcgtccacgtgcgtgacgaacgcgccggaagctgccagcgcaacgcttgccccgcccgtgtaaccgaataggttgagtacgtttacgcgctcatgcgaatctttgcacattctgcccgttttgtcccagttggcggcttgctcggggaacagtcccgtatgcttgaaccccatgggttttaccagaaatttgagattgcgccactccaccgtccactcggaaggaaaaggccgaagcactttccatctgccgccgccgtcggatgcgcggttatacacggcgtttaagcccttgtaacttttaaggtcgaacggagctttccatattgcctgggggtcggggcgcaaaagaaacacgtctttccacctttcaagtttttcgccgtcgcccgccgcaattatctcgtagtcctgccagtcgtttgcggtcatatcttgctaacctttatacctacgttcttgccgttgatatcccattccttgaaatcgttgcagcttttaccgcctataatctcgtcggcaaggacgtcggaagctatttcctgaatgtatttgttgaaaactttttctatttcttcgtcgccgaaataacgaatcctgatatgatcggtgacttcgaatcccgcctctttacgcatcgtctgaattttggaaacgatttcacgcatatagccttcttcaatcagttctttgtctaaagcagtgtcaagaatgacggtcatgcctttgtcggactgaacggaatagccttctttactcagtaccgaaataagcaggtcgtctttggtaaggtctactttctcgccgtcgatatcgaaggaatacgtatcggattcctttaatccgtttacaatcttttcagcgttggcggcaagatactgtctgatttttcctaagcgcgagccgtatttgggtcccagtgttttaagctgaggtttgacctcataggaaacgtatccgcccgcgtccgcagcgtactcgatgtctttgacgttaagctcgtcgcggatgacggaaagaagttcggaatcgagattttcggactgaccgccgcaaagaatgattttcttaagcggctgacggtttttgattcccgataagttacgcgccgcacgccccaggatagcggcgttttcggcaaccgtcatgcccgcttcgagagctttgtcgatatatttttcgttgcacgcggggaaagacgcgagatgcaccgattcgggcgcgtcggggaaaaccgacaccacgatgttgcggtatatttcctccgccatgaaaggaataaacggcgcggtaagtcgcgacagagtttcgagaaccgtgaacagcgtcatgtaagccgctttcttgtcctcggtcatgtcgctgccccagaagcgctcgcggcatcttctgacgtaccagttgctgagcgcgtcggtaaaatcgcttatcgcccttgcgctttcggtaatcttgtaattttccagcgagtcgtccacaaaagccacaagcgaattgagcgaagacaaaatccacttgtccatcatgttaagccggcaatcgtcaagcgaatatttcgacgggtcgaacttatcgatttcggcgtaaagaacgtagaaagaataagtgttgaacaaagttcccaaaaatttacgctggacttcgcttacagcttcatcgtagaatcgcgaaggtatccagggactggaattggtgtagaaataccatcttacggcgtccgcaccctgtttgtcgagtacagaccacgggtcgacgacgttgcccttgtgcttgctcattttgatgccgttcttgtcattgacgtggcctaaaactatgcagttttcaaacggcgctttgtcaaacaaaagcgtggaaatggcaagcaaagtatagaaccagccgcgcgtctggtcgaccgcctcggaaataaaccgggcggggaaagtcttttcgaatttatccttgttttcaaacggataatgcagctgagcaaagggcatggaaccggagtcgtaccagcagtcgatgacttcgggcgtgcggtgcattgttttgccgcacttgggacattttatcgtaaccgcgtcgacgtagggcttatgaagttctatgtcgcccgtaagtccgcccttttccttaagctcggctttagagcctattgccaaagtttcgccgcactcgtcgcaaacccatatcggaagcggagtaccccagtatctttcgcgcgacagtccccaatcgatgacgttttcgaggaagttgcccattctgccctttccgatggattcgggcatccagttgacggacgcgttgtttttcataagctgttcccttactttggtcatggaaataaaccaggtggaacgcgcgtaataaagaagcggcgtatcgcagcgccagcagaaaggatagctgtgagtaaacattatttccttgaaaagcaggccgcgtgacttaaggtccttaaggataagcttgtcggcgtccttacagaaagtaccctcgaagggcgcgcctttgctcattttgccgcgctcgtccaccatctggacgaaaggaaggtcgttttgtctgcctattctggcgtcatcctcgccgaacgcgggcgcgatatgcacgacgcccgtgccgtcgtcaagcgtaacgtaaccgtcggtcaccacataatgcgatttcttggggccgttgtagtttgcgtaaagaggctcgtattcggtacctgcgaaatccgcgccttttctgacggacaaaacggtatactcgccctccttgaaatattcggggatgcgtttttccgccatgatgtattttttaccgtcgctttccacggttgcgtaatcaaacgtagatcccatacacagcgcaacgtttgagggaagcgtccacggcgtggtcgtccaggcgacaatataggtatccgcctgtcccttgactttaaaggacaccgcggcggacttttcctccacgtccttgtatccctgcgccacttcgtgcgaagaaagcgccgttccgcagcgcgggcaatacggtactattttgtgccctttgtaaatcagcccgcggtcgaatatgtttttaagcgaccaccagacggactcgatataagtgtcattgtaagtgatgtaagggtgctccatatccacccaataacccactctgtcggacattttttcccattccgacttatatttccaaacgctttccttgcacttttttataaaaggctcgataccgtacttctcgatatcctgtttgccgtccatgccaagctgcttttccacttcaagctccacgggaagcccgtgagtgtcccagccggctatacgcgtggcgtgatatcctttcatggttttaaagcgcggaataatgtctttcattacgcgcgtaataatatgtcctatgtgcggtttgccgtttgccgtcggcggaccgtcgtaaaaggaaaactcctcgccgtctttggttttttccagagtcttttcgaaaattttgtttttcttccagaaatcgagaacctcaagctctcttcccacgaaattcatatccggattgattttcttatacataacaaactcctcttacggtatgacgaaaaaatatatggacgcaaaatgcaatatcgagccggcaagcacgaaaaaatgccaaatcgcgtgattgtacggtatagactttattctgtaaaaaattatgcccagggtataaatcacgccgccgcctatcagcagaaagaacgcaggcagattggcgaccagcaaatcaatgcgtattacgcacgcccagcccatgacgacgtaagaaataaggcagtaaactttgaacttgtttacgtcgattgcgttaaacacgcaggaaagcaccgcaaacccgagcaccacgcttgcaagcacaatcgcccacactttgttttgcgcgtacatgtctatcagcataaagggcgcgtaagtacccgctatcagaagcgcgattgagcagtggtcgagacggcggaacaccgcgcggcggcgctttccgaccggctgccaatgataaagcgtactcataatataaagaatcaaaagagagaaagaatacaggcataccgacacaatcgcaagcgcgccgagtccggacaaacacaccttgattatcatcagcaccgacccgataagcgcaagacccgcgcccgcaagatgactgatgcggttaatccactcctcgcttttggaataaactatctggtttgccgcccgtttttcgcgttttcttatttctttttcggtaagcgcaatgttattcgcggctgccgtatccgaaccgtcgtccgttaaggaagacgccgtattattattattcagtttatcgttatccatggcaaattcttcccgagtcaatgataaattctaaatctgcaccgacggaataaagcccgacaaaaaacgactttccgtcatttaagatattgagagaagaacgaatacgctctcctctcaacgctgtttgcaaaaaaactgtgcatccgcctttgatacgtcaagccgaagcgttcttccgacagttaactcctccaaagctacctcgtggcacacgttatggtccgcttagtgctgctgcgtccccgccctgacacggttcacggtataacattgcacaagaccttggtatcaacgtcacttatacggcaactgccttccacaagtcgcaccgcgggcggcattcagccctactgtagcggattgtaggtacagggcaccgctggctccccgcttagcacagtatcgttattatacaatatcgttgcgattaaatcaagcggattgcacgatttttacgttttttaacttttttatccctgtttccgcacggtaaaaattgccgaaaacccgcgccgacaatttccgacacgggtttttcttttacttgtttgacttgtatactttaagcgggtcgatatccagcatgggcaaaagccgcattatagttactcttctgcgcatatagacatgataccttatgccttcgtcgaaaagctcgcggtccacggcgatttcttcgggcgtggtcaccgcgtgcgccgcggcgtaaagctttttaagcgtttccgtagagggaatttcctcctcgattatcttccttatctcgtcccatttttcctctatgaggcggggcggaatttcgtttactatggtatcgggaaggttaagcttcatcatatcgggcgtaagcgcaggaccgtaatgagactgaatatcctgccagtcgggcgtttccttgtgcgcgcttaccttttcgattcggctaagcttatggtaaatatcggcgaccaccagtgtggctacgcccactttcttgccgtgaaaatccgaaatcacgcctttttccagctttttgcactcccaatagtgggaaataatatgttcggtgcccgaagcgggtcgcgtgcattttgcaagctgcatggctatgcccgtaagcacaagcgtttccatgacggctgccgccgcctcctcgtcgcgcacggaaaccttatccgcaagcgccgccattttcgcgaccgcattacgcacgaaagaggcaacgcgctcgcagtaataatcgccgtggacaaggttagccacgcgccagtccgcaatggcgatgtattttgccatgacgtcgccgaatcccgccgccttaagctcggtaggcgaatcggcaaggattttagtgtccgcgattataatgcgcggctgacggcacgggtatgagagtttaaagttaccctttgtgatgggcgcgctgtcggaagcgaatccgtccattgacggcgcggtcgcaaaaatcgcaaactgcttaccggcgcggtaagaagaaagtctgcagatatcgtttaccgacccggtacctacggacagacagccgtccacgcgcgccagaagtttttcgagttcctccacctcgcgcatatcggcgactttcatgtcgtcgtaaacgcgcagttccacggtaaatccctcgcttaaaagctgctcgtaaagtcctttggtaaccctgaaagaattgacgtccgccaccataaggatttttttcggaaaattgtaacgctttaaaatttcgcctgttttatcgattatgccgctgcctatttccagtgcttcaaggtcgaaatcgtgcttgtgtccgcactcgcagtccgccatcatatcgcgtaatttctgtaaatccataatatgtcgtctccttttaggtaatttaaaaatcgcggcgcgcaaaaacaggttttgcaattaccgcgactcataaaactcttatgcaataatcgtaaaatatataatattcaactgacaatattttatcactttatccgatttattgtcaacaatgcaaaagccgcgcaaaacattataatcaaaaaaattaaatatcttgcgtcgtttttaaacgcaaccgaacgccgtcttcagcgtttttcggtcaatgctgctcctgcgactgttcttccgaagaagaattggcggcgatacggtttttaagctcgtcaagtgcgctgaaacccatggttttaagcctgtggttgcgcgcggcaacctccagaataaccgaaaggtttcttcccggctttacgggtatgacgtacatgggaagctcggtttccagaagcgtatagtaatttacttcgtctcccagacggtcgtattgcttgttttcgtcccacctttccagctttacaacaaggtcgacgaccttggtttcgcgtattgcgcctgcgccgtacatcgcgcgtatatctataagtccgatgccgcgaagctccataaaatgtctgatgttggcaggacaagtccccacgagtttgtcggatatgcgctttacgcaaacagcatcgtccgcgaccagtctgtgcccgcgctgaataagctccaatgcggtttcggatttaccgatgctggagttgccgatgataagcacgcccacgccgaaaaggtccaccagaacgccgtgtatggtttcggtgggggcaagaagttcgttgagataaatactcaattcgtttacgaacgcagtcgtgcgcaacgaagaacggaagatattccgaccgtatttttccgccgccgccataagctccggcacgggttccagaacggtggtgagcacaaggcagggaaagtcgaatttacaaagattttcgcacgcgacgacgcgctcggaagcggacttgtgcttaagataagacatctcctgctccccgattacctggacgcgctcggcggaaaaatgctcgtaatatcccgcaagctgaagcccgggacggttgacgttgaaagtcgctatgtgcatggtgcgttttttgccccgatgcagaatttcaaggttaagacggtcggcaaaatccttgatttttacgtcggtttcgttttcctgaagctcggttaatttaagtttagccatatttcattccccgcaaaatttatttatgatttcagccacggcgtcctcgtcgttgcttaccgtgacgtaatccgccgccttctttacttcctcccgcgcgttggcgaccgctattcccagtcccgcagccttaagcatggaaacgtcgttctggtggtcgcccatcgctatggttttttccatgggtacgtttaaaagagccgccactttcctgagtgcttcgcctttgccgccgttcttacttacgaaatcgatgaaattatcgcttgagtactgaaactgcacgtcatttatgaccagcttttcgtattccgcacgcacttcatcaagtttatccgcaggagccaccgccatagcttttaccactttaaggtcggggtgacttttaatgtacttacacaaatcccccactactttaagaggaacggacgtaatccttcggtactcccggttaatttcgttttcctcttccacatacacccagtcggggtcgtaaaagtgagtatatacgccaagacgcttgccaagttccattatcttataaacggaatcgggagaaatataattgcagtaaagcaggttgcccgacgtgtcggcaatatgcgtcccctgaaaacctgctacggcaatgcgctgtttacctatcccgagataatctagccagccgtccatggagcgcgacattcttcccgtacagataacgaaattaccgccgcgcgaaatatagtcctttatcgcctttacggacttttcgcccaccgtaaaatcgtttcttaaaagcgtgccgtcgaaatcgcagaatatcagttcgtatttcattaaaatgctccgaaaaaaagttttaccgtatgattatacaaccgcggcggataaatatcaagctttttgtccgtcgggattattgtgaaaatagtcgtatacgttttgcgccgtggcggaatctatcccctctatggcggcaagcgtccgagcgtcggcgttttttaggtcctcgtaattttcaaacgccttaagtaaaattgcgcggcgttttttgcccactccgggaatatcgtccagctccgaataatatcttttgccccttagctttcggtgataagttatcgcaaagcggtgcgcctcgtcgcggacgcgctgaagcagccgcagcgcgtaattgtcttttttcagtactatcgggtcgggggaaaaaggcgtaaaaatttcctcctcgcgctttgcaagccccaccatgggaatgtcgtaacccaaataagtcatgactccgtacgcgcttgaaagctgacctttgccgccgtcgattacgataaggtcgggaagataggaaaacttgtcgtcgtttgacgcgcgctgaagccgccttttgattacttcttccatacacttgaagtcgtcggcgccttccacggtttttattttgtacttgcggtaatccgacggcgaagattttccgtcgataaacaccgactgggacgcaaccttgtccactccgcttatgttggatatgtcgtagcactctatcctgcgcgcgctttttattccaagtattttttcaagctgtctgacggcgcccagagtcatgtccttttcccgctcaagtttttccgaggatttaacgaggtaatcggacgcgtttgaatgggcggtttttacaagccttgcccttgcgccctttttgggaaaagtaatgagcggcggtttacccgtcagcgtcccgaggtattccgaaagcgctttcgtatcgaattcctcttcaagacagatttcctgaggcaactcgttatccaaagcgtaatactgccccagaaaagtcgaaaacagttcttccgtcgtcatggacgcgtcgtttatgcggtaattttttacgcccatcattttatttccgcgcacaagcgccacggataccactccgtattctccgctgctggcgtaagcaaaagcgtcaatgtccgtgacgtttccgaggtttgcgacggtgcgttcgcgcagttttttaagcatggcaagctgatcgcggtaaactatcgcgcgctcgaattcctcccgctcgactgcggcgttcatacgctcttcgataagtttttccgccgtatcgtcgtagcccgacaaaaagcgcatgactttttgcacggtttcgcggtactcctctttgcttataaaacccatgcatggcgcgctgcaaagccctatatgataattaaggcatgccctgtcctttttacccatacgcttggggcacgcgcgcatacagtaagcgctttttatcacgcccacgatgtcccacacgtgaataccgttgaaaaacggtccgaaataacgcgccccgtcgcgtttgacttttcgcgtaacctctatcgtcggatactcctgtttaaggtcgattttgatgtaaggactgtgcttgtcgtcctttaaaagaatattgtaatgcggtttgtattttcttatcagattggcttcaagcgcaagcgcgtccttttcggtaagcgttatcatgtactcgaagtccgcgacgttgtccaccatcgcctgcactttgggaagtttgggagaattattgaaatactgccgcactctgtttttcagaaccacggctttaccgacgtaaattatgtttccgcccgcgtcgcgcattatatacacgccgctgttttcgggcagattttttaacttttccttaagcgtcataatttttgctgcgttctctccccgaacgtgattaaatcatatttccttacccgcggcgaaagcgcaaccgcagtaattctgtctgtaaagagcaagctcttcggacagcgttatagaacggcggtacccgtcgcgttttttaaaatcggacggaatccacgtcactcccgttttttcctgcaccttaaatccaacgttgttgattatctccgcgtttttatgcggacttaccgtaagcgtggtgcaaaacgcgttcagtcccagttcctttgccttaagcgcggtcttataaagccgcaattcaaaacacacgggacagcgcgcgccgccttccctttccccctcaagccccttaaccgcggaaataaattcgttttcgtcgtaaggctcggcgatgacctcgagattaaaatgcgccgcaaccttataaagttcccgcaatctcctgtcgtattcctcgcgaggataaatattggggttgcagtaataaagtacgggtttaaccgattttacgacacgttccgccaccgaagtgcagcagggtccgcaacagcaatgcaaaagcagtcctccgcttcgggcgcaaaacgcgtcggtcaacctgtccgcttctttaccgttcattttttgtcctttaacgccgcttcgatgtaatccgcgatttcacccacggtattgagtctggtcgccgcctcgtcgtcaacggttatgcccgtttcttcctcgagggtaaacaaaagctccaccaacacgagagaatcggctttcaggtcttttttaaggtctgtttcgcgcgtgatggaatttttatccgcgtcgagatattgcgcaagcattgaaaccactttttcgaacatttttattttctccttaaaaacggctttgttccgtcgttttttataaaataagcgaaccgctttcaccccaaaactccagcgcgccgtccgaatccgcttctattatcattgcagtcaacccggaaaccgacgaaggaagggttttgccgttaaacttattatactcggcgcccgtcactgcgcttaacccctcgcaagacttaagcgtaaccatgccgcccgaccagacaaactcgacccgtttgtcgcctttagaaagcttaaccgtgacttcctcgcgcgttacgttatcttcggtaacatagccgcgtgaaaacgaaacgtcgggtcgtacgatttccgctttgtcggacgaaaccgcctttttgtaaagcgcaagaactatttccgcgggggtgacgtaattcatgtccgccaccacggtaacgttgcccgcgccgtccacgctgcttttgtgtcttcccacgcccatgcctatgactttgccgctttcgtcgattacgggcgcgccgctgctgccgccgttaagcgcggcggtaacgcgcagtaacggcttgtaatatccgccgaaaagctcgatttcttcactgacgctgactattccgtcgaacgccgctattcccctgcccatggaattacccatggcaatgacttttgtcccctcgggagaaattccgcttcttaacccctcaacagagttttccgcgggagttaaaaggttgcgcgccttgcagccgggcttttgcaccctgtaaaacgccacgtcgaatttgacgtcgtaacctaaaagcgtcacgttttcggtgccgccgacgaaattgttttctccgttaaacttaaaccgaaccgccgcggggtcagagcctgctacatgataacaggtcgctatatccgcgctttcaccgtcgcatgaaattacaaagcccgtaccgtaagtgttgcccacggctatttccgtcacgttatcggcatacagcgcgaaaatagacgaaaaatccgtttccgccggcggcggcgtaacttcaccgttgtcgcaagccgacaaaagcgacaccgttaaagcgataataaccgatattataacggcaaatattctgtttttgcgttttatgcacatattgaaattatatcacacccgggcaaaattgtaaatataattattataggcagtctgattttttacatacgcccggcgcgtatgaatcaatctacgggagtatagtcatggaaaattgcgctaacggtaaaatcagactgcgcggtgccaaattcgtgctttacaatgcgtgcggacagtccgtcgcgtgcggagtgaccaacgacaacggggaaatctgcttcgataatctgcctttgggcaaatactatcttaaggaagtggaggctccctgcggttttgaaaaaagcgacgagtactgcgaagtcgtcatttgcgaaaacaaacgtcgcgaatgcgtggagtttgtaaacgtaaaacttacgggcagcataaaagtcgtaaagtacggaaaaaactgcatctgaaagcaagaaccggcaaagtgcgcttatttaagctctttgtcggttcttgtcgaatagacaatagtaccttgttaaaacaaaatgcttgcaaaaaaaagcgaaacaaaccgagtattatgacgttttcgacaaattactgcaaggtttatgtgcgaaaagcgcgaagtattcggcttatccgacgcttttcgacattgcgaaaattttgtcgcatttaccatagtacccgctttttacgacattaaccgataaatccgacatattaaaaaaggtgcgcctttgctctttttttcacggctttttatgctttccgaatcatttgcaacgtgcccgaaacacatcattcttcttttattaaacccgtcaaagccgtaacttattttgccgtccggtttttcctgtgacttaaaaaaaaagtccgcgcttaacaagcttactccgtttttaattacgtttacggaagtaaaaaagcattaagcacggacgaaacaaataagaatttacaatatttttttacgcgcggaaaatcttttttgtcccggcataataggacgcaagcgagtcccccaagtcgtccacgtaagtccagtctacgggagtaattccgttggctttgagaaactcgttggctttggaaaaatgcttacagccgaagaatccgcgataagcggaaagcggactgggatgcacgctttccagcacgagatgctgcggcgcaacaagcggttttttacttagcgcgtttgagccccaaagcatgaaaaccatgggtttttcgcgtttggaaagctgcatgacaaccgcgtcggtaaactgctgccagcccagattttcgtgactgcgcggctgcccctgacgcaccgtaagcacggtattgagcagtaaaacgccctgttttgcccaaccggtaagagtgctgccttttggtacagagccgatatcatcctctatttccttgaaaatattgacaagcgaaggaggaagaggaacgcctttccctaccgcgaacgccatgccgtttgcctggcctgcgccgtgataagggtcctgacccagaatcacgacttttacttcctcgtaaggcacgtttttgaacgcggaataaatttcggtcttaggcggatagacgatattgtgcgaatattcctgttccaccagctcgttaagtttttgaaaatacgctttggcgtactcgttctgaagtacgccgtcccaagaattgcctattacctgcatgattgaattactccgaaaaccgcggtcaaacaattgccgcgattgctcttttttttacattctatcatacaacaaaaaaattgtccatatatttaaacatatacggacaagagaaggcttttgaatttcaacggcgtttttcgagctttttcgcgcttaaaagccccattcgggaaaattcgacccgattcgcgcaaaaaatcatgaatattgcattttattactttttttgcttgttttcaggtttacgttcgttttttcagccaatacattcggatgcggaaagcataacgtccagaatacgcttgttttttatgtgataaaagcttatcttcccctgacggcggtaatccaccgcccctatcgagcgcagatttttaagctggtgcgacacggttgtctggtttatccccagcattacggaaatatcgtttacgcacatcggagaaatggacagcgcggacaaaatctttattctggtcgaatccgaaagcgttgcgaaaaaatccgacaaagccataagcgtgtctcgctgagggacgtattctcttataagcctgcacgtatttgcatccaacaataactttttttcttctatggtttccatgatataattatacaataaaacgcatatataataaagttttcacgctgtcggaatttgccgaataaatcaatatcgggacttttattgtcagactttaaaaggaggtttgcggataattgaatcaggaagatattttcagactgctgcttatcgtgctgttgcttgcaaaccgccagcttgcttcggacgtacattcggacgacagcgacgaaacagatgaattttcatacaccatgataaacgatttgcttatactcgtaatggcgactcagcttttcgacgggactgactcctccgctcaaaaaaacacaactttccgataaatgtttacacacgcttcgtgtttaaataaatagagattattatgaggattaaataaacttactttacctttaccgtcaatacgtttttgtcgacaaatatacaaaacttaaggaaaataaattcacttaaaaacccagataaaaattaatttcggaaatgttaaggccgctcaaagtgtataaaacattaaactcgtgctgtataaaacttgattttgccgccatttaaaaggacggcagtttactgagaaacaaacgtaatatgaaaaaaacgcctcggtaataaaattatcgggacgttttttactgcattgtattttattgcggcaaacgggttttacattctgtccggtgcgtttataagcaacagtttcaagccttccttaagcgcttcggcaacgtaacgggtaatcagaaggcgggtatacatgacgtccggcttttcaccgatgatgcggcaattaagataaaaacggttgaaaaccgccgcaaggtccagaagataacgcgaaaccacgctgggctcgtattttgctgcggcgtcagagaccacgtcgtcaaacgacgacaaaagccttacaagcgtaaaggagtcatcgtcggtaagaacgtcgtaatcgattttcccgtccgatactcccgcgcgggaaagaaccgagcggcaacgcgcatgggtgtactgaaggtaaggagcggtttccccctcgaaagacaaagccttatcgatagagaaaacaaggtcctttatcctgcccgaagaaagcgcgccgaatataaccgcgcctactcctacgtcggatgcgattttctgcttgtcctcaagttcgggatttttaccctcgatgactttggcggctttttccaccgcttcgttgagcacgtcgtcaaggaaaactacattgcctttgcgcgtcgaaagggcgccctgcccttccagactcaccataccgaacgggacgtgcacacagtctgacgcccacgttttgcccataagctccaaaaccttaaagacctgcttgaagtggagattttgctgataagccacgacataaaggtttttgtaaaaatcgtaatgctgtttgcggtaaacggcggcggcaagatcacgcgtggcgtacagcgtagcgccgtccgacttaagtataagacaaggcggcataccgtatttttcaaggtcgacaaccatagccccctcgctttcggtaagcaggtttttcgccttgagctcgtcgattacgggctgcattttgtcgttgtaaaaactttcgcccgcataggaatcgaattttacgcccagtcggtcgtaaactcgcttgacttccttaagcgtgatgtctttgaacttattgaatatttccaaggcgcggctgtcgccgtcctcgatttttttgaaccacgccctgccttccgcctccagactttcgtctttttccgcctcggagtgaaagtggacgtaaaggtctaaaagcgcgcgcacgccgcgtttttctatgtcaaggtcgtcgccccaatttagatacgcgactatcattttgccgaattgcgtaccccagtccccgaggtgatttatgccgactgcgttataaccgagataattgaagattctgtataaagagccgcctatcacggtggtaagcaaatgccctatgtgaaagggctttgcaatgtttacggacgaataatctatgcaaaccgtcttgccgttttttggctttggtttggttacgccgccgttttgggaaaaagcggtaaccatctccttaaccgcaaaagcacggttgaagaaaatgttgaggtatccgccctccaccgcggttttgcctataagcggctgagaggaagaatctgttttttccttaagctcgcccgctattgcctgcggacttttacgcagaatttttgcgaatttaaagcaaggaagacaaacgtcccctttgtcaagcgacggcgtgggcgcaagcgcagaaaaaatatcctcttttttaatctcgtcggatttgagaatctccgaaattatatccttaaaattcataaattcctctttttatcaaacgttgaatctgaaaagcgcgacgtcgccgtctttgaaaacgtaatccttgccttcgctgcggacctttcccttttcctttgcctggttgaagccgccgcattccacaaggtcgtcgtaagtcacgatttccgcgcggataaaacccttttcgaagtcgctgtgaattttgcccgccgcctgaggcgctttcgtacctttttcaatcgtccaggcgcgtacttccttttcgcccgccgtcagatagctgataagcccaagaagttcgtatccctttttgattatacggtttaatccgctttccttaagtcccatttcttccaaaaaaattgcgcgctcggatttgtccagctgggctatttcctcctcgactttggcgcatatttccataaattcggaatgttcttccgcggcgaactcctttactttttcaacgtaagggttgggttttcctatatcgtcctcgccgatgttggcgcagtaaatgacgggcttagacgtaatgaggaaaaatccgtcggtcatggccttttcctcctcgttaagattaagcgtgcgtatgcacttgccgctttcgagagtatcgcaaagctttcttaaaagctgagcctcctcgatgtaacttttttcgcccgttttaacgtatttttccgctttgtcaaggcgtttctttacgctctcgaggtcagacaggacaagctccagattaatggtttcgatatcgcgcaacgggtcaatactgccgtctacgtgaattatgttagggtcgtcgaagcatcttacgacatgaacgatggcgtccacttcgcgtatgtgggaaagaaatttgtttccaagtccctcgcccgccgacgcgcctttgacaagccccgctatatccacaaactcaagaacggcaggcgtaactttttttgtattgtacattttcgccagcacgtccagcctttcgtcggggacggcaactacgcccacattgggctctatggtgcaaaacggataattggcgcattccgcacccgcctccgtaatggcgttgaaaagcgtgcttttacccacgtttggaagacccactacacccagtttcattttaccgagatttctccttgaagtgtttattaagtaaataatagtatataacatcgcacggatttttgcaacgctttttgctttgacacacgcaaaaagagcgcgaaagaatatttctttcgcgctctttcgtattttaataaggtttttttaccgcgcttatcttacttcaagactgtcgtttgcccattcggcgataaggcgcttgaatcttttgtcgtaactttcgcgcattgcgtaatattcgcgccaaagctgatcgctttccttgttgatttcgtcaagacgctccttaagctgaaacatcttttcaaactgtttatcgagctctgccttgcggtactcgaaaattgcgtccgcgtcgaaagtcgtttcgtcgtaaacgattgtttttttcttggacgtatcgccgttgttttgtctggaaacgctgtccgaagaatttttcaccgtaaccgtttttttgtccgaagcgttgtttgcgggctcctcttttttcacggttttttcgttgtcggagggaagaatttccacttcggcgtagtttttgtcggttccgtcgctcttcttgagctcggcagtcgacgccttatgacgcggctcctttataaaaggcctgtcggcagcgttgctgtcaggcttttcagcaaccattacgatttgcttattgtcctgttcgatcagctcttttcccatgtcgtcaaggggcatggctcccgtcgaaaacacgcttattaaagaaacgataagcggaactattttaatcacttttttatacctcctgtgtgttgttgcgaaggtagtattttttgcggaacccgattttattcacagaatttttcgaataaaaattagtgtacgcaaaaaaaagcgtacaaacaaaacagatttgcacgctttaatcatataagattttttttataaaatcagcttaattcaatcttcgacaagcgcaaaggctattttatcgaaagaaaccgactccacgcggattctgattttgtcgccaatgcggaaacggtgagaaacgtttgaaacaagcagtctcttttcgtcgaaaacgtaaccgccgcccggcaaattttccacgcgaatcatgccttcgatgccgttatcgagttctgcaaacaagccccactccgtaacgccgtcgatgaccgcgtcgtacacgcttcccactttatcggtcatgaatttagcttttaaaaggtcgtcgacgcttctttcggcttcgtcagcgattttttccctctcgctgctttgaacggatgcttcttccgcgaatttaccgaattttttatcggggtcggcgccgccgtgaagaacatatttgattattcgatgaatcgcaaggtcgggataacgccttatcggcgaggtgaagtgacagtaatattgtgccgccagcccgaagtgcccaagacacgcgggtttgtattcggctttagacatcgaccttagagcaacgcggtttactattcccttaatggggtcttcgagatttccgataagttttgcgtaatcgtcaggcttaggcttattaggcacgctaagcccgaatccgtctaaaaatgcgttaaggttttccactttttcttcgggcggagcttcatgtacgcggtaaacgaaaggcaagttgcgtttactgaagtgctgcgccaccgtttcgttggcgataagcatgaactcctcgataagcttatgggaaaacagtcttgcgcgctttctcacgtcctttacggtgccgttttcacccatgattatttcacattcctcgatatcgaactccaccgagccgcgctgcattctgagcgcgttaagctttttggcaagctccgccgcggagtccagcatgggaagaagccgcgcatatttctctcgttccgtttcgtcgccgtcgagtattttttgcaccgactcgtaggtcatgcgcgccttcgagcgtattacgccctccgtaatttcatgcgaaagaatgttgccgtcctcgtcgaaatccatgatgcacgaaagcgtaagcctgtccaccccctcgttcagcgagcatattccgttagacagcttttcgggaagcatgggcagcactctgtcggcaaaatacacgcttgtgccgcgtttgaacgcctcggcgtcggttttggtgttttccgtcacgtattgcgccacgtccgcgatatggacgtaaagacggtagccctttttgtttttttccacgcaaatcgcgtcgtcgaaatcctttgaagcagcgccgtctatggtcaccgtgtcgtcgccgcggaaatcccgacggtttttaacgtcttccggtcttacttcgtcgggcatggcggcggtttcccttataactgcgggaggaaaagtctcgtacagcttgttggcgcgtattacgcccattatgtcggcgtaaatatccccttctttacccagaatctcggtgatgcggcatttcagcgggtcagaaccctttataagctttgccaccaccttatctcccgcctcagcgtttaatgagccgtgtttatccgctttaatctgaccgaagccgcgctccgacgcgacgacgtatctgccgtcgaaaacgcctacgacgtcggtaaatccgcgtttgataatcctgaccacttccgcctctccgttgccgcggcgtgaagaaattttcaccgcctccacagtatctccgtgcatcgcgccgttaagattttttgcggcgataaacaaatcgcccgactcgtcggacggtataaaaaaggcaaaacctttgccgctgccctgaactaaacccacaagagtttgttttgcgtccaaggcaaaattattgtttttcctgcgcgcggcgcgagcaatcggactctttttaccgccgcgtttgttgacaaattctttttttgttttgttgactctttgttttttcatgatgaatttccctgcctctcctttcaaaacagcacagtatatatcttctccgatataaaccgtttcaaaaacaaaagcggacgaaaaacccgtccgcctttttattcataattaattaccgttgtaaatcgcaaccgatataaagaacaatatggtaagcacggctattgcaatcgcaagcaccaccgtaagacgcttgagcgcgctttccaaagtttgcgatttgtttttcgagtaataagtgtcggtcgaactgccggaaatcgcgtttatgttgctgccgtcgttgccgggctggaaaagaacgacgaaaataagaaccaaagaaagcacggcaatgagaataagaagcaccattcttataatcgggaacgactgggaaacccaattcgcgaccgcaagatattgtaaattagaaagattcattatagacacctcacactaaatgcttatcgattatatcacaaattttaacggcgggcaagcgtttttaattaatttttggtaaaatccgccttgtttttgggtaaagttcgggtttttgaccgctcgtgtagggttttcggcgcaaaaaacagattgcaaccgaccgacttgacctttgttaaagcgaaatgtataattgttttacattcttaattaaggagtaatatttgtatgctgtccgataaatttatagctttgggcgaaaaatacaacactatacgcgagcacgtggccgcgccttatatgagaaaaagtttttttctttcctctgttccgcaaaaagcggaaataacggtctgcggactgggtttttacgtactatggattaacggcgaaaacataacgaaaggcgcgcttgccccttacatatcaaatcccgaccagataatgtattacgaccgttacgacgtaacggacaaactgaataagggcgaaaatgtaataggactgatgctgggtaacggtatgcagaacgccgacacgcacgtatgggattttgataaaaacgctttccgttccgcgcctaaagtcgccctttctttcgaggcggacggtaaaacgatgtttgaagcggacgacggatttacctgtcacccctcgcccgtcacttacgacgatttgagagcaggcgaaagatacgacgcaaggctggaaattcccggctggcttttacccggttttgacgacaaagactggctgaagcccgtttctgtgccctcaaacaagggcgaaaaacgtatttgcaccgcttcgcccgtgcttaaacaaaaagaactgaaacccgtttcggtaaggcgcacgctggcaaaccattacgtttacgacttcggcgaaaacaactcgggcgtggcaaggcttaaaataaaaggtaaatgcggtcagacggtacgcattatcttcggcgaaatcgcaaacgacgagggcgtcgatcaaagcaatatttccttcggccccgaaaccatttcgggatacattcagcatatcgaatacacgcttaaaggcgacggcacggaagaatacacacccttctttacatatttcggcttcagatacgcggaagtaagcggaataactccccagcaagcgggattagaccttttgacttacgtcgttttaagcggagatatgccgtcgtgcggcgaatttgttaccagcgacgaaactgtaaacagaatccaggatattaccttgcggtcggattactccaatttctactacttccccacagattgcccgcatagagaaaagaacggttggacgggcgacgcagcgctgtcggcgcagcagtttctgatgaacttcgacgccgaagccagtcttgcagaatggatgcgctgcatttgccgcgctcaacgcgaggacggggcgttaccgggaatcgtccccacgggcggctgggggttcaaatggggcagcgggcccgcatgggatatcgccattgtggccattccctatatgctgtatcgcataaacggcaacctggattgctttaaggaaagcgcggacagtatttacaaatacatcgaatacataccaacggttctaaataaagacggattggcagaatacggccttatcgactggtgcgaagtcaactcgctgaacagtacgcctttggtaattacggacacgcttactcttcttaacctttgcgacatggcggaaaaactgtttattgccgcgggcgacaaaaaaagagcggaaaattgcaagaaacttttcttgaatcttaaatccgcgttccgcaaaaaacacatagacttaaaaaccaaatcggttattcccgcaacgcaaagcggtcaggcgatggcgatgtattacggtgccttcgacaaagaagaaatgcccgaggcgcttataaggcttaaagagcttatcgccaaatacgacggtcatttccaggtgggagtgctgggcgcgcgcgtgcttttccgcgtgctttccgacatgggagaagcggagcttgcttactccatgattacgcgtcccgacttcccctcctacggctggcaggtaaccatgggatttaccgcccttttggagtccataaagaagcttaccgtcaaagcgcctttcaccgagtgcctgtttgaagacggctcggtaggcggacgctcgcttaaccatcatttctggggggacgtaagcggctggttttacgagacgatcggcggattaagaataaatccctgccttacttcctaccgcgacgtcgtaatcgacccgtgttttataaaatcgctggactacgcaaaagcatcgcatgtttataagggaataggcacgcttacggtggaatggaaacgggaaaacgaaaaaatcaaactgacggttacagtacccgaaggcataaacgcgacttattccaaaaccggtaaaaagttaagcgcgggcgtaaacgaaattatcgtttaacgcgcttttagtaacatactaaaagcttaataatatctgtttatgtacaagcataaaaaaagcctccctgtttcaaaggaggctttactttttttaagattaagtcggcagcgcagattttaaaatttctgcatatattcgcctatgattttggcgcagattttcattaaagcaatttcctcgcgggtaatttccttttcggaaactatgcacagtccgccgaaacaatccccgccggaaatggaaggcgtcattgccacgtaaaattcgggattagcgccgataagctctccttcgcgttcgcctccgctaaggtagacatcacggtctttaagcagttttaccgcccatttggtgagctctttaccgataaattcgtttttgcgctcgccgaagcccgcaacccaaccgtcgaagtcgcacacaagcaacgtgccgcgtatttcgtctgccgcagctccggctaccttttcggcatttttaataagctctcctttggtgtctaccttcctgatgattatatcccctcccgccaatgcgctgatttccatcgggtcgccgaggtctattccgtgcagtttacggtactctcttggtataacgattcttccaaggtcgtctattcttctgataattcccgttgtttccatattataagcgtttagcgcgacaaactgtttatgccgctttctcctccttacggaagtagtatcttaccttttatcgcgttttattacataaattttgtaaaatttataatttcggtattatttaaacgtaaaacgcaaacgttgacttttgtcaaagataattatataattttaccatgatgaaaaaggcgaaaatcaaaatcaaggaatttaacgaaaacaatcctttcgaagggaaatactttacagacggaaataaacattgctttatttttccctgcgaaaaggactattttaaattcgaattgtcgccggacggtattcgcgtcgtgagaaagggggaacacgaatacgagatgaatcttgtcaaaggcgaaaccacaaaaatagtaatgagtaaacctttgaacggatttttttcggtaaccacgcacgcgatggaagtaatggcgcacgggaacgccgtcaccgcttgcgccgaattttacctggacgaagaaaatttccgtcggttggaaatagagtgcgaaatcatctgacctgacgcaataacatttttttaattttaaataaacaccttttttatatcggaaatttacgcaataaaaaaacgccttatcggaaagcattattccttaaggcgtttgtttattattatattttttaatagacatcggcaaaaaagctttaaaaaatcgggaaagcctatgctttttaacttctattttacaagttcgatttcttcgccggggtgcaaaaccagtttacctttgcaggagaatctgtcagccaccgcgtcggaaaaaagcgtttcgggtttggtatgaacggg

SEQ ID NO: 1091 - DNA, 4031 bp, Unknown
  16S sequences of unknown bacteria
cgggatctccaccacggccttcacatcctccagcttggccagctgcagcttgatctgattgatcacgcgctcatcgccatgcgtggtgatcgtgatgcgggagaagcgcggattttccgtctctcccaccgccagcgaatcgatattgaacccacgctggccaaacaaattggtcactctggtcaacacgccgaaatggttggcgaccagcagcgataatacatttcgttccatatgcttcccccttagtttccgatgatgatgtccttcgcaccttttcccggcgggatgatcggatagacacagtcatccttgtcgatccagcagtcgacgacacagacggtatcgctgtgcatggcctccttcatgaccggttcgatatcatagcgggtcttgatgcgcaggccctttccgccaaacgcctccgccagcttcacatagtcggtggcgcggtcgatcgtcgtattagagtaacggtgctcataaaacagcgtctgccactggcgcaccatgcccagcacatgattgttgaagatgagcacgacgatcggcaggttctcgctgaccgcggtggccagctcgttcatgttcatgtggaagctgccatcccccgtgacgagcacgaccggacgcttcgggttggcaatcttggcaccgatggcggcgcccatgccgaatcccatcgtgcccaagccgcaggagctcacgaagctgcgcgggcgggtgaattgataatactgtgccatgatcatctgatgctggccgacatcggtgacgatgatcgcatcctcgccgacgatctgatgcagcgtcaaggccagatcgcgcggatcgaccgcgtccccctccttcggcttaggcagaccaagcttcgtcttaaaatccttcagcgtgtcggtccactccttatggcgtgtctccggcatccgctcgatcatgtgcttcaggatgtatttggcatctcccacgatggccatatccgaatgcacgttcttggagatctccgacgcgtcgatgtcaaaatggatgatcttggcattcttgccaaattcctcacgattgcctgccacacgatcagagaaacgcgcgccgatcgcgatgatcagatccgtgttgagcgtcgcatagttggccaccggcgtgccatgcatgccgatcatgcccagatacagatcataatcatacggcacggaagacaggcccatcatgctcgtggtgatcggaatatccatatgcttggagaagctgagcagctccttggtcgctccggcgctgatgatgccgccgccggaatagatcaatggacgcttagcttccttgatggcgttcatcgcctcctcgaacttggcctcatccaccttgggcagcttgcggatacggtacttgggcaatgggatatattccgtgaccgctgcggtcacatccttgggaatgtcgatgagcaccggccccttgcgccctgagttggcgatcacgaacgccttgcgcaccgtggcggccagatcctccacccgctgcacgatgaaattatgcttggtgatcggcatcgtgatgcccgcgatgttcacctcctggaacgaatctctgcccagcagatcattggagacattgccggtgatggcgaccaccggaacgctgtccatgtacgcggtcgcgatgccggtgaccaggttggtcgctcccgggccgctggtggccaggcagaccccggtcttcccggtgctgcgcgcatagccgtccgcggcatgcgccgccccctgctcatgggaagtcagcacatggcggatctcgtcgctcttctcatataatgcatcgtaaatgttcagcactgatccgccgggataaccgaatatcgtatccactccctggtcgatcagagactgtatcagtatctgtgaaccattcatcttcatccgtgtcttcctcctttactccaatgtcacatcatagccgttcgccctcagttcacggatcatcgcctcgccatgctccttgctgctgacctcgacccccatatggatgatggtctcattcaggttcagatccgctgaaatgcggtcataccgcacttcgatgatattggcattgacctcatgcaggatgcccgcgatcttttccagcgatcccggcacatcgagcatcggcgtcttgaatttcatgttccgtcctctggtcaccaggcccttttccacgaccttgtgaatgaaggacacatcgatgtttcctccggaaaggacacagacgactcgtttgtccgcgacatcgatcttgtgattgagcaccgccgccagcgaacatgcgccggccggttccaccacctgcttttcccgctccagcagcagcaggatcgcagaagcgatctcatcatcgctgaccgtcaccatctcatccacgttctcctggatgagcgctaccgtcttctctcccgggttcatgaccgcgatgccgtccgcgatcgtattcacggtgtccgtcgaacaatgcttcccgctgcggaaggaacgcacgatggcgtccgcgccctcagcctgcacgccgacgatcttgatgcggggattgatctgcttcgcgtagaagctgatgccggccagcaggcctcctccccctgccggaacgacgatcatgtccacgttgggcagatcgcggcagatctcataggcgatggtcccctgcccggcgatcacgtcctcatcgtcaaagggatgaatgaacaccgcgtcgcgctcctgctggatgcgcagcgcctcttcatagcattcgtcatagttgtcgccggccaagacgacctcagcgccatatcctctggtggccatcaccttggcgatcggcgtgctcttgggcatcacgatcgtcgcctgcatgcccagctgtgcgctcgcatagcttaccccctgtgcgtgattgcccgcgctgctcgcgatgaccggacgcgtgctgcctgcttccttcagccgcgccagcttgttgaaggcgcccctgaccttgaaggaaccggtcttctgccggttttcgctcttcaggaacaggtcgcatccgctcatggccgaaaacgtctttgagctggtcaccttcacgttatggatattgccctgcaagcgcttcgccgcggcctctacatctctgctgttcatttaacccctcctatttaacaaaaaagcagcctatctgaaatagtgctgcttttctttcaatcctcatcatcactcagcaatgacaaaagagatctgttgccggagaaccgctctgcggtattcttgaaagaaaaacagacttgcttaggactataaggataataataatcactgccaggcccatcatggcgtccacttcctttcagatccggtgttgttcatagtttaaaactttttatgaggcatgtcaatacaattgataatattttctgaaaatacttgctgtttgtttcattattttatgaaaccgctctttttcccgcttttcaaacgacttcggtttcgctataatacatggtatatacgcaaagggggcttcatctatgtatcaggaatacgcccgtctcgtcgtctaccgcgggttccccgctgacagcatcttccgtcagctgtgcagcatcatccgcgagttcgatgaaggaagcgcgccgaaatacgaactgatcgaccggatccacgcccagatcaaggcgctgctcgatctgtctaccgaatgcggattcgacggcgatctgtggcactgttatctgacctggctgctcatgacccacgagaattccttctctttggtctgcgagaagaagccggctccgcaagggacggtcaatctgttcgtcctgcaggatctgcaagtgttccgggaactgttcgactatgacttcagccgtctcgaaaaacggctgaatctcgactgcttctcgctgatcacccactatcacgccgtcgccaagagcgagcgcatgtacaaccgcggcgtcagcgagatggtgctgcagatggtggacaagctggagaacagcgagagcgcggaagagatgtatgacgcgctgaccgacttct

SEQ ID NO: 1092 - DNA, 12235 bp, Unknown
  16S sequences of unknown bacteria
ctgagcgaagcgatgcaggcgctgaataccgatgaaagcacagacgccctgagagcagatgtacaagcgacgatcgaattcatcaatgaaaatatcttgaccaatgtggacggcattcgtccggtcaaggtgcaggcgctgaaagatgcggtcgccgcagcggaagatctgctcgccaatgcagatgcaagcgcagatgagctgaaggcagcgaatgaagcgatgaccaaagcagcacaggagctgtgggagatcgtctccaaggcagagctgaacgcattgatcgaggccgctaacggatacctcgatggggaatatacggcagaaagcctggaagccctgcaggcagcgatcacggctgcacaggcagtggcagacaatgacgatgccatgacatcagaagtcaccgaggccatcacgaacctgagcgatgcgatcgcgggattagttgaagaagcaggcgtagataagagcgcgctcgcgcatgagatcgaactggtcaatgagatgatcgccaatctcgatgactatgtaccgagcagcgtagaaggcttggcagacaagctgtcttctgcacagcaggtctatgatgatgcgaacgcgacccaggaagaggtcgatgccgcaacgcaggcactgcgtgaagcgcgcctgaacgcgcgcacaaaggccgatgtgagcgcattggaggagatcatcgcctatgcgaacagccttgatctgagcggttacagccgcgcgtcggtcgcagcgctgaatcaagcgatcgcacagaacaagctgatgctcaacgatccggaagtatctcaagatacggtggacgctgcggtcactgagatccagaacgccatcgacgcgcttgagccggccagcagcgcttccgtggatggcgcaggaacggcggcatcttcaggcacttcgtcctcagtgacgaataccgcagcgcaggcacaaaccggattattcatcggtgtgctggcagtggccgcctgcggcgtcctcctgatggtgatcaaaaaacgccgcaacaaagcgtgacgtatagcgcataaagagaaatgaagcacagatcggactctcgtacagaggatccatctgtgtttttttcttcgttcagcgtgatttttattgacagaaaccgcttactttgctatagttaaaccagatatagagtgttactggtcatgcaggcattaactattgaagaaattagtcccagggggattctttgatgttaatgcctttttgtatgccggcgcggctgacggataaggatgactcccgggcagaaagggagagagaaacgatgaaagacaagattttcggtgtattgcagagaatcgggcgaagcttcatgcttcccatcgccgtccttccggtagccgggctgctgctgggtatcggaagctcatttaccaatgaaaccatgatcgcctcttatggcctgcagggcattttgggcgatggcacagtgcttcatggtctgctcacggtcatgtccaaggccggcagcgccatctttgacaaccttccgctgatctttgcggcaggcgtcgccatcggtatggccaagaaggaaaaggaagtcgcggcactgtctgccgtcatcgccttcttcgtcatgcatgtgtccatcaacgcgatgctgacgatcgatgggcagatcttggcagatgggtcgatcgcgccagatgtgctgagcggaacgatcgcgtccatgtgcggcattcagacgctgcagatgggcgtgtttggcggcatcatcgtcggtcttggcgtttccgcgctgcacaatcgcttttacaagatcgaattgccgaacgcgctgtccttctttggcggcagccggttcgtgccgatcatttccacggtcgtcttcgtctttgtcggcatcctgatgttcttcatctggccgatcgtgcagaacggcatctatgcgctgggcagcctggtcaccggcaccggctatgtcggcacgctgatcttcggtatcatcaagcgcgccctgatccccttcggcctgcatcatgtattctatctgccgttctggcagactgcggtgggcggcacgatggaagtggccggacagctggtacagggcggtcagaacatcttcttcgcgcagctcgctgatcccagcgtcgtccatttcagcgcggatgccacacggtacttctccggagagttcatcttcatgatctttggtcttcctggcgcggcgctggcgatgtatcactgtgcaaagccggaaaagaaaaaagtcgcaggcggcctgctgctgtctgccgcgctgatgtccatgttcaccggcatcaccgagccgctggaattctccttcttgttcgtcgcgccgatgctgttcgtcgtgcaggtcatcttggccggcgcagcatatatgatcgcgcatatgctcaacatcgcggtcggactgacgttctccggcggattcctcgatctgttcctgttcggtatcctgcagggcaatgacaagaccagctggatgctgatcatcccggtcggcatcatctacttcttcctgtattacttcatcttcaagttcctgatcaagaagttcgatctgaagacgccgggacgtgaagatgacgatgaagagacgaagctgtatacgaaggccgatgtgaatgcacgcaaggaagcgggcaatgccgctgctgcgcctaatgcgctttctgccatgatcaccaaagggcttggcggcgcgaacaacatctctgatgtggactgctgcgcgaccaggctgcgtgtgacggtcaatgatgcggacaaagtgaacgaaggcatcttgaaacaaagcggggcagccggcgtcatccgtaaaggaaaaggtgtccaggtgatttacggaccgcgtgtttctgtgataaaatccgatctggaagaatatctgcaggatccggtggaagtggaagagccggccatgatcgaaacggcagcgcaaccagagccgaagacccaggagatcagcgaagtgttcgtttccccgatgaagggcgaggcgaagctgatcacggagacgccggatccgacatttgcgcagaagatgatgggagacggcatcgtgatcttcccggaagacggcacggtgtacgcgccgtgtgatgcgaccgtgcagtttgtctttgacaccaagcatgcgatcggattgacctccactcagggagtggagatcctcatccatgccgggatcgatacggtcaagctgggtggaaaaggattccatgtctttgtggaaaatggccagaaggtcagccgcggcgacaagctcatggagatcgatcttgactacatccgggccaatgcaccttctgatgcggtgccgctggtattcactaatctaggcgagcatcatttggagctgctgaagctgggcacggtttctgtcgaagacgaattgatcagggtaagataatgcctgaaggaggaagagcatggcaaagatcatcaaggtactcaatcacaacgcgctcatcgtgcacgatgcgcaaagcagccgtgctctcctgctgctgggcaaagggatcggcttcggacggcggatcaatgaacagctggagatcggcaaggcggagggctgcagcgtgtatgagctgcagcagaagacgagcaagggagagacgcgggatgtgctgcgcagcatggatccgctctatctggagatcagcgcagagatcgtggagctggctgaacgggaattcggtgagatcgaccgcaacatcctggtgccgctggcagatcacatcgcatttgcgctcacgcgcatccgcagcaagatgaacatcaccaatccgttttccaacgatatccgattgctgtatcccagggaatatgaagtggcgctgaaaggccggcagatcatccttgcgcgtgtgcatgaggatatcaatgaagatgaggtaggctatatcaccttgcatattcacagcgcgatgggcgaaaaggtggatgagggcatgctggcagccgtcatcgtcaatgagagcatccagcagatcgaacaggaatgcgggctgtccatcgatgtgaattctctttcatacagccggctgctcacgcatatgaagtatctgatggcgcgcctgcgggagaatgagacgcttacgctggatatggaagaatatacgaaaaacgcgttcccctattcttatcaggtggcggcgcacatcatcgagcggctgagccggacattgaaccgggaagtgccgcagatcgagaccggttatctggccatgcatatcgaacgtgtctgtcagaatgaacggcaagcataaaaatgaggagacgatgtcccttccgggaacaaggtctcctcgtttttttatttgctgtgcactcggtgcagccggcctttggccatgaccaggatgagcgagaggatcgttaggctgacccaggtcagctgatcagataagaacgacatcagcacgtgatcagcaatgagatgaggatcggcaaaagcatcacgatgacgccggtgatcaggtttgcgatgcatttggccgcgttgatccaggattctcctgcagcggtcggcacgatgatctgatcgatcttgcgggccctttcccgcgcatacgtgcctgcgcacaggatgatgacaaacaggaaaggcaggatgtatgtcgaatgatacaaggtgctgcggtaagattccagcgggatgcggctgctgtaacggatgctttgtgtctgcacggcctgttcgaagcgggcacaggcttcatcgcgatctcgccttcgtccatcatgatgcctgagacataagggcggaatgcctgcggatgggtgaacatatagagcgtcggaaattgattgatggatttctctatggatcgggagaaccgctcctcattcatctcttctgatccataaaaggggtagatgtcgctgaagtaaatgtaattgagggtgatgatctggttttccttctcatggatgacatagagctgaaacgggttgttctcttcatcgtattcaccaaaagagaatccgctcaactgctgcaatacgctgtcattgtcaggatcgccttctgtattatacagggcctggatgcgggaaatatcctggtcgttcaatgtcacgtttgcattgcgggcaaacagtccttcccagtcttcgccatacagtttttgcatcctttgctcatcgatgtcctgggacagctcgcggtatcgctcgttgtaatcttccatgtaacgtgtccacagggccatgtcggccgtcccctcatcatgggagagcatggagtgggcatagcggttgacgcagatatcgaaggcggtaaaggcgtaaaatccgatcaagaccgccagcgtgatcaacgacagctcatttctgtaaaaattatagcttttgcgggccatactgtcatcgcggggaggaatttggcaaaatgaagcgcaaaagcgtgcagaccatggtataatcggacaaaaggaagtgaatagagatgaaagatgtacagatcgaacagatgatcgaaaaagaagcgcagcgtcagctgctgaacattgagctgatcgcctcagagaactatgtttcggatgatgtgttgcaggcagccggcagcatcctgactaacaaatatgcggagggctatccttcaaaacggtattatggcggctgctttgtcgtggatgaaattgaggagctggcgcgtgagcgtgcgaaaaagctgtttggcgcggagcatgccaatgtgcagccgcacagcggcgcacaggcgaacatggccgtatacatgagcgtgctgaagccgggagacaaggtgctgggcatgaacctgacggctggcggccatctgacgcatgggcatccgctgaacttcagcggcctgctgtatcagttcatcgattatggcgtagatccccaaagcgagcgcatcgattatgaggcggtgcggcaggtcgggctgaaggagcgcccgaagctgatcgtggccggggccagcgcatatccgcgtgtgatcgattttgccaagttcagggagatcgcggacgaatgcggcgcgatgctcatggtggacatggcgcacatcgccggtttggtagctgcgggcgtgcaccccagcccggtgccttatgcagattttgtgacgacgaccacacataagactttgcgcggaccgcgcggaggcatggtgctgtgccgcaaggaatatgcggccgcattggataagaccgtgttcccgggcatgcagggcggtccgctcatgcacatcatcgcagccaaggctgtctgcctgcatgaggcgatgcagccgcagttcagagattatgccgaggcagtgatccgcaactgtaaggtgatggcagataagctgcaggccggcggtctgcgcatcgtgagcggcgctgaggcactgctcgatgaagccggcatcacctgcaataagaatacgatcccctttgatcaggaaaaaccgttcgtgaccagcggcatccgcctgggcagcgcggccatgacctccagaggcttcggcgaggaacagttcgccatggtgggagactggatccttcgagcattgaagtgcgagagcggaagcgaggagctgcgtaagatccgtgaggaagtccgtgcgctgaccgtacgctatccgatccgtcacgactgatatgatccgtatcgtcgcagtcgggaagatcaaagagaaagcgctgagccagctgatcgcggagtatgtcaagcggctgtctgccttcacccgcgtggagatcatcgaggtggcggatgaacatgccccgcagagcaattctgacgcggaaaacgagctggtcaaggagcgggagggcgaacgggtgctctcccgcatcaaggaaggcgagtatgtcatcctgctcgatctgtgggggaagatgtttgacagcgagcgctttgcccagcggatcgacacgcttcaggtgcaggggaagggcacgctgaccttcgtgatcgcagggtcgcttgggccttcgcccgcagtggtgaaacgcagcgatctgcgctggaagctgagcgatctcacctttccgcatcagctcaccaggctgctcgtcctcgagcagatctaccgcgcgcacatgatcctttcccatcgtccatatcacaaatgacatccgtgaaaaacggcttggataagggctgaaacgcccttggaaacggcgaaaagacttttcattgaaaatgttcagtgatataataagtgcagtcatgtaaggaggaatttgacaatggcaaaaagaactgtaaaagaccttgatgttgccggaaaaagagtaatcgtccgctgtgacttcaacgtcccgagaaaagacggcaagatcaccaatgacaaccgtatcatccaggctctgcctacgattaaatatctgattgaaaacaaagcgagaatcatcctgatgtctcacctgggaaaggtaaagaccgaagaagacaaggcgaagaacgatctgcgctgtgtcgctgaacgtctggctgaactggtcgacacgaaggtaagcttctgcccggtaaccagaggcgaagagctcgagaacatggtcgctgacctgaaggacggcgagatcgtcctgatgcagaacacgcgttatgagaagggcgaaagcaagaacgatcctgagctggctcagtactgggcaagcctgggcgaagtgttcgtcgaagatgcattcggttccgttcaccgcgcgcatgtttccacagtgggcatcccgtccatcatcaaggaaaacggactgggattcctggtagaaaaagaagtgaccatgctgggcaaggcagtcgatacgcctgagcgtccgttcgtggccatcatcggcggcgctaaggtatctgacaagatcgctgttgtggacaacctgctgaagaaggctgacaaggtcatcgtcggcggcggtatggcatataccttcatgaaggcgaagggaagagcgatcggtacttccctgctggaagaagacaagatcgaactggctaaggaatatatggaaaaggccggagacaagctggtcctcccggtcgacaacatcattgcggacaagtttgcggaagatgccaatacgcaggtcagcgaaggcgacatcccggatggatggatgggtctggatatcggaccgaagaccgtagaactgttcaagaagacgctggaaggcgcaaagacggtcgtatggaacggtccgatgggcgtattcgaaatggagccgtttgccaagggtacgctggcagtctgcacagcgatctctgaactgccgggcgcgacgacggtcatcggcggcggtgactctgcagcggcagcgatccagctgggattcaaggagaagttctcccatatctccactggcggcggagcttccctggaatacatggaaggcaaggagctgccaggcattgccatcatcagcgaaaaataaaacgagaaagaggtcatacataacatgagaaagccaattattgtcggaaactggaaaatgaacaagacgatgaaggagacaaaggaattcatcgaagcagtggatcctgcagccgcaagcgaaaatgctactttcggtatcggcgcaccgttcaccgcgctgtccactgcagttgcagcagcgaacaatctgatcatcgcagctgaaaactgccattttgaagacagcggtgccttcactggtgaagtatctgtgccgatgcttcaggaagtgggcgtaacgcactgcatcatcggtcattccgagcgtcgtacgatgttcggggatacggatgagaccgtaaacaagaaggcaaagcgcctgatcgaagcgggaatcacgccgatcctgtgcatcggtgaaacagaggcgcagtatgacgctggtgaatcggaaaaggtcatccgcgatcagctgactggttctctggctgacatgtgcgcgaagtgcgtggcggatatcgtcatcgcttacgagccgatctgggccatcggtaccggaaagagcgcttctgtggaaatcgcagaaaactgctgccgcatcgtgcgtgaccaggtcaaggtgatgtatggtgaagaagctgcagaaaaggttcgcgtacagtacggcggttccgtcaagccgaacaacatcgccgaatatatggcacagccggatatcgacggcgcgctgatcggcggcgcaagcttgaaggcagacagcttcatcgagatcatcgagaagacaaaataagtcaatattctgcatacatgaagacatgatcgcttcattgaggcgtgggcgtcacctgatttgttcaggcggcgcctttttttcctttttggcataagaaaaagccagaccaggctggcttgatcataggcattggttcagtcgtcctcgtaatccacggtccattccaggatggtcccgctggcggcatcgatctcaaattcatattcggcattgccgtagtggatctctccttcatagatgatgtggccgtcgtcctcatctcgttcgatctcgatatggcgctctgtggcgccgctgacgcgggagagcgccaatgttctggcttcatcgagcgtaaggccgttttgctgaggaggcgtgtaatcttctgcgtcgcggtcgacattcaggatcgcgccggtcgctttatcgatctcataatcatattcattgctgccactgtaaaattcgatctcatagctgctcgttccggtctgctctttgacgaaggtcgcgtctccttcgctgatcccggcatgatccaacgcaatggcacgggcctgatccaaagtgatagcggaagcttccggtgtatcagtgtctgaaaaagctgattcggcttcatagtcgacatgcaggatcgccccggtttcggtattgatctgatatttatagatggtgccattcacaagaaactggatatcataataagatgtgtctccgtcagtattgcgctcggtcttcagaaattccacttcatcgattcccagctgcgcgtcatccaaggctgcggacttcgcttcttccagggagatcgattgattttctggttgtgcggaaccgcagccgctgaccagaaacagacaggagatcgcaagtgcataaatgatctttggtttcatgggcatccctcttttcttcattgtctatagtgtgccacatttcgcgcgggatttcaaatgtctcgtgcatatgcctaaaaggcagagccgcgacgcggttctgccggtatatagggtaggagagaatcaaaatgtcagttaatcgtcataatctgcgtcccattcgatgatggcgccggtgctgccatcgatctcaaattcgtattctacgcggccatagtgaatttcgccttcatagaccagtctgccatcatcatgatccgcttcgatgcggatgtgctgatcgcttgctccgcttaccttggcaagcgcgatcttcttggcttcatcgatcgagatggcattgcttgcagcaggggcataggcttctgcgtcatagtcaatgtcgaggatcttgcccgtcgtcttatcgatctcgtagtcatattcgccattggcggtatagaattcgatctcatagaccgttctgccatcgtcgcgatcttctttcgctttgacgaaggtggcgtctgcggcattgacaccggcattggtcagcgcgatcgttttcgcgttttccagcgtgatcccagaatttgctgtcgtggtattgtcagagcttgcagaagaagcagcacgcaatgaaggatctgcggcagtgcctttatctgatgcagcagtatcgtttgaagcaatcgtgttgtcttgcgtggttctggcatagttttcactttcgatctcgtgatccttgttcaagatcttgccggtcgctttttcgatctcatagtcatattcgatgttgccggcgacgaactcgatttcgtaaacgactttgccgtcttcgtaatctcccttagtttcgtagaaacgcgcatcttctgcgttgactcccgcgtcatttaacgcgatcgtctttgcttcttccatggagactgcagcagaggtgtcttctgtaaccgtgtttgcaatatcgtcggtctgtggtgttgcggttgcggcctgcacgccccatcctgccagcaggaggactgcgccagaagcggccagaatcttagtcagtgtaggtttcatatcaagtacctcccttttctttacggctacatcttatcaagccaacattaaagcaacattaaaacaaacaggaaatgcaaaaaaattttttgcggcgggaaaatagtgagaattgcgacaaacaaaacattttttagtttgagcagagtttcagcttgctcttagagcatctaatttttgcctcgtaaccgacaagtaacagacagacggatcaggcgaaagatcaaaacctggatcaatgttttgcatgaccgacagacggaaaaatgacaggaagcaaaacagggaaacatatatgcgagaaagtgatcagaaggattcagttttccgccatagcggtgtggattgtcaattctgctatgatataatgagcataagaaagcaaggtgaggcagatgaagaaagcaataccgatcggcgtatccgattatgagcggctgcgtaaagaagactattattttgtggataagtcgatgatgatccaggagtttttaagaagaaagagcatcgtcacactgatcacgagaccacggcgcttcggaaagaccatcaatatgtcgatgatggcagaattctttgatgtgacaaaggatgcaaaggagatcttcaaggataccgcgatcatggatactgaatatgccgcagagatgaatcagtacccgaccgtcttcctttcatttgccagtgcgaagaacagcaagcaggaattgacgaaagcgatcaaatatcagctgcgcaaagaatatgaccggcaccgacaagcatttgagacgacgatgacggagtttgacgcagatgaatatcaaaagatcagaaaagcgctgctggatacagagaacggagaaattgatggcattggaaacacgcttgcatttctgatcgaaaagttggagaagcatcatggcaagaaggtgatggtgttcatcgatgagtatgatacaccgttcatcgaagcgcatgtaaacgggtattatgaagagatccgcggcggcttgtcttctttgcttcataacgcgctgaaggcatcgacgagcctgcagcatgcgatgctgacgggcatacagcgggtagccaaggaaaacatcttcagcgatctgaacaatctggtggtatgcacagtaa

SEQ ID NO: 1093 - DNA, 32759 bp, Unknown
  16S sequences of unknown bacteria
ttaataagcccttatagggctagtgcaaaccacgtcttttaggcgtggttatgattttacaaattctttataaattccttgcagtgtagcctgatagtcttcttcacgcacacctattattatgttcatttcacttgaaccctggtcaatcatttttatatttacaccggcttcggcaacagctttaaatactctgtaggccgtacctacgccgttagccatatttcttcccacgacagctacaagtgcgatgccgtcgtctatagatatgtagtccggatgaacggcttttgttatctcatcagccaatacgagttttttatcctttatctcttccgatgaaacaataattgacatggagtctatgcttgacggcaaatgctcaaatgatactttattatatgtaagaatgtcgagaactttttttccgaaaccgacttcgctgttcatcatatctttttctattacaatggtagagaatcctttttttccggctattcccgtaacaacattatctcccgtacagcttttggcgtcttttacaatcattgtgcctttgtcattgggtctgtttgtatttttgatgtttataggtataccggccactcttacggggaatatagcgtcttcatggagtaccgtagcgcccatatatgaaagctctctgagctctttataagtaatagtatcaattgctttcggattttctacaaatctggggtcagccataagaaatccggatacatcggtccagttttcatatatatcggcacgagcggcacgagccactacagagcctgtaaagtctgaaccgcctcttgtaaatgttttgattgttccgtttggcatagaaccgtagaaaccgggaattaccgcatattcatgcttttcgagtattttggacagcacgtcgttcgtttcttcggcattaaatgttccgtcatcattgaaaaatattcccttttcggcgtctatgaaatcaaatccgagaaagtcggccaatatcattgcgtttaaatattctcctcggcttgcaatataatctctgccggcatgatgaagtattgccatttttattctgctgaattctttatccaaggatattgaaagtcccaaatcggatattatttttttatatctttttttaatactggaaaagatactgtcaatgtttttttcttcctttgtaagctgatagcatttaaataaaaggtcggtaaccttttcatcatattcatttctttttcccggagcagaagctacgacgtatcttctttcgggatcgcttttaactatttccgcaacttttctgaaatgatcggcgtctgccagcgagcttccgccaaactttaatactttaactgacattttaaaatttctccttcattattattgaatattaaagatcgttttttataaggtcgtcaaaggtttctctttttacggcaacgtaactttcaccgtctttcagcatgacaacaggcggattgggtatgcggttataatgagaagccattgaataattatatgcgcctgtcgtcattacggcaagtatatctcctttttccgctaaaggaagattaacattttcttggatgatgtctccgctttcgcagcatctaccgccgattgtatatacactttgcgcaggtttatcggctttattggctattgcgacagtatagggagattcatataaggtgtatctcgggttatcagtcataccgccgtctattgatatatagcttttatatccgggtatttcttttgtgctgccgactgtatataaagtcatacctgcgtcggcaacaatgcttcttcccggttccattaatataacagggaatgaaatattgaggctgttgcatttttcctctattacttcggctatatcatgaatattttttgcgtaatctatttcagggtcgtcgtcaacgtattttactcccatacctccgccgaggttcagtatttcagcttcatatccgcagacttcttttatatgggcaataaatttaagcattatttcggctccgtctgcaaacggttcaatatcaaatgtttgagaacctatgtggcaatgatagccgcaaaggttaacgttctttttacttaaagcaatttttacggcgtcttcagcctgacctgtttctatggctattccgaatttggaatctacttttcccgttgatatttttacatgagtatgagggtctattccgggcgtaagcctaagaagtattttttgaattataccgtggttttcggcaattttgtctattgcttccaattcatagaggttatcacatacgaagtatccgattttattttctatggcaaagtttatatcaaagtcggttttgttattaccgtggaaaaatactttttccattggaaaacctgccttaagagcagtataaagctcacctgaagatacaacgtcaatacccatgttttcctctgaagctatcttgtatatttttttaaagcacaaggctttacttgcataaagaggcatagaacccgacggaaaatacttattgattgcttcaacataaattcgcattttttcgcgaactttattttcgtctattaaatacagaggggtagaatatttttcagccagttcaacagtatcctgaccggcgaatgtaagattaccgtttttgttgattcctatattgccgcaaatcatatataataaactccttttcttttattaatacaaaaaacagcctttgaagaagtatctccagaggctttcagtttgcatataaaatattcaactgagacagcactccgcatatacaatgcgacagttaaacagatattattccgtttacccagaacgactttacgcctcagccgacttcggcagcaacccctttcgttcggataaggctgtgcgaaagcctgttttttacatccgactactgatgatatgccgcacctctgtcaaaataattaattttaaagtaagtatagtatcaatttgacaatattgcaagcactttttttaaagtatacaaaaagcagataaataggcaataaccctatgatataaatttattcaatcaaatagaaggtattttaatgaacataagacttaaatattatattttattttttcataaattttatttaatatttcagtaatggctaatactataaattttacatttaatggacataatcattaatattataatttgcatttatgctcatatttacatttaaacatatatatttgtgttttttaatctaaacatatatgtaaatttgctttaaatatagtctatttttaacagattactaaaaaaattgtagaataattattataattgtcgattttacatttattttactttaggagcatttattttttacaaacatgtattatctttcttatggcaataaaaatatgtctaatttttagaatggcgggggatgtaatggatctttttgatgttttaaacatggtcggaggtttggcgttgttcctatacggaatgcatataatgggcggaggccttgaaaaactttcgggcggtaaattagaacgggttcttgagaaactgacaaaaaatcgtataatggcggtacttctcggtgcgggagtaacggctgtaatacagtcttcatctgcaacgacagtaatggtagtaggttttgtaaattccggtattatgaaacttaatcaggccatcggaataattatgggagctaatataggtactaccgtaacggcatggctcctcagccttactacaatagaaggaagcagcttctttatgcagctccttaagccgacgtcgttttcacccattttggcgcttatcggaatatgcatgattatgttttccaaaaaggataagaagaaaaatataggaagcatactcatcggttttgcaatacttatgtttggtatggactctatgagcgcggctgttaagcctttggctgatgtacctgaatttacaagtcttcttacgaaattctcaaatccgatactcggactcttaataggcgcagccgttacggctataatacagtcttcatcggcatctgtcggtatacttcaggcgttgtgtgttacgggcgctattaaattcggaaatgcaataccaattattatgggtcagaatataggtacatgtattactgccataatatcaagtataggagcgggaagagatgcgaaaagagccgctgccgttcatctttacttcaatattataggtacgacaatatttatgttaggattttatggtcttaatgcagtacttgactttactttccttaatgatacaataagcgcggctacaatagcttctatccatacaacatttaacgtcgtaacaacgattattttgttaccattcggaaatgttttggaaaaacttgcgaataaaacaatcaaagatcagaaaattcctcagactgagtttgaaaaagagcttcttgcacttgacgcgcgtttccttgattctccgggatatgctattatgcagtgtaaaaatgttacaacaaaaatggctatgcttgcaaagagcgctgtatataaagctttagaccttattgaaaactttgacgaaaaggaagcggaaagagtaattgaaattgaaaatgaagttgacgagtttgaagataaactcggatcttatcttgtaaaaataagcggtaaaaatctttcgatagaggaaggacatactacttccatgcttcttcactcccttaatgattttgagaggatttcagatcatgcagtcaatattcttgacgcggcaagagaactttatgacaaaggactttctttcagtgataagggacttaacgaaataagagtatattcagaggcagtgaaagaaatacttgacattacgatgaaatcgtttgaaaatatggataaaggggttgctgttacggtagaacctttagaagatgtaatcgatgatctcaacatagtcattaaggaaaaacatataaagagattgagaacaggtgagtgtacaacagaactcggatttattctttcggatatttccacaagttttgagagagttgcggatcactgctcaaatattgcaatatatgttcttcagtcagaccaggaagaaatggatcctcataatttccttatacagcacggaatggcaggaaataaggaattccaggatcgttatatagagtataaaaacaagtatattatagaataaaacgaggtgtaaatatggccctcatttacattgttgaagatgacgctaatatttgtgaaatagaatctatcgcgcttactaacagcgggcatgaggtcgaatcctttgaaaacggaaagtcgttttatgataaacttggcgtaaacaggccggatcttatcatacttgatattatgcttcccgatgaggacggacttgagatacttaaaaaattacgctcaaagccggacacaagaagagtacctgtgattttgataagcgctaagtctacggagcttgaccgtgtcagaggtctggaaataggcgctgacgactatattacaaaaccgttcggcgttatggaactgattgcgagggtcaaagctcttcttcgcagaaccgaagaagagcgaagaatagccggaagagaaaaatatatcaggataggcgacatatttatagacgatgtaagaagagttgtttttgtcagcgatgagaaatgcgaacttacatataaagaatatgaactgcttaaactgcttactcttaatgagggaattgtgcttacccgagacatcataatggaaaaggtttggggagtggaatttgagagcgagtccagaacagttgatatgcatattaaaactctccgacagaaattaggagatgccggaaatataattaaaacagtaagaaatgtaggatatgttgccgaattataaagaacggtgatatttatgaaaagaaaaataagtatatatattacagccgttgtcattatagccgttttgtcaacggctgtaattatatcgggtgtgtttaacggaataatacgaagacagatatgggaagatctgaagattgacagtgaaacaattttaatgacagatgactctataaatgaatctaaagtaattgaactgaactgtcttagagttaccgtactcaatgacaaaaattttattgttttagacagtttgggagaaacgggaaattatataaacggttccgatatcaacgaagccaaaataaaaggcgaaggtttttctatagaatccagtgattcaattgataaagatatatattattattcagagaaacttgataacggaaacatactaagagtatcaaggaaagcagataatatcttaaggttttttgagtatcttattcccgctctgtgcggaataataattattatggcggctctttgttttattgtaaccagggttttgactaaaaaaataataaaacctattgaaaaaatggctgacgatatcagttttaaagaagttcctgaatatgaggagcttgttccggttgttaatatgcttaaggaacagcacgaaaatattcttaataacgccagagtcagacaggaattttcagctaatgtttcgcacgaattgaaaactccgctcacggttatatcgggttatgcagagcttatagagaataaaatggttgatgaaaactctgtagttaggtttgcaggtgaaatacatcatcattcggatagactgctgagtttgataaacgatataatcaaactttccgaattggattcagacagtatcgaagctatctatgaagatataaacctgtctgaggttgtagacgactgtatgcgaatattgcaggagaatgcaagacgccatgatataaatctgtatgagcattgcgacagtaaggctgtcataaacggaaacaggtcaatgctggaggagcttgtaacaaatcttgtaaataatgcaataacatataataaacagggaggttccgtttggatagatgtaaataaggacaacggaagcgttgtacttactgtaaaggataacggaataggaataccgcaggaacatagagaaagaatttttgaaagattttaccgtgtagataaaagcagatccaaaataagcggcggaacaggacttggcttggctattgtgaaacatatagccgcaagccataatgctaaaataaccttgaaaagcgaagtaggggaaggaacggaaataaaggtcatattttaaaaaaatcctgataatttttatcaggatttttttaacttaatttgtctgggcaagtcattgcgttcattgtctgtatctgttattgaagctcccgaagatgtaatttttttagttctgtatctttcaatatcatcgctcttaaattcaaaagaagagaataatgccgttacaaaacttttctttttcattgtaaatacttggactccgccggaacttttatttgaatttagaggaacaagctcggtgttaaaaagaagcgctttatcggtatctcttataagaaccatatcgctgtcctcatatacggctttcattcctattacggcagatttcttagagtatgcatttaacagcttacgacggtttgtctttgtagcgtagctttccatcgtaaccttcgcaacttttccgttttcaaaggcaaaaatcataaatcccgagtaatctactgtagcggtaaagtaaagtatatgttcttcgtcttcaagtgcaagaagatttgcaaggtattctccgaaactgcttgctttgcaatctggtatatcgtttactttcagcttgtacacattacctttatttgagaagaacacggcgtcagcacgattagtacattcccattcgcatatgattttatcgtcgtctttaagcttttgctcgggatttgtcctaagcgatgttaatgggatttttttgaaatagttatgccctgtgaggagcagtcttactccataatcctctacaagatcttcagcctgaagtttttctgtatctgactctaaaattatatcggtttttctgggacttccgtatttttttgaaatacttttaagttctttggctattaagcgtttaacttttttatcgtcggaaagtaccgagttaagatccgctatatcatctacaagttcgcttatttcctgtatacggttcaatatatattctttgttgatatttctaagctttatttccgctacatactcagcctgcttctgatctatatcaaaacctgaaataaggttaggcactaccatggcgtcaacttcggtattacgtattatttcgatagctttgtcaatatctaacagtatttttgacagaccttgcagaagatgaagttttgcgctttttttatccatatcgaatttcaggcgacgttttacgcagtccatacggaaacgtatccattctgataatattccttttataccgagcgtctttggtttaccgtctataagaaggttaaaattacagctgaaagaatcgcataaaggagtcatgctaaacaattttgccattatcatatcggcgtcggcgctttttttaatatctatagctatcttaagaccttttaagtcggtctcatcgcgcacatccgttatatccctaatcttaccgcttttaaccagggatataattttgtcgattatagactcgatatttgttgtatagggaatttcataaacctcgatacaactgtttctcttatcatatctgtattttgctcttactttaaaacttccgcgaccggtatcgtaaatagtcctcatttcagattcgttataaatcaattcaccgccgccgggaaagtcaggacctttaatataatcggtaatgtcgatattttcatctgacataaatgcagtagttacttcacatatttcaatgagattaaaactacagaacgaacttgccattccgactgcaataccctgattaggatttacaagtatattgggaaaacttgtcggaagcagaacaggttcttttgttgttgagtcgaagttatcgacgaagtcaactgagtttttatcaatatctccgaataattcttcacaaataggagcaagctttgcctcggtgtaccttgcggcagcataagccatgtctcttgagtactgctttccgaagtttccttttgaatcaacgaatggaagcagtaatgagccgtttccttctgttagtcgaaccattgtttcgtatattgttatgtctccgtggggattaagatgcattgtctgaccgactatgttggacgattttgttcttccgcctttaagaagtcccattttatacatggtatataaaagttttctgtgagatggtttaaagccgtctatttcgggtatagcccttgatactataacgctcattgcatagggcatatagtttacttccagcgtatcggttattttctgttcggttattactatatctttatattcacttttgttttttgtttttttagccatagtttacctcttaattaagagcttttatgaaatatctgcaagatcaagatacttatatccgtcgctctcaataaattcttttctgccttttagattttcaccgagaagcaattcaaacttttgctttgtaagttctgctaaatcaggagttaccattatcaggtgtcttgtttcagggttcattgttgtttcccacatcatttccggctgattttcaccgagacctttggaacgctgtattgtatattttcctttaagtttggaaagtatctgagttttttcattttccgtatacgcaaaataggtgtctttaccggaagtaatttcatacagaggagattccgcaatatacacctttttttcagatataagtgtagggacaagacgatacagcatggtaagaattaaagttcttatttgatacccgtctacatctgcatccgtgcatataattactttattccaacgcagctgactcaaatcaaaagaattaatatttgagttatgttttgcttttatttctacaccgcatcccaatactttaagcaggtcggttatgatatcatttttaaatattttttcataatccgatttaagacagttaagtattttacctcttatcggaattattgcctggaattctgcgtcgcgtccgagtttgcatgaaccgagagccgagtcgccctccacaatatagagttcacgtctacttacatctttagagcggcagttgacaaatttgtcaactctgttattcatatccaaactgcctgtaagttttttccttatatttactcttgtattttcggcagtttcacggcttcttttatttacaagcacttggttggctattttatccgcgtcaattttattttctatgaaatatatctccaactgctgcttaaaataatcagtcattgcgtcttgtataaacttatttgttatagattttttagtttgattttcataacttgtaatggttgaaaaggagtttactataataataaggctgtcctcgatatcggaaaacgtaattttcttttcgttttttttgtacaatgaattggcttttatatatttatcaatagaatatacgaaagcgtttttgacagctttatcaggtgaaccgccgtgttccaaaaaagagctgttatggaaatattgcaatgaattgatttcattgttgaagcaaaacgcagcttcaaactttagtttatattccggcttatcttctctgtctcttccttttgtctccgtttccatataatatgaatctgtcagtccttttccggaattgagctcgtttatatagtcttttataccgttttcatatacgaatgtttcatgctcatcagcctcttcatcataatactcaaatataagacctgcatttacaatcgcctgtttttttaaaatatctttaaaatattcggaaggtatgttgatatcggtaaaaacttccttatcgggtttccattttatatctgtacctgttgacttttttactgtttcctctttaacaagaccggatatattttcgcctttttcaaaatgcagtgtgtatttgaaaccgtctctgaaaattacggtatccatatattctgatgaatactgtgtggcacacgccccaagaccgttaagacctaaactgaattcgtagttttctccggaattattattatattttcctcccgcatacagttcacagaaaacaagttcccagttataacgaccctcattggcgttatagtctacaggtatgcctcgtccgtaatcttttatccttacggaatggtctttatatcgggtaacttctattttatttccgtaaccttcccttgcttcgtctatagagttgctgagtatttcaaaaacggcatgttcgcagccttcaagaccatcggaaccgaaaattacgctcggtcttagacgtacacgatctgcgcctttcaataatgaaatactttcgtcattatattttttattacgtacagccataaattacacctgctaatattttatttgtatacatttacacaatgctttaataatatcgtaatttaaagattttgtcaaggaaataagcgaatatatgtttgctaatgcttttagggaatacaatatttattaataaatggctttttaattacaatatatttgaacttgaaataatatgctttaaaatatattttaggcatcgattttcatattgacttatgtttataaaatagaacataccgttgtagattgtgtctcgatatgatataattatttgactgaaaataacagggatataatataggagggtaatatggataagtctaaagtttattttacggattttagggcaaagcaagggatgaatgttttgcagaagcttgataggctgataagagaagccggaattgacaaaattgattttaaaaataaatttgtagctataaaaatacattttggagaaccaggaaacattgcctatttacgtcccaactttgcaaaagttgttgccgattatgttaaagaaaagggcggatatccatttttgacagactgcaatacactttatgtaggaagaaggaaaaacggcctcgagcatattgatacggcgtatgaaaacggatttacacctttttcaacaggatgtaatgtaattataggcgacggaataaaaggactcagtgaagtttatgttcctgtccgtaacggtgaattgtgtgaaaaggcaattatcggaaaagaaataatggaagctgatattgtaatatcactcgctcattttaaaggacacgagatgacaggcttcggcggagcgcttaaaaatataggtatgggctgtggttcaagagcaggaaagatggacatgcattccgccagcggacctaaagtaaaaaccgataaatgtgttggctgcggttcatgtatgagaaactgcgctcatggggcaatttccatagtagataaaaaagctgtaatagacagagataaatgtgcgggctgtggcagatgtataggagcatgtccttttgacgcaatggcatacataggggatagctcggttgagataacaagcaaaaaaatggcagagtatgcgatggctgtacttgacggtagggaaaacttccacataaatattgtaaacaacgtatctccttactgcgactgtcattctgaaaatgacgttcctatagtgcctgatatcggtatgtttgcgtcttttgatcccgtagctattgacgttgcatgtgctgatgcagtaaatgcgcagcctgtaatgcctaacagtattctggctgaaagagatcagtgccatcacgaccattttacggacacacatcctgtgacgaattggaaatactgtgtagaccatgcggaaaaaataggcttgggaacaaaagaatacgagttgattgaaatttaatatataaccctaaacggaaatatctttttataaaacgttgaaaagtcataacaataacattttagacaaaatttattttaagaccgaaattcagattaaaattactatgggcaaattgccgtacgtaaataatttaaaacattgaaatttatggtcaagataaataagtctgaatagatgttgatttttcaacgtttttttgatgaatttttaataattattaaaagaatattttacagacttggataaagttgtataataacgttgaaaattaaagtttttttaaaaggggatagatttatgggatttgatatttctgtacttattgaccagatgaagataatagctactcttatgctaataggatttatttggaaaagaagtaggctgtttaatgatgatttggttaattcactttcagcgattttggctaaattaatacttccccttatgcttacaacggtgataggttcggtttcaaaaacagaacttacgcagggtattaaaatttttttggctacattgattttctatacaacgataattgttctttctaaggtaataacgcatttcggaaaagcagatcccgcaattaagagaatggatgttttattgcaatgcttcggcaattccggatttgtgggagttccacttataatcagtatattcggagataaagccggaattgttgcggcggcatatacgctcgttgatgcgtctgtatattggcttgtaggtccgaacctacttagtaaatcgaaaaaattagattttaagaagcttgtaactccgcttacaatatctattttgcttggttttgtaatagtacttttaccgattgatttaagtgaaaacattgtttgggcaactgcaaaaaatgtcggaggaacggcaaaatattttgcaagcatttatataggtatggctgttgccagaatggacatgaccagacttaaaaataatctgcgttctgtatttgcagctccgatgaaacttgttatagtaccgttattggcttactttatcatagggaaaacgggatttctctcaggcgacgttttaacgatgtttattattttatgcgcttcaccaacgggtatgatggttccggtaatagctgaagtagcaggggagagtacaggagaatacgcttcggtaggagtaataatatcaactgtattgtgtctcgtatcattaccgtttatgatgtggatgattagtatgctctaaatcaattaaaaatataaaaacaaaactcccaaatgctttttgtaaatgtaagctatattgggagtttttattatattcatactatagattctattattttgttttttcaaatacaatatccattcccagttcttctttaaaagttttatttaaatcttcagacgattcaatattatctaacttcacaaatgtagccgtaactcctacgatgttgtcttcataaggaatatatgtaaccattgcggttattccgtcgtatacaaaaacataaatctgattacagtctatgttatctaaaatgacagaatcacttgcagtaagaacagaagaggctgcaaccatatcaactccttcagttgaatttatatgcataggtatagcggctgtaagttttctttcaactgaacttcttatttcttcaggaagaggctcaagacttgttaagtctgaaaaggctttcaatgctaccgattccgttactgctactttgtatactgcgttaggagtactgtattctccttttgcaatattatccagtatttcatccaatttatctgaacctgacataagctggcgataagcttcggattcagctgatttgtccatctgtactataagttcaataccctttgcagtaaccggatttttagaatagtcaatgctgtcagtatctgttactattactgaatggtctgtaataggtttcttttcggaattatcctttaatgtaaaaccggttgaaaaagcagaaagggtaagtgcggaacataaaacaagcggtaaaagttttttcatattaatccctccgatataaattatgactttattatatcataattaaccgattttaaagaggactgaaaaattaaattcataaaaatttaagaaataaaaaagtccctcctaaaaaggagggacaatgtattttaattattcacctgcaagttttttgtagcttgcgagtctgtcttttgcgtactgctctgtcttatcgaagagttcctgagcaacttcagggaatgttctcataagtgagctgtaacgaacttcgttcttgatgaatgcctggaaatctcctgtagggtctttagaatcaagagtgaaaggattctttccttcttccttaagaagagggttgaatctgtacatatgccagtaaccgcactcaacagctttcttgatttctgtctgagcaccgctcatgccgcctctgataccatggttgatacaaggagcatatgcgataatgagtgaaggtccgggatatgcttcagcctctttgagagccttaacaagctgtgcctggttagcgcccattgcaacctgtgcaacatatacataaccgtagctcatagccatcataccgaggtcttttttcttaactctcttaccacttgcagcgaactgagcaactgctccggcaggtgtagccttagaagcctgtccgcctgtgtttgagtaaacttctgtatcgaatacaaagatgttgatgtcttcgcctgaagcaagaacgtggtcaactccgccgtagccgatgtcgtatgcccaaccgtctccaccgaagatccactggctcttcttaacgagctgatctttgttttcaagtacataatctataataaccttagcttctgtgttttctgtcttgaaaccttcaagtttagctacaagttcagctgaagcagccttagactcttcaccaagatccattgtagcaatccacttgtcaattgcagcggcgagttcatcacaagccataggtttaagtgtttcaagtttttccttgataccggctctcatctgttttacagccatagccataccaagaccgaactcagcattatcctcgaagagagagttactccatgcaggacctttgccttccttatttgttgtataaggagatgtaggagctgagccaccccagattgatgaacatcctgtagcatttgcaatgtacattctatcaccgaagagctgtgttataagttttgcataaggtgtttcgccacagcctgcgcatgcgcctgagaactcaagtaaaggctgttcgaactggcttcccttaacagagtctttacccatagggttagctttctgtgaaagagacatagcatattcccagttagctgcttcatgttcctgtgttgcaagaggcttcataacgatagccttttccttagcaggacatacgtttacacagcttccgcatccaagacagtcaagagctgatacctgcatagcgaacttaagtccagcaaatgcagcgccacccttagcgtctaccatcttaaatccttcaggagctttttctgcttcttcagctgtaagaaggaaaggacggattgtagcgtgaggacatacataagaacactggttacactgaatacatttttcaggatcccattcaggtacgttaactgcagcgcctctcttttcataagcagctgttccaagaggtgttgtaccgtcttcaattcccttgaatgcgcttacaggaagagaatcgcctttacgtgtattaactgctgttacaatagttttaacatattcaggctcgtctttagcaacaactgtttctgtatctacagcgttagcccattcagcaggaactttaacctcaacaataccttctacacccttatcaacagcagcgtagttcatgttaaggatatcgtcacctttcttaccgtaagacttcttgatagcagccttcatatattcaacagcgtcagcgatagggatgatgttagcaagcttgaagaatgcagcctgaagaactgtattaattctgtttccgagaccgatttcagcagctatatctgtaccgttgatgatatagaacttaatgttgtgctctgcaagatatttcttcattgatgcaggaaggttagcgtcaagttcttctacagaccattctgtgttaagaaggaatgtaccgccgtccttaaggtctgaaagcatatcatacatatgaacatatgactgcttgtggcaagcaacgaagtcagccttatttacaagatatgttgagcggataggcttatctccgaaacgaagatgagactgtgtaataccgcctgatttctttgagtcatagtcgaagtatgcctgagcatatttgtctgtatggtcaccgatgattttgattgagtttttatttgcacctacagtaccgtcagctccgagaccccagaatttgcactggattgttccgtcgccttctgtaacgtcaacgggtgcaccaacttcaagtgaatggaatgtaacgtcgtcaacgatacccattgtgaagtggttcttaggctgttcaagcttaagattatcatatactgcgatgatctgtgcaggtgttgtatcctttgaacctaagccgtaacgtcctgcaacgataacaggtctgtcagctttgtcaaagagagctgtacatacatcctggtataaaggttcgccctgtgcgccgggttcctttgttctgtcaagaactgcaatcttcttgcaagtcttgggaatagcgccgaggaaatgctctacagagaaaggtctgtaaagatgtactttaataagacctactttttctcctcttgccataaggtaatcaatagtttcttcaatagtttcacatgcagaacccatagcaatgattactctgtcagcgtcgggagctccgtagtagttgaataatttataatctctgcctgtgatacggctgatttctttcatataatcttcgcatacgcctacgatattttcatagtaagggttgcatgcttctcttgcctggaagaagatatcagggttctgagctgtacctcttaatacagggtgctcggggttaagagatcttcttctgaatgcgtttacagcatccatatctacgatcttagcaagttcatcatagtcaagacattcaaccttctggatttcatgtgatgtacggaatccatcgaagaagtgaaggaaaggaactcttcctttaatagctgaaagatgagctacagctgctaagtccatagcttcctgaacagagtttgagcaaagcattgcaaatcctgtctgacggcatgccattacgtctgaatgatcgccgaagatagaaagagcgtggcttgcaagagctctggcacttacatggaatacaccgggaaggagttctccggcaattttatacatattagggatcataagaagaagaccctggctggctgtatatgttgttgttaatgctccggctgaaagtgagccgtgtacagtaccggcagcaccggcctctgactgcatttcaataacttttacagtctgaccgaaaatgtttttctttccgttggcagcccaatcgtctgtgtgttcagccatcggagatgacggtgttatggggaaaatacccgcaacttctgtaaacgcatatgatgcgtatgcaacagcttcattaccgtccatagttttcattactttagacatttgcatatcctccttaattttatctaccattgtaagttggttttaaattgcaaatttgtacatctaaattatatcaaagtaatttattcatatcaatactaaagaattttatttgttgtatgacaacatttactgcaaggcttgtttctattgcaaaattcgatatttatgggtataaatcaacaattattttgaacaataataaatggataattaaaaaatttatctaaattaactcgaatttgaaaaatactcaaatttaagagattttttgacgtattaattgttaaaaataataattacagaagacttggttttttatgaaaaatcggctaaatccctttaaaatctgatattattctgttaaacagaaaataaatattgtctgacaatatgataggaatatgtaaagttaattaaagcggcattatgccactttaattaactttatgcgcatgaatcggtatctgttattatatttgcggtatagtttccggaatcatttaaagcgattaaaaaactgttgactgaattttcgggaaaattaaattcttcatctatggaaataattcctgttccggatacgactgcatttatattgtgtatgccgttaggtactcctataaaagcagaaacttctccgaaagttattcctaaaataaccggtattccgtctataaatatatccatagccggagcggtttcggataattgtacaaaacgtatataggcagtgttaaaaaagcatttcggcggaacaccgctgatatccgtaatattataagaactgttatttttagtaattataatagtggaatttattccgggataggcgttaaatttgtattcatataaaggttcgttatcttcttcggcaattttaaagctatatacttcgggatttagtctgtaataatccgttttatcgttagattttacgggaaatgaaccttttttatcatctgtatatatattcagatctttcggagtaaaattataaaatcttatatatgatgaaagtgcatcggtacttttactgtctgctgcgttagatatttttttcggtgttttaggagcgttattttcatatattacttcgctttttatattttcggggtttataaaagttacggcgctttcattggtatttacggaaggtatgccggcgggtgtgatttcatcgacatggatatagccgttaggaaaacttttttttgtttcgtgcgagacagatatggaaggcatagagtagtagttcctctttatatcttttaaaatgatatttccgctgataagttcggacataaattcaactcccataattacagatataaaacaatatgcataataagaggcgtttgttacaaaatagatttaaatgtctgttaaatccataaaaaaatatgacagcgtccttatttgtgctataataatttaaacgcagtaatttattatgaggtatatatatgtctgaaaaaaaagaatttacgcatcttcatgtacatacggaatacagccttctagacggttctgccaaaataggagaacttgtaaaacgcgctaaagaactgggaatggacagtttggctataactgaccacggagcaatgttcggcgttatagatttttataaagcgtgcaaggaagagggtataaagcctataataggatgcgaagtatatgttgcgcctaaaagccgttttgataaaaacagcagagaaagtgtgagttattatcatctcgtgcttttagccgagaatatggaagggtatcaaaatcttataaaacttgtctctcttggatatactgaaggattttactataaaccaagagtcgatgaagagcttttaagaaagtatcataaaggaattatagctacaagcgcatgtctggcaggcccggtagcaaaaacgttaataaacggttcctatgacatcgcaaaggatatggctcttaaatatcttgatatattcggagagggaaacttttatctggaattgcaggatcatggcattcccgaacaaaaaacggtaaacgccggacttataaagatgagcagagaaacgggaatacctcttatatgtacgaacgacgtacactatataaaacatgacgactgggaggctcatgacatactgctctgcatacagacgggaaagactgtaaatgatgaaaacagaatgagatatgctggtaactgttatcaccttaagagttatgaggagatgtctcagctgttttcatatattccggaggccatggaaaatacgaataaaattgcggaaagatgtaatgtggagtttgcatttcatgaacttaaacttcctaaatatgatgttcccgacggatatacagccgatgagtatttaaagaaaataacctacgacggatttaaaaaaagatatcctaatccggataaacaactccttgaaagattggaatacgagtttaatactatagtttcaatgggatatgtagactattttcttatagtatgggattatattaagtttgcaaaggacaatggaataacggttggtccaggaagaggcagcgcggcgggaagcgtagttgcgtattcgctggatattactactatagaccctataaagtatgaccttattttcgagaggtttttaaatcccgagcgtgtaagtatgcccgatattgacgtggatttctcagatgagagacgtcaggaagttatagattatgtaacggaaaaatacggcgcagataaagtggctcagataattacattcggaacactggcggcaagggcagccattaaggacgtaggaagagcgcttgacatgccgtatgcagatgtcgacaggatttcaaaaatggttcctacagaacttaatatgacaatagataaggctctcggaatgaacccggaacttaaaaacgagtatgaaaacgatgatgacgtaaggcgtctgattgatatgagccgaaagttagagggtcttccaagacatgcctctacacatgcggcaggcgttgttatatgtgggaaacccgttaccgaatatgttcccctttatgtttccgataaaggagcgtcaactcagtttacaatgacgactttggaggaactgggaattttaaagatggactttttaggactcagaactctcaccgttgtggagaacgcagtaaatgaaataaaaagaatatatggaatagatgtagacatagataatcttgaagacgatgatccaaaggtttatgaacttatttcacagggaaagaccgaaggcgtattccagttggaaagcggaggaatgaagcagtttatgaaggaactgaagcctacaaggcttgaggacctgatagccggtatttccctgtaccgtccgggaccgatggattttatacctaaatatgtaaaaggaaaaaacagcggagagacaatacaatatacttcgccggcgcttgaacctatcttaaaaaatacttacggatgtatagtgtaccaggaacaggtaatgcagatagttcgtgatttggcaggttacagccttggcagaagcgatcttgtacgccgagcgatgagtaaaaaaaaggccaaagtgatggcagaggaaagaaaaaactttgtttacggaatagagggagaagttccggggtgtcttgcaaacggaataccggaaaaaacagctgaaaaaatattcgatgaaatgacggattttgcaaaatacgcatttaataagagccatgcggcatgctatgccgttgttgcatatcagacggcttggctgaaatgctactatccagttgaatttatggcggctcttatgacatcggtaatggacaatacttcaaaaatatcggggtacattgaggattgcaggcaaatgggaataactttgcttccgcctgatataaatgaaggattcggaaacttttccgtttcgggaaatcagataagattcggacttgcagcaataaaaagcgtcggattacctgctgtaaaagcgttaattgcagaaagagagaagaatgggaaatataagggactgactgacttttgctcaagaatggtagggcaggaaataaataagagaatggttgaaaaccttatttttgccggagcattcgattctttcggaggaacgagaaaacagtatatatccgtttacaaatccgtaatggacggtcttgctcagtctaagaaaaataatatagaagggcagcttaacctttttgaaatatcggtcggtacagatgaacatgatgcctacgacagctttgaatatgttgcggaatatgctgaaaaagataagttgcagaatgaaaaaaatgtgttgggaatatatataagcggacatccgcttgccgaatatgcggacaaacttgaaaagaaagtgagcgcccactgtgcggattttcttgaaagtaatatagaagacggattaagcgaaatatatgacgggaaaaaagttaaagtaggcggatttatagctgaaaaaaatgttaaattcacaagaaataatacgcagatggcatttataaaaatcgaggatatgacaggttctgcggaggtaatagtattcccgaaagcatatgacaaattcggcaaatatctttttgaagaaagggttataatagtagagggacgagcgtctgtgtctgagggagaagctccgaaaattgtatgcgataatattatcccttttgataataccgaagaggaacaaaaacctgtaagcgtcggaattattttaaatgaaggcatgactttacaaaatgtcgttccgatacttacaagacatcacggaagtattccgctttatataaatgatgttcacaacaaaagaaaatacaaagctgacgagacatactggatagacgtaaatgacgaaacaatatccgatttaatgtctgtgctcggcgataataatattgttattaaatacagatgaaacaggaggaattgctatggagaacggacaaataaaaataggcgtgcttacaagcggaggagacgcgccaggtatgaatgctgccataagagcggtagtcaggacgggaatcaataaaaattgcagggtaataggaattcataagggatatataggacttatacacggcgatatagtagaatttaaatcaaaagacgtttcggatattatgaacagaggcggtactatattacatactgcacgttcaccggaaatgatgactgacgagggcgtttcaagggctgcggcaatatacaatatactcggattggacggccttatagtaataggaggggacggctcgttcagaggttgtcaggctctttccgaaaaaggtgtaaattgtataggaattcccggtactatcgacttggatatttcatgttccgagtatacaataggttttgacactgccgtaaatacaggactcgatgccataagaaagctgagagatacttccagctcgcatgaaagatgttctgttgtcgagatgatgggaagagacgcaggatatatagcaatgtggtgcgccgttacaggaggagcagaggaagtacttattccagaaagcaaaggcgttattaccgacgatatggtaatagaacaaatattgatgaacagaagcaggggaaaaagacacaatcttgtagtagttgcggaaggcgtaggcggaactgtaagattggctaaaaaaatacaggatataacgggaatacagaccagagctactgttctcggacatcttcaaagaggaggaacgccgacggcaatagactgtatgcatgcctcaatgatgggttaccttgccgttaaagaattgcttgaaggcggaaaaaacaaaataatcgcatttaataaaggaagatatgaagcaattgatataaatgaggctcttagtatgagcaagaagattgacagtgaatattatgacgttgtgaaactgctttctatctgatataaaaacgaccgacactgatttttttggtgtcggttgtttttattattaagttttatatgaataaatttagataaaatatatgtataaaattcataacaagataacggttgataatatatttgtattattgcttgacatagtattatttttgggatatttttattaaaataggtgttttacaggtataatagcgaaaaaaatataaatacgtgattttatgccgttgttttaagatttttacaatactttaagttcggtgttttatatgaaattattatttgccataaaacaaattattttacttaaattattgtcaattaatgggtttacatcagcgcggtaaagcgttataatgcagtcagataaaaaattatattacggaggttccaaatgattaaattatacgacaacggagtatatcttttagacggaaaaacaatcattgaagataacggaaatgccgagaaagaaatggtggcagctaagggcgttgtttattcaaaagaagagtgtcgcaaaaatacaatggcctattcgatacttaacgctcataatacgtcgggaaatacggataaactgaaaataagatttgacgcaatggcttcacatgatattacatatgttggaattatacagacggcaagagcaagtggtcttgaaaaattccctatgccttatgtacttacaaactgccacaatagcttatgcgctgtcggcggaactattaatgaagacgatcatttatttggactttcatgcgctaaaaaatacggcggtatttatgttccagcacatcaggctgttattcatcagtatatgcgtgagatgatgtcgggagtaggaaaaatgatactcggttctgacagccatacacgttacggcgctctcggtacaatggcaatgggcgaaggcggtcctgaacttgttaaacagctgttaaacaaaacttatgatattgacagaccgcaggttatagccgtatatcttacgggaaaacccgaagcaggggtaggtccgcaagatgtggctcttgctataataggagctgtttttgacaacgggtacgttaaaaacaaggttatggaatttgtcggagacggaattgagaacctttctgttgactacagaaacggcattgatgttatgactacggaaaccacatgtctttcctctgtatggaaaacagacggaaaagttaaagactggtatgaaatacacggaagaatcggcgattataaggaacagaacccaggagaggcggcttattatgacggtctgatatatgtggatttgtcaaaaataaagcctatgatagcaatgcctttccacccaagcaatatttatacaattgacgaattgaattcaaacttattcgacatattagacgaagttgagaaaacaggggcaaaacagcttgataacgatacgataaaattttcacttaaagataaggtgaaaaacggaaaactgattgtggaacagggtgtaatagccggatgtgcaggaggtacttacgagaatatctgcaacgcagccgatataataaaaggtaactccataggtacgggagaattcgccctcagcgtatatccttccagccagcctgtgttcctttcacttgttgaaaacggtaaaatagcggatattatgatgtcgggagctactgtaaggtcggctttctgcggtccttgtttcggagcaggtgatgtcccggcaaacaattgtctcagtatacgtcattcaacgcgaaatttccctaaccgtgagggttctaaaataacaagcggacaaattgcttccgtagctcttatggacgcgcgttctattgcggcaacggcaattaacaaaggagtgcttactgcggcaacggacttggatataaattatactaagcctaaatatttctttaacggtgatgtttataaaaacagatgctatgacggatatggaaaggctgacaattccgtagagctcagatttggacctaatattacagattggccgtctatgagcgctcttacagataatgttcttcttaaggtcgtttcatttataacagatcctgttacgacaacagacgaacttattccttctggagaaacatcatcatatcgttccaatccacttaaacttgcggaatttgctctttcaagaaaagaccctgcctatgtaggaagagccaaagaagtccagaaagctgaaaaagcaagactcagcggatacaatcctgttgatgttttggaagaacttaaagatataagcgatactattaaatccgaatttaaggagtttgattttgaaaatacgggaataggaagcacgatttatgcagtaaaaccgggagacggatcggcaagggaacaggcggcaagctgtcagaaagtactcggaggctgggcaaatatagcaagtgagtatgctactaagagataccgttctaatctcattaactggggaatgataccgtttattttagatggaacaccgtcttttgaaaatggagattatatttatgttcccgaaataaagaaagcaatagaaaataaaaagaaagaaataccgtcatatataattaaaaaagggaaggtcatatcgtttatgttaaaaatgggtgatattaccgatgacgagaaaaagattatccttgacggatgtctgattaacttctattctgaaaaataattatatattaaggctcgtttcattgtattttgaaacgagccttaattttttcgtataaataaagaaacctcctcccattatcaaatgagaggaggcgatatagtaatttaataacctatattaggtactccgagatatggctcgggatttgtatgggaaccgtttaccctaacttcaaagtggcagtggttacctgtggagttaccggtgcttccgattttagctacctgctgacctctgcttacagtatctccttttgatacagtaagacttgaattatgtccgtataatgttacaagtccgtttccgtggtttatcattatggtatttccataaccgctcatccaaccggcgtatattaccgtacctgcttcagccgcaactactgcggatccgtaacttgcgggtatgtcataacctgtatggaattcgcttccacttcctataggtctgtttcttgaaacatagccgctggaaagacttgagcttgatgccgctcttgaaggaacaggccaattaagctgacctcccgtataaacatatgtagactttgaagaagatgattctgcaagaagcttgttaatcatagcctgggcttcctgacttgccttttcgttactggatataagctgattatacttagcttcatcctgtgcgtatgattctacgagccttcttttttccgctacgattgcatccagactgtccattttttcctgcgctacgcctaaaaggtattcggactgctctttttcgacttttatttcttctgttcttgtctttatttcattttgagttgcggtaagttctgtaagcaggttttgatcgtatgacataatatcatcgatatattggagccttctgagcatatccgagaagccttctgactgaagaagtatgtccagatagcttaatcgactgttttcatagaagaaacgcattcttcccgaaaatgtaacaaattgctgttcacgctttatattagcctcttcaagagccttttgcgaggcctccaaacgcgccgtaacatcatcaaggtctgcttgagcggaatccagttctttttgagctgcatttataacatcatccattgcggttatttcagcctcaacgtcagcctgcttttgttgagcctctttaagtttttgctgagcttctttagtctgcttggaaagctgatctctctcattttgaagctcagtcaaggttttggcctcggcttcaatatgaggaagcgacgtaacggctaaagaagccataacggccaacgccgctatatatttaatatgttttttcattcaatcacccttatttacataattctatgcgacattatacaacatcaacatacaaaatgcaataaaacacgacaaaattggcaattacataatattaccatggatggaacagacaaacagcaatacaaattcgtaggtatatgtctaaaattaactataattgtactacagcaattattatatttagtgataaggatacaaaagaatattatatttgattattataatattttctatgaaatgttgtaaaaataggagaaagaatgtaaatgcaatcattattattccgacttgctctttatttaaagaataaattaaaatatttaaaataaatgcctaaaataagtattgttcaaaaataaattctaagcaaatattaactggaaaatcatttaaaaagattaatacttatgatataatttcgtctaaacggaaagatggaaacgtgatgatttacggaggtataaaaatggctttaagaaaaataagaacaggaaacgatactgcattaagaactatatgcaagccggttaaagagataaatgagtatataaatactcttttggatgatatggcagatactatgtacgaagctgacggagtaggacttgcagcgcctcaggtaggcgttttgcgcagagttgttgtaatagatataggaaacggacttgtagaacttattaatccggaaatactggaaacaaaaggagaaaaaaaggacagcgaaggctgcttaagtataccgggagcaacggcagaggttattcgaccgtcttatgtgaaagtaaaagcgcttaacagaaacggcgaagagattacagttgaaggcaaagaccttatggcgagagcgctttgccacgaaatagaccatcttgacggaatattatatgtggataaagcggtcggaaaaatagaatactgataaaggagagaataacttttatgaaaatagtatttatgggtactcctgagtttgcggttccgacactggaggcgcttatagaaaaacataatgtggcagcggtagttacacagcctgacaaacctaaaggtagaggaaaaaagatgatattttcggcggttaaggaaaaggctgttgaaaataatattaaagtttatcagccgacaaaagtaagagacggtgaatttgtagaaatattaaaggaatatgagccggatgttatagttgttgtagcgtttggtcagatactttctgaagatatacttaatataccgaaatacggttgtataaacgttcatggttcgattcttccgaaatacagaggagccgctcctatccagtggtcgattattaacggagaagagtttggtggagttactacaatgtatatggctaaaggtttggacagcggcgatatgatattgaaagcagaggaaaaaataaaggacgacgatacttacggaactctgtatgacaggctttcttatatcggagctgatttgcttataaaaacacttgaccttatagagagaggcaaggttgtaagagtacctcagaatgatgatgacgctacattggcgccgatgataacaagagatatggagcatattgattgggataacacgagtgaaaatgttgtaaatcttataaaaggtctcaaccctcaacctgtttcatacactatgtataatgatgaaaaactgaaaatatggtttgcagaggttgaaaaaaccgaatattcaggagagataggcgaaatagtagacgtaaggaaaaaagactttgtagttaaaacaaagaaaggggcggtagcggtaaaagaagtacaggctcaaggcggtaagaaaatgacggctgacgcctacatgcgtggacatactattgaaaaaggtataattttgaaataatcgggaggtaattgcctatgttttatattgattggacatatattgtcctagtaatgcctgcccttatattggcaatggcagcacagggaaaagtgtcgtcaactttcaataaatattcaagagttcaaagccatatcggcataacgggagcggaagctgcaagacgcattatggaacagaacggtatttatgatgtaagtatagagagggtatcgggaaatctgacggatcattatgacccgagcagaaaggtactgagactttcggacagcgtatattcaagtagttcgatagctgcaatcggtgttgcggcacatgagacagggcatgccatacagcacgcaagaaactatgcgccgctttcgctgaggagcttaatggttcctttggccaatataggttcaagactttcaatgccgttaatattgattggccttttattcagttttgcatcaagcatgggaaatacgttaataacacttggaataatatttttcggattatcggtagtatttactatcataacgcttcctgtagaatttaatgcttctcgcagagccatagcatgtcttgacgagagcagaatattatacagtgatgaaatagacggtgcaaaaaaagttttatcggcagcggcaatgacatatgttgcgtctacggtagtcgctttggcaaaccttttaagacttatcgttgtattcggaaacagaagagacgattgataaataagtatgaatatagtaaaagccgcttaaaaaattttaagcggcttttatgctaatcagcgatattaaataaagttaatattcattatgctttccaaagaccatggagattgcagtattcgtaagcggctacaaattcatctccgtctgcaattgcaaatacagcctcgggggcttcgcctgctttaagatatttaatctggcttccctgttttgtttcaattgcaatgaaggcaatgtgatgctcttcaagcataggatgagtaacggaacctactttaacagtaactttatttccgtccttttcaacaaccggaacgtgtttttcgagggcagcgtctacggtaccgggaacaagctcctgcattttttctccgcaacacataacgggaacacccttattgtccacatatgttatgatatttttacaatgactgcactgataaaatttcattgaaattacctccttttataaataagatattattatagtataaacttataaaacaattttattaatagtttttttttcttacttcaaaatatgctctcggatgagcgcatacaggacaaacatcgggagcctttttaccgattacaatatgaccgcagtttctgcattcccacattgtttcttcgctcttttcaaaaactttctgcatttcaacattatttaaaagttttctgtatctttcctcatgtgttttttctattgcagctaccatgcggaattttgcggcaagttctgtaaaaccttcttcttcggcagtttttgcaaatccgtcgtacatatctgtccactcataattttcgccttccgctgcggcaagaagattttcagcggttgtgccgatccctttaagttctttaaaccacattttagcatgttccttttcattatcggctgtatgctggaaaatttcagaaatctgttcgtagccttctttcttcgctacactagcaaaatatgtgtacttatttcttgcttggctctcaccggcaaatgcttccatcagatttttttcagtctgtgaacctttaagttccatctcaaaattcctccttttgtagtttaaatgatatttacatgcaatattttaacatgatttagaatatatttccacagtagtttaagagatttttaaatttaattacaaaaatattcattttattgattaattgccgaaaatgcggtaaaatattttagttatatatgaaaatctataagaggtacggatatgattaatataaatccaagagaagtcgcagctgacgcattaaacgatataagggaaaattcagcctacaacaatatgacgctgagaagatatctgcgccaaaacggagctatgccgagagttgacaaggcttttgttacggaatgtgtaaacggaacactgagaaatatgatttttattgattatgtcattaatattttttctaaaacaaaaacaaacaaacttaaaccgtttatattatcggtaatgcagatttccgtatatcaaatgttttttatggatagagtacccgatcccgcagtatgcagcgaggctgtaaaacttgtcaaaaaaagggggcttgcgcctctttcgggatttgtaaacggcgtattgagaaatatatcaagaaataaggataaaatagatatgcccgataaagaaagtccggagt

SEQ ID NO: 1094 - DNA, 6380 bp, Unknown
  16S sequences of unknown bacteria
cgcgagcccagcgaagcggtaagcgagagtcaaaatctttgattttgctcctcgagcttatgcagcgctgtcgcgtttgaatctttagatcagcaacatccgatcgttatcgagggccttgccggagacttctttgaatttagccagcagatccgggacagtcagatggctgcgttcctcgccggcggtgtccatgacgatgcggccgcggtccatcatgacggtgcggttgcccaggtccagggcggactgcatgttgtgggtaatcatcaggcaggtcaggtggttttcctcgacgatttttttcgttagaagcaggaccttttccgcggtggccgggtccagggcggcggtgtgctcgtcgagaagcaggagcttcgggacgttcagcgtcgccatcatcagcgtcagcgcctggcgctggccgccggagaggaggccgacgttctggcgcatccggtcctccaggcccatgcccagcagggcgacctggtcgcggaagcgggcctgatcggcgcgggagacgcggctgagccagccgccgcccccggcggccagggcaaggttttcctcgacggtcatgcctggggcggtgccgcgcatcgggtcctgaaacaggcggccgatgaggcgggcgcgcttgtgctccgggcggagggtcacgtcctggccgtccaggaggattttcccggcgtctgtcaggaagctgccggcgatggcgttgaacagggtcgatttgcccgcgccgttggcgccgatgatagagatgaagtcgccaggacggacgtcgagggagagatcatccagcgccgtcttagcgtccggcgtgccggggtgaaaggtcttagtcagatgggaaagcttcagcattgggccccctcctctcccgtgcccgcgcggcgggcagcaaagcggcggcgcagcatgggcagccgcgtcttgaaatacggcagcgagatggccgcgatgacgatgacggaggagacgagcttgagcataaaggcgggcatatcaaaccgcagggcgatggcgtagaccaggcggaagacgaacgcgcccaggaccatcccgacgatgcgccagcccatgcggcggcggcccaggaaggccgcgccgatgagcagcgacgccagggcgatggtcaccatgccggaaccgatgtcgatattgacggacttctgcgactgggccagcaggcagccggacagaccggtaaaggcgttggcgacgcaaaggccgacaatggtcgtaaagacgggattgatagacgaggagcggaccatatccgggttattgcccgtggcgcggatggcaaggcccagcttcgtcttcaaaaacaggcccaggaggacggcgacgagaatcaccgcgatggcggcgacaacgagcttgaactgcccggccaaggccgtgcctgccaacaggtccttcatctttgtgaagacagtgaccgtcttattcatattgaggacggaggaattgcccatgatggcgatgttgatcgaatagagccctgtattgacgataataccggcaagcaaactgttgacgcccatcttcgtctgcaggacggcggtgatgagccccgagagcattccggcggccatggcggcggcgatggccaggtacggatgcccggcgatggccacggccgcgccgacggcggcgcccaacgtgaagcagccgtcggtggaaagatcgcagacgtccagcatggagtagctgaggaacaacgccaggaccgtcaggccgttgatgaggcccagctccagagccgtctggagcagattcaaaatggaagcgtccataaaatgactggtctcctctcccctagtttcaggttgaaattataatcagctggcaaattcttcggcggtctcgatgctcttgacctcggtgcagtaaggagcgaaggtctccttcagggtatcaaacgcatagcccagctgctggcagacctcggtgttgatcgtggcggtgccgttgtcgaaggtgcggacggccagggtggccgggtccttgccgtcgaggagaatttctgcgatcatgtccgccgtctcgcggcccaggttggcgtagtcgacgccgtagccgaggaacgcgccgttcagggcgaaggagtcggcgccggtgtagtgggggatgcccgcttcggcgaaggtctcgtagatggtcagttcggatttcatgacggtgttgtccgacggggtgaagacggcgtccacgccgtcggcgaccagggcctgggcggccagggcgatctcatcgaccgtcgtgccggtgcgctcgatgacttcgacgccgcgatcgctcagattcttcttggcgtcggcgatggcggtggcggaggagtcctgcccgacgtcgtagagcaggccgacttttttcgtctccgggttctgggcaaaaatcaggtccataatggcggcggtatcgagatagtcggacgtgccggtgatgttgctgcccggggcatccaggctagcaacgaggtcgacagacatggggtccgagacggcggcgaagacgacgggggtctgggttccttccgtcgcggcctgcatggccatggccaccggcgttgcgacgccgacgagcaggtccgtgccatcagcctggaaattggagatgatctggttcatcaggctggcgtcggcgttgcagttatcgtaagaaacttcgaagctcaccccccgctcctggccgatctcctccaggcgggattcgatgttggcgacgatctggttcagggacgcatcatcgacgtagttgcagatgccgacggtgtaggtctcaccgctggaagcgttggacggggcggcgtcggagccgttggtgttgtccgccgtcttgccgcagccggcgaagctgccgacgcagatcagggcggccagggtggaggcgatcagttttttaaacgttgcttttttcatgatgatttcctttctatgaacgcgtgccggagcggcacggtggaggttagggttgatttttggcgaatttctttgaattttgtcacggttcgggacgccatcgtttatagagcatgttgtgcggcatttttggttcctccaatttcttggctggggaaataaaaaaactcctgccccagcgattttgctgggacaggagataacatcctgcggtgccacccggcttggcgcgttatttgcgcccacttcgcgtgcactaccatgcaccggcatttggtcacggagtgccgctccgtctcacatactccaggggggtgaaacacgcgccctgtttccgatcgccctcgaaagtccattcagcgggatcctcttctgctgcaatttcaccatctgcagctctctgggagaacggtgctctcgcctactcactctttctcaacggtttttctgcattctaccacgcgtttttcctcttgtcaatggggaacgcacaaaaatttttctctccacccaacgcgttcacgattgattcaccattgcagaaaacagatgtagtatgatagaataaataatgttctttaaaaaagcctcgcagagtttgcgcccgcaggcgcaaataaattctaaatccgttttttccggcggcgtgtacgtcggaaaaaactctttacgccctgcaagtgtggaatttccgcgccaacggcgtggaaattatgcgcgcagcagggtgcattcccctcaaacaagagcccagcgaagcgggtcttgtttgaagctttcgcaagaaagctttccagaaaggagacaccatcgtgaaaaaagggttccaaattctgaccgcgctggtctgtgcgttgatgctgatgggggtgacgttcgtcatcacctacactgcggtcagccggcactatggcgcatcggaggaggcacagcagattagccaaaagacggcggagctgtacgcctacttagaccactactttatcggcgagaccgacgctgctgccctctcggacgcggcatccagcgccatggtcgacgccatcggcgacgagtggagctattatatccccgccgacgaataccagcagcatctggacatgctgcaaaacgcctatgtcggcatcggcatcaccatcacccaagacgaagacaccggggcattccccatcgtcaccgtcacagacggcggcccggcagcaagcgcggggctgctggcaggagatgtcatcaccgccatcaacggacaggacgtgacggcgctttctatgtccgagctgcggtccctcgtccggggcgaggaagggacgacgctctccctcacctaccggcgcggcgataccgaatccacctgcaccctgacccggggaaatatcgagacggaggtcgtccacgcgcagctgcttgacgggggcatcggctatgtccgcatcgtgaattttgacggcgggtgtgcagagaagaccatcgcggccattgaggacctgcaagcgcagggggcggcgtcaatcctatttgacgtccgcaataaccccggtgggctcaagagcgagctggtggacctcttggactatctcctgccggagggcgagatcttccacaccgtcgactacgcgggaaatgacgagatcgacacgtcggacgaagcgcacttggcgctgccgatggcggtgctggtcaaccgggaatcttactcggcagcagagttcttcgccgcggcactgcaggagtatgaggcggccgtcatcgtcggaacgcaaacgtatggcaaggggtatttccagtcggcgctgcagctttccgatgggtcggcgatcaatctctccatcggcaagtattttaccccccagggcaagagtctggcgggcgtcggcatcacgccggatctcgagatctccctaagtgacgacgaagcagcttgccttgccgccggaaccctggcgctttccgacgatccccaacttttgggggcaatttctgccctggacccggaaaagacttgacacggcggggtctcatcttctataatcacagaagctatcatagcagtggtatgcctgcacgcaggcttcacgaggatatacgcggaaggaagggtcaaaatggcaaaagaatttaagatcagcagcgcccgtctcaaggaattagaggacgagctgaaatacctgaaaaccacccgggaaaaggaagtggccgagcagatcaaggaggctcgctcctttggcgacctctcggagaacagcgaatatgacgaggcgaaaaacgagcaggccaagctctatggccgcatcgccgaggtggagaatatcctggcccacgccgttatcattgaagaatcggatgagcaggcgggccacgtcggcctgggctgcagtgtccgcgtcaaggaccttgacaccggggatgaggaggccgatccgatgaacctgcgcatctccgacgacgcgccctttggccgcgccatcatcggcaagaccgagggcgagacctttgaggtcgaggccccggtggggacgctgcggtttgagattctctcgatcacccggtgagcgcttgtcttttgacaagcgcttcaaatgcgacccgcttcgctgggctcgcatttgaggggattgcgtctcgctgcagcgcactcgctgcgcgccgtaggcgcacagctcgcacgtttgcgagacgagaagtatttttgtcgacgtatgcactgcatgggttcgacttcgccaatcgcgctgcgctacgcttgcgctcttggagtctcacccacttgccgccgccaaaaatgatttggaatttatttgcgccgtgcgcggcgcaaactctgcgaggcttttgggactgttttgacagtctggaattacagtctgattattctgtgattatagagttatagttcgcgccggctggctttggccggggcgcgttggagggatatcatttgggtaagcacgaaaatcaactttctatgaccgaccaggtccgcatccgccgggagaagctggcggctctgcagcaggaggggcgcgaccccttccagcagacgaagtacaccgtcacgtcggacgccgccgccatcaaggcagactttgccgggatggaagggcgcgatgtcagcctggcggggcgcatcatgagcaagcgcggcatgggcaaggtcctcttctgcgatctgcaggatcacaccgggcgcctccagctctacgtcaaatttgacgagatgccggaggcccagttccaggatttcaagaagtacgacatcggcgatatcgtcggcatcgagggcgatgtcttccagacccagcggggcgagacgtccgtccgggtccacaaggcaacgctgctctccaagagcctgctgccgctgccggagaaattccacggcctgacggatacggagacccgctaccgccagcgctatgtcgacctcattgtcaaccccgaggtgcggcg

SEQ ID NO: 1095 - DNA, 20893 bp, Unknown
  16S sequences of unknown bacteria
tacgagattcgccttagtctcgtgggctcggagatgtgtataagagacaggacatctttctagcaatctaggcgtggtagaattgacggtcgccttgttatgcagcttccacgtgccagaggataagattatattcgatgttgggcaccagagctatgcttacaaaatattgacagggagatataaacagttttccaccctccgaaaaaaagacgggatagctgggtttccaagaaccactgaaagcgaatatgatgcctttgatgtggggcacgcttccacctcgctttctgctggcctaggattagcccgtgcgcgcgacattcgggggcagcatcaccatgtggtgtctgtggtgggcgatggtgcgctatccggcggcatgtgctatgaagcgttggatgacggtgggcagatccaaaccccttttatcgtcattctgaatgataaccgtatgtccatagcgcgcagcgttggaggcgtgagccaatatttgagcaggctgcggaccggccggcattaccgcaacttcaaaaaaagagtacaaaaggctgtaacggcgattcctaaaattgggccaggcatggcgcggggtatggaacgcctgaaaaacagaatcaaatattttgtattgcccaacgtaatctttgaagagctgggctttacctacattgggccgatcgacgggcatgacatcaaaaagctgtgcgatttgttcgaccatgcaaaaacgctaaagcagccgtgctttttgcatgtcatcacacaaaagggcaagggatatacgcctgcagaggcgaatcctgaaaaatatcatggcgtggctccttatcagatcgaaacgcctacgccggaaaaaaggacttccaactccgctttggttggacaaacgctggaaagccttgcagagcagacgccgtaccttgcggcgattacggcggcgatgccgagtgggactgggctggaaacatttgggaaacgctttccggatcgattttttgatgtaggtattgcagaggagcatgccacaactatggcggctggcttggccaggggtggcgtacatccattttttgtggtgtattctacttttctgcaaagaggctatgatcaattgctccatgatgtatgcttgcaaaaactaggcgttacgctatgtatcgaccgggctgggcttgtaggggaggacggggatacccatcagggcgtatttgatattgctatgctgatgagcatgcccaatatgacggtgttttctccggcaacacaggcacagctggtgcagatggtgcgctttgcagcaaattaccaggcgccgctggcgattcgttatccacgcactgctttaccggtggaggatgcagagctggatgcaacaccgctgtttgcttggatggtgcgggaaattcggcctgttaccctggtggcaacagggaaaatgtgggccttggcttgcgagactgtacgtaccctgcaagagcatgggttggagatagggttgatctatgcgggctgcttaaaaccattggatgaaaaggtggtagagcggctggcacaaggatgctcgttgttggttacgctggaggatggcgtcgtaaaaggtggctttggcgcttcgttggcccaggcagtagcggagaagagaaaaatacagacgttgcattttggcatgccagatgcctttgtgccacaaggtacggtagaagagctttggcaattgctggggctgacacccaaggacgtagcacagcgtattttacaggagacagagagatgaagcagggaaagatccgattggacgccgcgctggtggagcgggggctttgccagacccgcaccaatgcacaggcgttgattatggcgggagaggtgcgcgtcaacggtcagtctgtgctcaaggcgtcgcaccaggtaaagccggaggatattttaacgctgaaggaaaaattgaaatatgtgagccgtggcggtttgaaattggaaaaggcattgcgtgtatttcccatagacgtacaaggggccgtttgtgtggacgtgggtgcatccacaggcgggtttaccgactgcctgctgcaaaacggtgccaaacacgtatatgctgtggatgtggggcatgggcaaatggcctattctctacgcaatgatgaacgtgtaacttgcatggaaaaatacaatgctaggtatatgcaggtagaggacatcgagccggtggactttgcatgtaccgacgtttcctttatatcgttggagctgatcttgccgccaatctatcgttgtatgaaggatggcgctcaggcagtggctttgatcaagccgcaatttgaagcaggacgagagcagattggaaaaggcggcgtggtacgggacgctaagatccatgagcaagtatgctgtaaaattctttcgtttgcgcagagtcttggattttccgttaagggcttggaagaatctcccatcatggggccaaagggaaacagggagttcctgctttatttgcaaaaaagcggagagcagctttcggccagcgcgttgcaagcactggccctgatggctgtacaggcaggtcgataaggaaaaacttgtataaacattacttttgcttgtgttttatgcaagtaatttgtataataacaagcgatgggaggcgttaggatgcaggcggtgtatgtcattgccaaccggcataaggatcaaggcctaagatgtgcccgtgagatggtacagcgtttgcacgagcgaaaaatacaggtgtacgcaccagacgagattgcggcggagctaggcgtacagacggcggcgttttcccaagaggaaggctgtgaggcggcatttgtgctggggggcgatgggacaatcctgcgcgcagtgcaacggctatccatcctccagacccctatggtagggctgaatttgggcagcctgggctttttaacagaggccagccagggcgctatgccggaaattgtggacaaggtgctgggccgtgcgttttccgtagaatcccgtatgatgctgacggctcatattgaggaaaagaccgggcaggtggtcagcagagagtattatgcgctcaatgaatttggtttgtttcgccgctatatgggcggcgtggcctccgtggtggttcgttatcaaaatcaggtggttggcatgtatgattgcgatggcgtgatggtggcaacgccgacaggctcaactgcgtactccctttctgcaggcgggcccgtagtagatccccaggtgcagtgcatgctgattacccctgtatgcgcgcattcgctcaatgccaggccatttgtggtgccggataacggcgtggttaccttggcggcgccaacgacaaggcagggtgtaatggtggcggtggacgatgcgtttcgtatgccggtaatgccaagccagcatgtggtgattcgaaagagtgagaaaaaggcaaatttcatccgtttatcggaaatggatttttataaacagctgggtaagaagcttacgcagtggaatcatacaagtgcaatggaggaaccccaatgaaaaacaaacgtcaagagatgattttggagatcatcgattcgatgaatgtggaaacacaggaggaattggcggaaatcttgaaagagcgcaatttccccgttacccaggctacgatttcacgcgatatcaaagagcttcgcctgataaaaaccctatccgataaaggggtatattgctatacggcggcagaaaaaaaggatgtgcgcagccaatctgcgatgatccgcttgttttcagacgtcgtcatcagcatcgaggcaacgggaaatctagtggtgatccgcacgttgtccggctcggccaacgctgcgggtgaagcgttggatactatgcacctaacggagatctgcggttccatagcaggcgataatacgatcttcattgccgtgcacgaaggcgtgaacatggcggattttatcaagaaattaaaaagaatggcgaaatgatatgttacagcatctatccatccaaaatgtggctttgattcgctccttatccctagcgctgggtcaggggctgaatgtgctttccggcgaaaccggagccggcaaatccattttgattgatgcagtaaacctggtgcttggcgtgcggggtgatagggatttgattcagcatggcgcgggcagggccatggtggaggccgtctttatcgacgctaggccggaaatcaatgcctgtttagaggaaatgggcattgagccggatgcggaaatcacgctttcccgtgtgttgtatgccacggggcgtaacgtatgccgcatcaacggtgttttggtaaacaatgcagcgctgcgccagatagctgagctgcttatagatatccatgggcagcatgagcatcaatcgctgctacgcacagcagagcatatcggccttttggatgcgtttggcggcaagaagattgcagcgcagcgtcaagaagtaggttcgctgctggaaaaagcaaaacacatccggaaagagatcgaaaacatcggcggtatgggagaagatagggagcgccggctggatgtgctgcgctttcagatcaacgaaattgaacgggccgccattcaggagaatgaggatgaactgctaaaaaaagagcggcagcagctgatgaatggagaaaaaattgcaacggcgtacgcctatgtattaaattgcctggcaaacgaagaagggcaaggcgctgtaacgttgctgcgtgatgcgtcccgggaaatacgctcggtggcaaaatgggatgaaaaggcggcgcagctggcagatcagctggaggaggccttttttgcggctgaggcggcgtcggatgaaattcgcttgatgcaagatgcctttgattatgatccgcagcgcttggatcaaattggggaacggctggacgagctgcaaaccctaaagcgcaaatacggcggaacgctggaggcagtgcagcaaacccttgcccaggcctatgagcagctcgatgctttgcaaaatgccgatcagattttgcagcggctgtcaggggaatatcaaaatatcctgcatttgctgtatgaaaagagtgtaggcctacatcaaatgcgcaaaaaagtggctgcggcctttgaaaaatccgttaccaaggagctaggagatcttggtatgcagcgcgcacgctttgctgtgcaattcaagcaactgcccgcagaagaacagatgggcatcgagcagtttaccgcgcaggggttggatgaggtggagtttatgctcagcgccaacccgggtgaaccgttgaagccattggcaaaggtagccagcggaggcgaagcctcgcgtattatgttggcgctcaaaaatattgcggccaggctggacggcatcgactgtttaattttcgatgaagtggatacgggcatcagcggaaggatggctcaggtagtcgcggaaaaaatggcagccattgctaggacgcggcaagttatttgtgttacgcatttggcgcagctggccagtatggcggatgtgcattatcttatcgaaaagcaggtaaagggggatgcgacgcagaccatggtgcagcgtttgacgccaacgcagcgaacccaggaagtggcaaggcttttgggcggcgaagggcaaagcggccatggattgctgcatgcggaggagatgatcgcagcagcggacgcttacaagaaatcactggcattgtaaacctatctagaaaggcggagaaactccgccttttttgtttattcaacagcttttcggaaatactatccatgattgaagcaacgaggagaatagcagatgaaaaaaggcatacgtatagcgggaatgatcgcggccgcccttgtattttcattccaattttttttgccgcaatggcagttgggcctgccggaccgtgtctataccacggcaggggagacaacaatcatccaggcagggctgcccatcagcgtatcggtttcggcgaatcgggaaggcgtcgaggtaaacggccaggccatcacagaaggccagaccgtggatctgtctcagcctattgagatacaagcaaatagtgcaggagaaacagaggttgtcttttcctgggcggggatgacgctgagaaagatgacggtaaaatctgaggacaataggaaggttgtgccgggtggggatgttgttggcgtagccttgtataccaagggggctttggtggtaggtacgggagatattacaaagccggatggcacgactgtgaatcccggcaaggatgcaggcatactacccggcgacatcattttgagcatcaacggaacagaggtggaggattccgatcaccttacagcgctcatcaatggagccaaagaaacgctgaccgcaagcattttacgcgatggaagagaagtaaacgtttccattgccccagtacaggatgcggtagatgggcaatatcgtatcggtctatgggttagggacagcactgcgggcattggaacagtaacctattatgacgaaaataaccaggcctttgcctccttggggcatgccattgcagatgcggacaccaacaccaatctgctgttaaaggaaggcgagattgttccggcagagatcgtcggcgtacaaaagggggaggagggaaccccgggcgagttgttgggtacactgattacagattccggcgctctaggaaagatagaaagcaatacagaatatgggttgtatggcaaaagctatcaggcgatggtgtcaagcgcatatccgtctgggatccaggtaggctggcaggatgaggtgcagacaggcccggcccagctcctctgtaccctggacggaggggaggcagaggcgtatgattgtgagatcatccgcgtaagccaccagaagcgggcggccggcaagggcatgatcgtaaagatcacagatcagcggctgctggataaaacgggcgggattgtacaaggcatgagcggaagccctctgatccaaaatggaaagctgatcggcgctgtaacgcatgtatttattaacgatccgacgcgcgggtatgcagtattcattgagtggatgctgcagcagtctgatcaggtgcaatgagggcattttgaaaaagaagagcgctttgatacaataaaggaaagacaataaaggagaaatggtgtggcaaaggttgtagtagcgttgttggatcataatgtgcaggaaggaaagaaccttcaggcgtatttacaggaaaagccggatattgtgtggaaaggttggtatttggatgtaccgcagatggaaaaggcattgaagcggcaaaggccggatgccattgtcgtatccatgcaggataccgaacgcgatgcacagatgcttttggcgctctctaaagcagatttggcaaataagtatcttttatatacctcacaaacggacaaaaaatggcatcaacaatgccgtgatctgcccataggctttgtggtgtataagcaaacgccgatggaggtattgtaccaaaggctattgatggtagccaaagcagcgggggaacaggggatggtgtatcaccgccaagtacctgtaaaaattgcaaagcaagaggtggccacggcgctcaaacgtaccggcgtggctccaaagctttgtgggtatcattatctatgccgggctgtggaactggttttggaacatccagactggatggatagaatgacagaaaaactgtaccctaccatcgcagcagagtatgaatccacctcccaacgtgtggagcgttcgatgcggtatgcagtggaaaatgcgttcgactgcggtgacctcaaagagattgagcgcgtattcggctatactgtggataaggaaaaaggaaaacccagcaacagagaatatattgcgcgtatggcggatagccttcgcatcgcacagacataaaacatgcagaccgcccataacctgatgacaaaggtgggatggcggctgtgtatatgcgtagacgaggacatagcaaaagggcgcaggcggagatcgtctccatggggggatggtatcttcttgtcctttttgtgctgctggtagggatgacttgcggctgggccttaccctcctgtgtggaggagggggaacggcagatcatcacacagcaggcgtcggcgctgctggcacaggcagcctcgccccaaatgccgctggccgcgatgctgctgacagccatgctcaatgcgttgcgcacagtcggccttttgtttgtgggcagcttatcgccttatttagcggtgttctctggcattgcattatgggccaaggggtttggcattgggtttacgctgcatgggatgcagctggcacatggctttgggggcttgtttttggcctttgtgatgctggcattacaaaactgtctatatttaccaagctatgcatatttagccgtgcacggtggacggattcagggctatgacaatacgtcgctgggcggaaaagcattgctgttttgtcgccaatatctatggtgcttggccgctattctggcggcagttgtgatagaatgtatcatatcccccttgctgctaagggcgatttacggatggatcttttgaaaggaacggttatgaacggaaaaaagtgtatctgtattgtattggatagcgtgggaatcggtgcgctgccggatgccagccgatttggcgatgagggcagccatacgcttttgcatgtgatgcaggcgggctatccgctgcccaatttatgcgccatggggttggccaacatcgacgagtgcaggctgccgggcaaggtagagtcacccaagggatgttatggaaaggcggcagaacggtttcaaggcaaggataccacaggcgggcattgggaaattgcggggttggttttggacaagccgtttcccacatttccgcaaggattcccgaaaccctgcatccaagaatttgagaaaaggatcggcagacaggtcattggcaaccgggcagaaagcggtacaaagatcatacaggaactgggggatgagcatgtgcgcacaggctttcctattgtatatacctctgcggacagcgtattccagatcgcagcacatgaagaggtgatcccggtagaaaccctgtatgagttttgccgcgaggcacgtagactgctggatgggccgtggcgcgtcggccgtgtcatagcccggccgtttacaggacatagcggggcctatgtgcggacaaagcggagaaaggatttttccgtgcagccgccaggaaataccatgctggatgtactgcaaaaggcagggctggaaaccatgggcattggaaagatcgaagatatatttgcccaaagagggctgagccgaatagagcataccacggacaacgcttcgggcattcaggcaacgctccgtgcaatgcagcaaccgttccaggggcttgtctttaccaacttggtagattttgatatgctctatgggcacagaaacgatgtaaagggatatggggaagctctcacagtgtttgacaatgcattgccagagcttatagcagccttagggccggaggatcttttaatcgtcacggccgaccatgggtgtgatcctgctacgccctcgacggatcattccagggaatacataccgattcttgcgatgggcccggcggccaaagccggcgtaaacatcggtgtgcgcgatacgtttgcagacattgcggcgacaatcctaacgttttttggcatggataatccgctgcagggaacttcgttttatcaacaaattgtgggggaggcgctgtgatgagtacacaatatcaacaggtaaagcaggcggctgcttatatacgggaaaggacaagcttggtgccaaaggtagtattggtgctgggctccggcctgggcgattatgccgataggatggagcaggcgcaggtgatttcctatgaggagatcccgggattcccgatctctacggtgaaagagcacaaagcaaagctgattttaggaaccttattcgatgtgccggtggcgatcatgcagggccggtatcactattatgagggctatacgcagcagcagattaccttgccgatccgcgtgctgcgcgagctgggcgcagaaattttatgtttgacaaacgcttcgggcggcatcaatctttcctttgagccgggcgacttgatgatgatagacgaccacatcaatttttccggtgtatcgccgttgattggcgaaaatgtggaagagcaggggctgaggtttcccgatatgtccatggcgtatgacaaaacgctaaagcaatgcttgctgcgcgcagcagaaaaatctggcgttgacttaaagcgaggagtatatatgatgtataccggccctcaatttgaaacgccggcggagatccgttttggcagagccattggggcagacgcggcaggtatgagcacagtaccggaggttattgtgggccggcattgcggatttcggatctgcggggttagctgtattaccaatatggcggccggcattttggatcagccactgtctcatatcgaggtaacggaaacggcgctaaaggtcaaagatcaatttgccgcgttgatcgatgcgtttttgcgtgaggtaaaagaggcctgaacaggcataaaaatggaatttttagcatatccctccattgaaagaaatggggggatttttatgcgaaaagcattggctgcgtgcctggcagtctgtttgatggcctttgggtgcggatatgcaatgacagagccttctgctatggaaacaaagagcagcagcgccgttttgatggagcaggagacggggaatatactgtttgaaaacaatgcagatgaacagatgcccgccgcaggctgcgccaaggtaatgacgatgctattggtctttgaagcgatagacgatggaaggctcacgctggatgaacagatcaccgtttcccagaccgctgcctcaatgggcggtacacaggcctttttagaggccaacgcctcttacaaagcggaggaccttttgaaggggctctgcgtggcaagcgccaacgacgcggccattgcctttgccgaaaagttgtttggttcggaggaggttatggtgcagaagatgaatgaaagggcccaggcgctgggatgtaccaatacgacctttgtcgatgccgtcgggctgaaagatgaaacggtgacaacagcgagggatttggcgctgatggccaaggcgttatgcgagtacagaaacgtgttcccttatacaagtgtataccaagatagcctaacacatggtaccggccgcgtgacagagctggtaaacgccaaccgaatggtgcgtttttacggaaactgcgacggcttggcgacgggctcctcggccaaggcgcgctatggtgtggcggctacggccaaaaagggagatatgcggctgattgccgtggcgttgggcagcactgacagctctggaagatttgacgacgccaaaaccatgctggattatggatttgccaactatacctctaaggttgtggtccgtaagggagaaacgctgaaaaaagagctaaaaatcgagggaggatcgccgcataccatcgatgtagttgcgggagaggaagttcgccttgtcatgaataaaggagaagaaaaaacgctggaaaaagagcttgtgcttcaggaaggcttgcaggcccccatccaaaaaggacagcagataggcgaggtcatcatcaagcaaaacggcgccgagctctgccgcacggccgcggtcagtgcaggagatatcacacagctgaatcttatggaatgcgtccggcgcattgcaaaatggtggattcactaaacttaacttaaattcattgacaatctttttaagggcatgatacacttaaccattataaatccgatgcacgaggtgtacttttatgcccaaaagaatatacgaaatcaatgagttgggtcatcttgtttttggcggctgtgatacggtagagcttgcaaaaatatatggcacccctctgtatgtaatggacgcggcccagatcgatgcgcagatgaaggaatgcgtgcgtgccatgaaagatcagtttgcggcctacaaggtattttacgccagtaaggcattctgttctaaagctgtctataaaatggcgaagaaaaatggactgcatttggatgttgtctcggccggcgaactgaaaatggcgctggaatccggcatgccgggagagcgcattgcgctgcatggaaatgtaaagctatatcctgagctgagcatggcaatagagcatggctgtaccatcaatattgacagcgtggaagagattgcggatatccaggccatcgcggcagaaaagggaaagcgggtgccggtactggtgcgcgtaacgccgggcgtggaggcccatacgcataaatatatccagactggtatcgaggactgtaaattcggccttggcattgataacggtatggccatggaagcgattcgcacaatcctttcctgtcccaatctggatttttgcggtatacacggccatattggttcgcagattttggaggatgagccctatcggcctacgggacgcaatctcgcggcgtttgctatggaggttgaatccaagctgggcgtgcaggtgaaggagatcaatcttggcggcggctttggcatcatgtatacagaggatgatacgccgctgcccatagtagaatacatgaaagaggccaaagcagggctggaagaggtttacagtgcggccggcaaaccgttgcccgtgatcggcatagagccgggccgccgcatcgtaggcgaagccggcattacgctgtatacagtggcgctgcgcaaggagattcctggtgtacgctcctatgtatctgtagacggcggcatgacggacaatatccgcgtttctatgtatcaagcggaatacgaaggcgtgctggccaatcgaatgaatgatgccgtggaggaaaaagcccgcgtagttgggcgttgctgtgaaagcggcgatattttgatgatggaggcgccgctgcccaaagcacagaagggcgatgttttggcgatgtttgccaccggtgcctactgctatgcaatggcgtccaactataacaagctgccgattcccacggtagtgatggtggaaaatggaaagcatggcgtcatcgtaaagggacaaacgctcgaggacatgacgcgctttgagcaaatcccggcatggttaggagaagaatatggggattaaccaattatttcgagacccgggctcgtttttgtacgcgatgcttctcactttgcccggcattatcataggtctcacattccatgaatatgcccatgcatatgtttcttataagctgggcgacccgactcccaaaaaccaggggcgggtaacgatttccccgtttgcgcacatcgatccgctgggatttattatgctgctgctgtttcgctttggctatggcaagccggtcatgatcaatccaaacaactataaagacaggcgtaaaggagagatcctagtttctttggccggcgttacgatgaatttcattgtagcggtggtatgcgcgctgatttattatctattgataaaatttcaggtactggcgttcggctcggtgattcgtatcatgctgcagtatacgattatcatcaatatcaatttgatggtctttaatctgctgccgattcctcccttagatggctacaaggtggtacgcaatcttttgattgggaaaatcgacgttggtaagctgtggcaattcgaaagctttttcaaccgctacgggtttattatcctgtttatcttgttgtatttgcctgccacgcaagcattgatccaggccctttccggctatgttttggactttgtcaatttgttgacagcctggatcctgtaacgatgacgtatgcggtaaaattggagtcctttgaagggcctttggatctgcttttgcatctgattgcaaaggcccaggtggacatcaaagatatttttgtatctgaaatcacggatcagtatctatcctatttagagcagatggagcagttgaatatggagcaggccacagagtttttgaccatggccgccacgctgctcaacataaaatcgagaagcctgctgccaaagccggaaaaggtggaggaagatgaagatccagaggcgctgctgattttacagctagaggagtataaaaggatcaagcaagtttcggatacgctgcatgaaatggaagcgcatgcggcccaaagctactataagctgccggaagagtacgcgtttcaggatgacccgttgaacttagaaggcgtgagcgtagaatcgctgtatgatgctttgcaggaattgcttgcgcaaaaaaaagaggcagagcaaaggccggcgcgtatcaacgtgattcgcgcagagccgtatactgtgcgacaccagattgcacatgtaagggcctttttatccaaacgggggcgcatgcggtttgatgaattgtttgcaatccatgcaacgcgcaacgaaatcattgcaacctttttagcgcttttggaattgatttcggccggcgaggcgggcgccagccaaaaccagagatatggcgccattgaaatcgtctataagggaaaagggaaagaggaaaaggcatgaatgatgcgcaggccagaggtgcgctggaagcgatactatttgtggcaggggaagcggtacagctggaagatctggcccgtgcgctggagatgacggtattggagtgcgacggttttatcgaccgtatggcccagcagtatttggcagagcagcgcggcgtagagatcatccgtatcgaagacaaagtgcaatttcgtacaagccggcaatatgcagagcaggtacaagcggcgctcaagccgttatccgaacgaacgctgtccagatcggtgctggaaacgctttccatcgttgcatacaagcagcctgttacccgcagtgaaattgaaggcatcaaaggcgtatcggcggattactcactgagaacccttttacagcgtcgcttgatagagcctgtcggcagaaaggaaacgataggacggccgatgatgtatggaacaacggatgagtttatgcggcattttgggctgtctacgctttcggaactgccgcctttgccagagatagaaaaagagcagaaagagatgccgctctgagagcgtaaaatgaataaaacagggcatactaacccaaagttgaggtggttggtatgctttttttgctggcttttactgttgggtttgtcttaacgctgcccattcaggcagaaattgaagcggaagcggatctgtatggtacagagggagcgctttccttagggctgccgggcttacgcaaagagattcaatggcatgtcccttggctggcctggacgccgaaacaacgaaaaaacaatactaagatcaagatgcggacgatctggcgctcgatacagtatctattgaaaaaaacaacgttttatgatctcgaggtaaaaacaaagctcggcaccggtgatgcagcgcaaacagcgcttatttgcggcgcagccaacggaattacccgagcccttatcgcaggctttatgcgtgatgtgcgcccgggagactttgcacaggcttttgcctgtgaaccttgctttgaaacagactgcttggctgtaaggatttcatgtatcgcaagcgtgcctctcgtccatattattggtgcagggcttttgataccgatcaaccattggagggaaaaacgaaatgcatcccattgagagtatgatgacaacggcaatggaacagatcaagcagatggtggatgttaacaccatcatcggcgatccggttcagacgaggcagggcaatgtgattttgccgatttccaaagtcagctttggatttgtagcgggcggcggagaatatggcaagggaggcagcatccgggaaagcaataaagatgcgacggaaaacccctttgccggcggcagcggcgcaggtatctgcatatccccagttgcctttgtggtggtagaggatgagacggtacgcttgatgccggtagaatccaaccacgctatggaacgggtaagcgaagcgatcccgcagctcattggcctgatcaaacattttggctgtaaaggaaaaggacaaaagcaaggacaaacaaaagaggaatgctgcacagaaacggtggaacagaaaccctgcggtgatgaggacattacctacaaacagacggtttccgtaacaaaaacagaatcggaatgatctgccggacgcagcaaagaggagcggtgcaaaaaagcatcgctcctcttcttttgctccgatttattgtcttgcgcggaaaaagcacgcatatactggaaatatatcgaaaggaaacaaggaagagtgcatagggggtaaagatgaaacggaaaattgcgatatgcttggcgatgctgatgctttggatgccctattcggcagtaaaagcaatgccagaggtgtcctctcacagcgcctgtgtcatcgatatagatacaggacggatcctagcggcgaagaacgaaaatgaaaaatcagagccggccagcattacgaaaattatgacggccctgattgcgctggaaaatgcagatatcaaaaaggtagtcaccattcccagcgccgcagccggtgtagagggaagcagcatctatatcaaagcgggggaaaagtattctctggaggatctattgtacgggctgatgctacgcagcggcaatgatgccgcaacggccattgccatcgacgttgcaggcagcgtggacgcttttgtggaaaaaatgaaccagaaagcgcaggagcttggttgtacgggtacgcattttaacaacccgcacggccttccagatgaaaaacactacacaacggcccacgatatggcgctgattactgcggcggctttgcgcaacgatacctttgtaaagatcgtttccaccaaaaactataccgcagagccggatggagcgggggaaacgcgatcttggcaaaacaaaaacaaacttttatggcagtacgagggcgccattggggtgaagacaggatataccaaaagcgctggtaaaacgtatgtgggcgcagcggaacgcaacggaatccggatcgctgtggttgtgctgggtgcaaaggatatgtggggagatgccgcaatgctgctagacgatgcctttgccagctatcaacaggttgacctgataaaggatgggcaatccacgggggtaacgccagtgctggaagggctttccagcgaggtagaaggtataacagagggaagcttgtccaaaacgctgacaaaagaggaacaggaaaggattgtaaccaagtgcgtttaccaaaccccactttatgcaccagttgctaagggcgacatcatcggcagcatgcaggtgtatttagacgatgagatgataggctctgtgcccattgtagcagcagcggacgtggctgcctatgattttgcccattgcctggataaggtgattcgccaatggatcacaaacctattgccttgacaatcggcccttgtccgatataataaaactaaatttcatgatggggtgctatgcgcttttcatcgggcaggagaggcttagatgcggctgcagaagtatatggcagactgcggcgtggcttccagacgaaagtgtgaggagatcatcgccgagggaagagtaaaagtaaacgggcagaccgtaacgctgttaggtacagcggtcacgccgggcaaggatacggtaagtgtcgacggacataagatcgccccgcatcatagcagggcgtattttctgttctataagcctagaggtattgcgtgcacgatgaaagatgaacggggacggcgctgtgtaggggattattttacccagcagaagcggcgcctttttcctgtcgggcggttggattatcatagtgaaggactgttattgatgacggatgacggagcatttaccaaccaagtgacgcatcccaagcatcacgtgcaaaaaatatatcaggtaacaacggacaagccgtattcgcaaaaactggcgaatgcgctgatccaaggcatagatatcggggagccgccgttggccagggccgtagcagtgacatttcaaaaccggacagacggcagaggacaggtaaaaattgccattgaagaagggagaaaccgcgtcatccgtcggatgatggaggcgcaggatatgcaggtgctgcggctaaagcgtatccagatcgggcagatagagttgggagatagaaagcccggcacatatgagcgattgacccatgagcaggcaatgcgcgcgctggaaaagccgccggcctatataatgcgacggtattgagggaaacaccatgaaagtatatctgcttcgccatggggaaacggaatggaatgtgcagcatcgtgtgcagggtgcgctggattccccgttgacagaaaatggaatacaacagacaaaaaacgctgcaaaacggttggcaaaggtagagtttgatgcggcctttgccagcccatctcccagagcataccgcacagcacagatcatagcagggccacataaggggctggtaattcaaaaggaaaacagcctgagagagttttcctttggcgtgtatgaagggcatagcctggacaatatgcatgtggaatgcccgaagctatgggggcagttcgaaacaaccccttctttggttacgagcccggagggagattgtatggtggcccgcgtagcggaaagccgccgatttgttgaaaagctgacggcacagtatatgcacaagcaagtattgtgcgtatcccatggatttggtgtctgctattttctttcggcggcgctgggaatcccgttggagcattctcataagtttgcctctggaaatacggcgctgaccatcatagagtttttggcgccggataggccgctggtgcgtatatttggtgataccagccacaatgaataaacggtatggatgattgtgaggaattagagaatgaaaatatatttggtccgtcacggagaaacggaatggaatgtcctgcgccgcgtacagggcagcatggatgccccgctgacggaaaatgggatacagcaggcaaagaacgttgccaaacggttggcaaaagtggattttgcggcggcctttgccagcccgcagatgcgcgcctatcgcaccgcagagaaaatcgtagcggagcatccgacaattacgctgcaaaaagagcctagccttcgggaattttccttcggggattgggaaggtcacaagctggatgaaatgcatctggaggtgccggataaatgggattgctaccagaaaacgccgtctttgttcaccgcgccgcacggagattgcatgatcgctcgcgtagcggaaagcaaggcgtttgttgaccggctgttggaaaaccattgggggcagaatgtgctgtgtgtaacccatggctacgccatccgcatctttatggcggcggcactgggaattccactggaatctacgcgctttttcatggcgggcaatacggcggtcagcatcattgaatacaaacgcccggatatgccgcagatgcgtgtgtttggcgacgtcagccataatttaacatgaatagggttattatcattggaggcggcgcggcaggctgtatggccgcatatatggcggcgggctacggagcccaggctgtgctgttggaaagtactcccaggctgatgaataaagtgcgtatcaccggcaaggggcgctgtaatttgaccaatgcctgtggtactgaggcatttttggcgcatatcatacacaaccccagatttttcagaagcgcttttgctagatatgacaaccaatggcttatggaattgtttgaaaccctgggtgtaccgttgaaagtagaaagaggtcagcgcgtatttccgcaaagcgaccgagcgcatgacgttgcagacgcgcttgtcgctgctttggcagagcggggcgttgaagtgttgtacaaaacaagggcgaaaagcctggtagaaaagcaagggcgcattgcggccgtgcaatgtgagcatggcaggacgatttccggcgatgcatttattctggcttccggtgggttaagttatcctctgacaggatcaacgggcgatggatatgcgttggcgcggcaggttggccatacggtcacgccgttgcagccttcgttggcgccgattcaggtagagtaggcatgggtacagaaagtagcgggcctttcgctgaaaaatgtatgcctgcgcgcaatagcagcgggcaagcaggttttctgtgaacagggagaaatgctgtttacccatacaggggtttcggggccgctggcgctgagcgcatcggcgcatttggaaaaacaggcttggccccagacaaagttatttatagactggaaacccgctttggatgaggggcagctaaagcaacgtttaattcgagagatgcagtttgccccgaaccgagaaacaaagacaatgatgcttcagcttgtaccaaagagcatggcggaggttatgctttccctggcgggtattccggctcacttgccttgccatgacatcacaaagcagaagcgtgctatgctgatggctcagctcaaacgtatggagcttactgtgcgagatgtagggcccatggagggagccatcgtgacaaagggcggaatacaaacaaaggagatagatcccaaaacgatgcgaagtaaacgcatccaaaacctgtacgtagcaggggaggttttggatctggacgcgtataccggcggatacaatcttcaaatcgcattttcaacaggtgcagcggcgggaacggcggctgcgcaatcagcaaatcaataaagtgaggaacgaccatgcaaaaacactgtgtaatcgccatagacggcccggcaggcgcggggaaaacgacaatggccaaatgcctggcagatacgctcggcatccac

SEQ ID NO: 1096 - DNA, 7029 bp, Unknown
  16S sequences of unknown bacteria
tcgtcggcagcgtcagatgtgtataagagacagtgagaaaggaggagaggcgatttggagtattgggatattgtagatgaaaatggtcgatttttgtatactgcgcctgctgatataaagtgcaaacatggagagcagaagtttggccggtcaatcctcatggtgaaattttaattcagaaaagaagcttacagtgcccgattcttcccggtgtttggggattaacgactggccgaatacagtctggtgaaacaactgcccaaggagcggtacgtgaactaagagaggaactaggcctttcggttcctgtcaatcgactaatttttttagagcgtatcatacgtcgggatgagacccatttgatatgggatatttttacagtgaaaatatttgcggagatttccagtttgcagatgcaaacaagcgaggtggaacaagctctttgggttcctccttcaaaatttctgcagatgttgcaaaaagtaacagaaaatgtgaaaactgaaaaattccaattttaacgcaatctttttgattataacgaaccttattattaaattaatgagttacttgaaaatgaaaaggccgcacctataatggaattattacgattcttgaaaggaaagtgagccggataggaaaattacaaaaattgatttgttgctttccaaccctgttgaagacggatgacaccgccactgtgccgtgtttatactgacgaagggatttacggcgatggagaagttgccttgtcttacggaggggcttcccgtgcggcgtttggtatgctgcaggatttggcaaggcatctgattggtatgaatccgctggaactgaagttgtttggcagacattatatcaaaaatgtttctgggacaggaatggcggaccgattgtttttggaggaatcagtgcttttgatattgcattatgggatataaagggaaaagcatatggcgcaccagtctatgagcttttaggcggaaaacatcgggattctttgcgcgcctatgcgagtcgctgcaaaatggctggtcaggtgaccgccatccggcccggaaacctgatgattatgccaaagaggcaaaaattgctgttgataaaggatttgatgcgattaaaatgaactttagtacatgaagacgtcagaggcgcgaatcgcagcaacccgtgaggccatggtccagatgtagatattattttggaaaaccattgctataccgatgcacagctgcggttcagttcggtaatatagccaaaaaatacggcattttgtattttgaagaactgactgcacctcatccggatctgttgagttacgtacatcgtcaaaccggaattcctgtggccagtggagaacggatttactcccggtggcagttccagaaacatttgtagcggcaagctattcaggtcattcagccggattttggaacctcaggagtacagattcatgtctgtggcagcccgattattacagctgcttctttgcatatggaatgtgcaatccccaattttgttattcacgaatataatgtcaacactatgatgcccaatatgcttgctttgggtgtttatgactatcagcctgttgacggaaagtataccgttcccgatctgcctgacattggtaatgaaatttccgatacggcttatcgcaacagcacaatcgctacaatagaatagcttctcaagcacggatttttctgtatccgtgctttttgttctatctctggacaagtccccatataaatagaacaaaggagtgtgaacgatgaacgagtggaaaatagaaccttgggaaagcatcttatctgtcttgccacagcctctttgcaacgccataaaagccttaaattcgggtgttcaaaaagagattcgggaagttcgtctccgattaggccagcctgtctaccttcaaactggagagggtggcctatttttatcgcggacaggtgttctgcagcgctttcctgattcagatagtcttctcacagaccgggaatcgctggaggaatgctttcgtgcaatttgcggctatgcagtacatactcaccagaacgaattaaaaaacggatttgtaacactcaaaggcggtcatcgggctggcatttgcggaacgggtgtctatcatgatggcagtctgactgcaattcgggaactttcttccgttaatatccgagtggcccatcaaattagaggggcagcagatgagattcttcgccgttgggaccaactgggaggaattctcttagtcggccctccagccagcggtaagacgacaattttacgcgatatggctcgacaactgggaagcgggtataaaggaaaaatacgaaaaattgccttggtggacgagcggggggaaattgcagcctcggttggaggctatccgcaaaacgatgtcggattttgcaccgatatactgaacggcatttccaaaaaagaagggatttcgatggctgtgcgcaccttgtctcctcatttgatcttttgtgatgaaatcgggcgggaaagcgaggttgctccgattgtctccgccatggcgtccggtgtaatgatggcggctactgctcatggaagaagcttcgacgatttgtgccggaaaccggctattgcccgccttttacaaatgggaatgtgcagtgcagtagccgttttggatacagaagaaaatgtaggaacaatcaagcaatggttaggcaggggggaaattgaaaatgaaatggatcggttttttgctggcagcgacggcttgcgcagggattgggcaatgggcgtcatctcagattcatcgacgcgtacgcctgctggagtcatccatgtcgctggttgaatttttgaaagcccggctttcttttaccttggcagaaccagcagttattctgcaggaatggacgcaaaccagttccatcgaggacttaccttttccatctgcctgcctttgcctatacgaacagggcatggtatttccttctgcgtgggaggaaagtcttcaaacagaaaatttgaatgctctgacaatggaagaccggcagattttggcagacttgggaaatgttctgggaagtaccggcttacaaggacagatcgatcagctcaatctattgcaaagccgcctgaaaagtcagcgggaaatggcatcgcagagatacgcgataaatggaaagttgtatcggtctttgggactgctgggagggcttctgatggttattttattatggtaaaagaacgatgagtctgccgatatccattttcggcagactcatttgctgatagaatctgtttgtttataaatcaatggaaaatgtgtttgccgcaataccaaaggcgatggagaggtttaatgaatcgatttctttgctgtgcttgatgaaaatactctcgccataattcaaaaaggaatcgggcagaccggtagcctcattgccgaagaccaaagaaaacggtttttggggtttttgcgtcatttcactcagaaagcgttttcctttcagcataaacgtgtaaatttcatgatcagagaactgccggtagtaatcctcgaaagaatcaaaaaaggaaaggcggatatgaaataaggctcccatagaagagcgaatggttttgggatcgtaaggatccaccccaggacgaataatgacgagatctttgaatccaaatcccacaccagttcgaataatggtgcccaaattacctgagttactggggttgaccaaaacaatatgtggtcgattggataaaaccggcgcgttgtattttaggaaagcaccaataacaaaaacgttttctttcatggatagtcggtcaaatatttttttattaacttcgcatggcagacaagcatgcttgcaaacttcaaaaatattgtaaatttcatcccgcggcgtatattctggatggacataaattttgtcgactgcatccggtttgtattggattagttcgagagtaggggccatccccaaagtataagaataaggcgcctcgtgtttgtatttttttaattccataccaatgctccttttcaacgtccaacggttttgcacaagtaatatttttattttaccaaaatacagccactttcacaataattttctcttttccgttgaaggacagagggctttcctttcaaattttgaaagccattggcagcattttttctgtatgttataattgtgctgtattagcgtagatcaaaattgattttggataataaacagaataagaaggggcaaagatgaaaacaggattagttttagaggggggagccatgcgggggctattttccgcaggcgtaatggatgttttgatggagcatcagattacctttgatggggcaatcggcgtatcggccggagccgcttttggctgtaactataaatcccggcagcctggcagggttatccggtataatacaatgtatgcaaaagatcccagatactgtagtcttcgatcgtttttaagaaccggagacctgtttggagcagatttttgctatcatgaactccctaaaaaactggatgtttttgatgcagaagcttttcagcaaaatccgatggaattttatgttgtctgtactgatattcaaacaggaaaagctgtttatcgaaaatgcacagtagcggatgatgcttgtttcgaatggctgcgggcatctgcgtctatgccccttgtttccagagtagtagaaatggatggctgccagatgttagatggaggcattgcggattctcttccgctgcggtattttgaaaagctgggatatgaaaaaaatttagtcattttgactcaaccggcgggatattgtaaaaagaaaaatagagccttgcctttgattcgcttgggctttcgtcgctacccacagatggtcaaagcattgacacaacgccatgaaaaatataatgaagatttgtcatatattgaaaaaagagaaaaggaaggagccgcctttattcttcgcccacagcaaccgctgtctatcggccggattgagcacaatcccgatcgaatgcgtcaggtatatgagtacggcagggatgtcgctctacaatctttggaaaaaattaaaacatttttgcagtagcgttttgatatggcttttaaaggaaaaacagtgtgttttgattggaaggatctcttgacatggagtaaactccgtgtagtatgatgtttttggtaaaagaaaaatatatccggcagagaatgaaaacagctggtgtcttaacatgggaggaaaatacaatggagaaagcaaaagtctattttaccgattttcatacagttgcatttggcgatggtctgcctgccaaattaaaaaagttgatccgcacggcaggaatcggacaaatcgacatggacggaaagtttgcggctatcaaaatgcattttggcgaattggggaatatcagttttttgcggcctaattatgccaaagccgtagcagatgtagtaaaagaactgggcggccatccgtttttgaccgattgcaatacattatatcccggcagccgtaaaaatgccttggaacatttgtattgcgcctgggaaaacggttttacgcctttaactgtgggatgccctattttgatcggagatggtttgaaagggaccgacgatattgaggtcccggtaaaaggcggtaaatatatcaaggaggcgaaaattggccgagctattatggacgcagatgtatttattagtctgacgcattttaaaggtcatgaaatgaccggctttggcggggcgataaaaaacattggcatgggctgcggatctcgtgctggcaaaaaagaccagcataacgatggcaagccaagtattgatccggaaaaatgcaggggatgccgccgctgcctacaggagtgcgccaatcaaggcttggagtttgacgctgccagcaaaaaaatgcaggtaaatcagagacattgtgttggttgcggccggtgccttggcgcctgtaattttgatgccatcgcttttgacagcagtgcggctctttctgatttaaactgccgaatggctgaatatactaaagcagttatcgacggaagaccctgcttccatatttctctggtagtggatgtgtcgcccaactgtgattgccattgtgaaaacgatgcaccgattctgcctaatatcggcatgtttgcttcgttcgacccactggctctggatcaagcctgcgtagatgcctgcatggcggcgacgccgcttcccggcagccagttagccaaaaatatggagaaaccggattttgtagatcaccacgatcattttaccaattctacgccggaatcggaatggcgaacctgtttggaacatgcagaaaaaattggtctcggcacccgggaatatgagttgattactgtaaaataataatctccttctaaggcctgtgaggaaaaaactcacaggccatttttctttttcaaaatagttctcaaatcaagcggacaggcatatttatagtcataggacaagttgaagggacgatgaacacaaaaatgccagtcgttccagtccttaataagagcaggattcacagataccaacgctgtaacggaatcagcaaaggaggaaaaaaggatggatgtggatttaattttcaaaattgctgcgattggcatcattgtggcggtactgaatcaggttttgattcgatccggcagggaagaacaggcaatgatgacaacattggcagggttgattgttgttttaatgatgattattaacgaaatcaacactctatttgaaacggtaaaaaccatttttggactggggtgactggtgtggagtggatcggcatgatcggtgttgggctggttggtatggtaattgcagttttgctaagacaatataagccagaatatgcggtgtttgtttcgttagcagtaggcattttgattatcggcatgctgtgttcgcagcttttaccgattttcgatgaactgaaagaaatgctgtccaaagccagtctttctttggaatatattggtactgtctcttatacacatctgacgctgccga

SEQ ID NO: 1097 - DNA, 2876 bp, Unknown
  16S sequences of unknown bacteria
acccgcgccctgcggagcagatcgcggaatccgttgctctggcggaccggttcatccccgtcacgcgctacgagacggcactggagcggcttaataccccgccggacgcattttatgttgttgcgtcgttctcccatgagacggatctggatgccgtgcggggcattctgcaaaagccgttttcctatgccggtatgctggggagccgaaagaaggttgcagcgatctctgcgctcttgctgcgccagggcatcccgccccagcagcttgcccggctgcatgcgcccatcggcctggatctgggcggccaacggccagaggagctggcggtcggcattttggcggagatgatcgcggtgaaaaataccggcactggccagccggtccggcaggatgaagcgcaataggcttgcattgccgtattttttgtgcgataatagccacgaaccggcgcatgacgcgccggcgcgcccacgggcgcgtttttgcggagcaaaaagttcgtgtcgctgttacagtgataaccaaaatcagctttgctgattttggcgcggcttttgccgcgcatgcagcgcttcgcgctgcggttatgctataataactgttaggagcgcgtgaagtgcccaattgcatctgtgacgtcggcatttgcatggctgctgcaataacaagcagccgtgcaggtaaaaatccaacggtggagaaaaggagagacggtttatggcagcatggatcctttcgtgtgaatcgactgtggacctaccctatcgggatatggagcagcggaatattccggtgctattttattcctatgtggtggacggaacggcatatctggacgacatgggccgcgacccggcagcgctgccccggttctaccaattcctggaggaaggaaaggcaccatccacctcacagctcaatacgttccaatacttggaattctttgagccgctgctgcagcagggtgatgttctgcatatcggtttcggaacggggatgacaccgtcggtcaaaaatgccgaggaggcggcccagtccctgcgggagaaatatccggagcggaagatcacggtgattgactcgctgtgcagctcctccggctacgggatgctggtcgacagtgccgcagacctgcgggatgccggggtgccgatgggcgaggtcgcccagtgggtgctggaaaagcgccactgcgtgcatcatcaattttattcgacagatctgaaatattaccggcgcagcggccggatctccggcccggcagcggccattggtgcaattttaaatatctgcccgatcatgcggctggatgataaggggcgcatcatcgcctatggcaaggtgcgcggccaggctgcagcaatccgcaagactctcgatacgatgcaggagcatgcggaaaacggggcggattatgctggcaagtgctatatttgccactccaattgcctgcccgccgcagagcgcctgcgggacgcgctactgggacgattcccaaagctcaaggcagaggcaatcaagctctgcgatatcgggacgatcatcgccgcccattgcggcccggggacgcttgccgtcttcttctacggcgacccgcgagcaccgtacaccggtagccaggcaaaatagaagcaaatgaaaagaatagagaagcaggggctgatgcgaaaagaaagcgcatcagcccctgctagtctgcaaagggcaattattgccggactgcccggcggcggggaaaaagcagcaccagcgcgagaacgacgacaaccagcgagaggatctgggagatggaaagcacccctacaaagccccggtagcggtcgccccggaaaaactccagcacaaaccggataacgccatagagcaggaaatagacggccagcatccgtcgcccaggggtcccccgacggcgcagcacggcaagcagaacaaaaagccctagcgttgtggctgcctcgtagagctgcactggcagcagtttgatgccatttggtgcagcgagagcgtgggaaaaagcaatcccgaagcgctgtgacggacgtccatagcagcaaccgctgcaaaagcagccgatgcggccaaaggcgtgaatcagcgggatgacggggagcagttgcgtcaggacagcggaaaaggatatgcggctggtgcgacaatagagaaacgccgccagcagcgcgccaaacaggccgccgtagaacacaaagccgcccagcagatagcgggccagaaagtcgcgaggggcctgccggagcagcggcagatcgtgcagaaaatcgggtagtaccgtggcaaggtacagtagcttcgcacccacgagcgcgccgatgcagccccagatcagagtcagctctgtatccgcattcagcggtgtatgctttggctgggttgcttttaaatagcacagagctagaacaaggcccagtattgccgagagtccgtataaggggatgtcccggccaaatagatgaagatatggcagcatagtcctccaagttagcaaaagcactgccgcccggcaggcggcagtgcttccgcaagataaatcaattcagagagttggcaatgtctgcaagaccagcgacgccgccgaccgcaccgacacaggcaatgcaggagatcaagaagacaccgccgccgatgagcccgatcagcgacagtacaaagcctgcggtctgcattccgccaacgaaaccggccttctttgcattgctggacaaaatcaagccaacgacacccagaataaccgaagcaatcaacgaccaaccgaagaaccagcagacaatcgaaatgatgccaagtaccatactggcggttgtgaagtgccccctgtcaagtagacagtgaaaaaataaaaaatgttttgttggaga

SEQ ID NO: 1098 - DNA, 6216 bp, Unknown
  16S sequences of unknown bacteria
gcggccgggctgggaaagaacttttgcccttctttcccagcccctaatcgctcaatctgtggaaaaccaccgtcttttaccgaagagtatccccatcgcgccaggaatccttgcgcaaaaggaaaaggaacgccgcgcaaaccgccacgcccagcacggccagcacgcaaaaggtcgccgccgcgcccgcgccggggccgccgaagagcttatcgagcattccccctggcggtatggcggccatcaggggcgaaaacacctcgtccaccagcacgccgcccaggaaaaagcccaggggaatggtgaaaaattgcagcgtgttgcggcaggaatatacgcggccctgcatgtccgctgggatggagctgcgcagaattacatccagattggcattcatgatgggaatgccaatccagcccaaaacgctgcccacgcaccagacgagcggcgtttttcccaaggccagcaggaaattttccgtgcccatggaaagcatcagcgtaaggcaaatgacctttacgcggtttttcggcgcgggcaggagggccaccagcacgctgcccgcgagcgtagccaggccggatacggcgttgacccaaccgagcacggtttcgccgccctggggccgcgagagcaacagggcgggcagggccgcgttataggcagacgccaccaggttgatgcaggccagaaacaggatcagcttgagaatcaacgctttgcgccgcagccatgccaggcccgcgcgcgccgagcgcaggatcggctcatccgcgtttgcgctttggggcgcggcgggaacgcggatgaaaaacagcagcgtcaaaaaggcgatggcgaacgagccgaggtccaccgcgatcacccagtccatgcccgcgaaggcgagcagcgccgtggcgaaaaccggagtgagaatggtgaccagcgattgcgaaaaggagcgcaggccgctggtcttctggtacagttcccggggaaccagcagcgtggccgccacatcgctggcgggctgctgcaccgtgttcatcaggccgttcaccgcgtttaggatatacatgtgccagggcaagagccggtcggcctttaacagtcccagcacaataagcgtgcagaccgccgcgcacaggtcgcagcagagcatggtgcgctttttgtcccagcggtcgctgagtgcgcccgcaaagacgctcatcagcacatagggcgcgtaggaacagatggagagcagcgcggtttccagcgcggaaccgctcttttgatagagccaaatgaccagcgcgtaattggtcatggcgctgcccagagcggacagggattgcgtgccccatagcaaaagatagggcttgagtttccgatattccattttcataggactttgctccttttttgatttgaaatgcatcaaaatggcaaagtccgaggacggcgctcgctacagggcgagaacggcgcaagcctgcaaaaagagtgtgcttgctacccattcacaaaatctggcgcatgggttcattggccttgctgcgcgcgcgggttcctccatgcaatcgtcctcaaactttgcatggagctgcggcaatgcacaatcgcatgggtttcctccttcttattcagtttgagtttctcccggctgagccggaccgggccacttgccggtttgccggtaatgctgccagagcgcgcgggcttcgcccaccagggcttcgtcgccgcccaggcgctcgatgagggcaatggcgttgaagctctcactggggccgggcttcaattggtaatcaaagcgcatatcgccgttttcgaaggtttcggcgaagtggtagttgtcgtagtccgcgccgagcagagcgggcaattcgccgtcgtgcgtggcggcgatgcagtgtacgcgcataccggccagacggcgcaacaccgcgcaggcggcgctgatgcgctcgccggtgttcgtgccgcgcagcacttcgtcaatcagcgccaggcagggcagcgcgcccgcgtaattcacgatgcgcagcaccgagcggatctcggtcataaaatagctggcgccgctgagcacatcatcccgcagggacatggaagagaatatggcgtgcggccgcgcgcgataggcgcccgccgggcaggtggccacggattgcgccaggatggcgcacaagcccacggccttgaggaacgtcgatttgccggaggcgttcgagcccgtgagcaggatgggcctttgcaggcgcagggaattgggcacgcagtgctccaccagcgggtggcgcaaggcggcgatttcgatgccgtcctgttgcacaaattccggcgcgcaccagccttcggcttccatttccgcgcgccagctgcccatggcgcgcagcgcgtccacctcgcccacggccatcatcagcgcgtggagcgcgggggagagccgccccagctggaagagaaaccgctcgtagaggatcaagttcgagagaaaaaagaactcgaagcacatggcgaggatgccctcgttgtatagcgcgtaggccactttgcccgccttgaagcgcttgagcggcgcgaggaggccgggcggcagcaggcttttgtccagcgcgtcgatgcggcgcgcggcgcgcacgagctgcatggcccacaggatggtgggcacgtggctcgccatgcgcttttgcgaaagggccgccgtgaccgcgttcaccgacagacacagcaaaaagcaatacaggcccgccggaagccccgcggcgaagagcagcgcgctcacggcaaacagcaagctctgcccgatgtgggcaaacagccgcaggcgggagggcgtttgcgcccggcccagcagaaaatcccagtgcagccggtagtcccggcccagcggcaaaaggatggacgccagcgcgtcgcgcacgccctcgcggctgacggcgcgaatcttcgcgtcgcgcgcgcggatggcttccggatccgccaggggcctgcgcagcgcggcgtagagaaaattgtcccccgccgcgctgtagcagccgtttaggcgcttgtagagcgcgtccatgtccagatcgctccaggtgatgtcgtcgatgggcggcgcgaaagtagctgacggcgcttctttttccaccgttttggcgaaataatcgcggatgagcagcatgtcggtttcgtcgaacgcgttcgcgtgccgctcgccccacggaaacgccgcggctttgcggctaaacatggcgcaggcgcagcacgttccagctgagcctgggcaggcgaacggagagcctgccgccttccagcgtgccgccctcgccctggacgggcgcgacgttttgcgggttttcctcgctgttgacggccttcacatcgtcgtggtggagcaggatgtgtccgcccatgcgcagctcgccaaacgcgcgcaggtcggcttccagcaaaatgtcctcctccatggagcggttcacggcgaaaatcgtcacgctgccgtcgtcgtccagcgcggcggtcgcgtcgatgtagggcacgtccgtataatccgcgcaatcgtacgccggcgagcagaccaccgggcgcagcgccgtgccgcgcgcgaagttggaaacgtgcatgtagggatagaagatcgtttgcgcccacgcgccgccgccggtgcgggtcatgatcggggcgatgacgttcaccaactgggccaggcaggcgaccttcacgcggtccgcgtggcgcaggaaggtgatcagcatgctgcccaccaaaagggcgtcctcaaaattgtacacgtcttccagaatgggcagcgcctggccccacttgttcgcgcgcgtgacctcgtccgtctgctggttggaatggtaccacacgttccactcgtcgaaggagaggttggcggcctttttggcgtgctttttgcccttcacgctgtcgcagatgcacaccacggtctggatgaactcgtccaaatccatgctgcgcgccaggaaaccgggcgtgtcgttcgtggggttgccataatagcggtgcagggaaacgtaatccacgttgtcgtagcactcgttcagcatggtcagttcccaatcgccaaaggtgggcatggaaagcgaggaagaaccgcaggccaccacttcgatggagggatcgacccatttcatcatcttggcggtttcgttggccaggcggccatattcataagcggttttgctgcccatctgccaagggccgtccatctcgttgcccaggcaccacagcttgatgttcagcggctcctgcgcgccgttctttttgcgcaaatccgaccaatacgtgccgccaggatggttggcgtattccacgatgttgcgcgccgcgtccgccccgcgcgtgcccaggttcaccgcgtacatgggggccgcgcccgcctttttgcaccaatcgatgaactcgtgcaggccgaattcgttgctctccgtggtggaccaagccagatccaggcgccgggggcgccgctccttggggccgatggaatcctcccactggaagccggaaacgaagttcccgcccggatagcgcaccacgggcacgccgatctggcgcaccagcgccagcacatcctgccggaacccctgcgcgtctgcccggggatggccgggttcgtaaatgccgccgtacacgcagcggcccagatgttcaacgaaagaaccgtatatccttggatcgatccggccgatctgataatcgcgatcgagaatcagcgaagcctttttcatgggcgcgccctcctattttcgggatttgccttcattatcggccattcgcggccaaaagtcaaccggcaaacgcgcaaattttgacaaatttggttggaaaggcggcaaatcgcggaaaattcgcgtccctgcttgcaattaacagaagatgcgtgtataatggtcaaaagaatttgtctatacggaggagcttaccttgagcaactatgcaaaccgtcccggttcccgccccccgcagcggcggaaaaagaagcagtccccagccgcgctcattctcatcgttggcatcatcgtggttgcgattgtgctgatcatcatattcgccacccgcggcggcggcgattccaccgcgcccacgcccacccaagcgcccgtggcggcgcaaagctcgcccgacgcgtctaccgacgcggccgccacagatgccccggctacgacgagttcctcgctttccgacattgctgccatgctcgataacgaaaccggcgtgatcaccccgctggacgattccgagcgcgtgcaggtgtctgccgaggatctcagcgtgaaccccaacctgccctccgagtggcgcaacatcttgctgctgggttccgatgggcacacggagatcgaatccgcccgcacggacgcgatgatcatttgctcgatcaataccaccaccggccaggtaaagctgtgcagcatcatgcgcgatatgtcggtggaaatccccgatcgcggcctgtacaagatcaattccgccaatttctggggcggcccgtggctggcggtgaagctggtgaacgagtgctttgatatgaacatcgaggattacgccatggtcaatttcttcggcttccagcaggtggccgattacctgggcggcatcgagatggacatcaccaaggaagaaatggagcagatcgaccacaacgtgggcgagcagattcgcctggcccgcgaggcgggaatcgacgaatccaacctgccccaggaacacctcaccacgtacggcgagaatacgcacctcgacggccggcagacgctgggctatgcccgcatccgtaagctggcgggcgaggactttggccgcgcggagcgccagcgcaaagtgctgatggcgttgctggaaaagatgatgggcaccccgccgctggaaatcacccgcatggcggccaacttgtttgactatttcaacaccagcctcacggcgcaggaagccatcaccatcgccagccaggtgctttcttcgggcctgacggaggtggaaaccctgtatctgccgcaaaacggcacctattcgccggaaacgcgcaacaatacctatatgatgtacgacgtagactaccagaccaatgcgaatgcgctgtacgaattcatctataactaatggcgcaaagacaatgcatggccgccggaacgcaatgcgttccggcggcttctgatcgttgacaaacctctggtttgccaacgaatctgcccgaccgcttgcaaatctgacgatttgcggccagcggtcggg

SEQ ID NO: 1099 - DNA, 11982 bp, Unknown
  16S sequences of unknown bacteria
acaaatgaatttttctgcattcatagatatattaaatgaactgcgagtcctcggtattaaagtaacaaaagataatgtgcttgtggcagaatggcacagcgaacctgaatgccgcaggaacatatattccgcaacaaaaagctttacctcatgtgctgtaggctttgccttacaggaaggcttattatcacttgacgagaggctgacagatgcatttaatagcgatattctgtcagaacccaacgaaaatctttgcgccgcaacagtacgtgatcttctaacaatgtgcctcggtcaagaaaaaggcagtctcatgggaaatcagcgtcctttatacaaagaagatgactgggtaaagttagcgttatcaattccgttcatatataaacctggcacacactttgtttataacaatgtcggtccgtatcttgccggaattcttgtacaacgacgttccggctgtgaccttgtatcctatctgacaccgcgtctgttctctcatctcggaattaagcgaccaacatgggaaaccgacccacttggaaacagctttggtgcgggcgggctgtttctcacgctttccgaatttcacaagtttggtgaattatatctgaacaacggcaaagttaacggaaaacagattctttctgaaaaatggataaaggaaagcacaactaaatccgatgtcgattactacggctatctattttggagaggaaaatacaattcatacagagcagacggaaagtattcacaaatatctatgattcttccggagaaaaattcggtaataacagttgtgtctgaatgtcgaagaggtgatgagctcatgagcgtactttatgacatggcagcggaactttaataaaaccaaaaaaatccctcacatatcaaacgtgaaggattttccggacattattcagcgtcgcccacaccggggagttcgctgagctttatcttcattatcttttcaagagactttgcgcgggatgcgagtgtgttcttctttgagtcgaagagctgacgcattgctccgtctctgagctcaccgcagaatgttgagtcgccgaggtcgataactcggttgttgaagatgatgtcaagcattccctgtgattcctcatcgcgtgccgcctttgttttgagcgcgatttcgtagtatgcgggaacgacattgctcgcgtattcgcatgcgagagcttcaagcattacgcccgccctgtcaagtctttcgcccgttatggttataggaaccaccgtcggcatatagtagcagagacgtgtagcgtagcttgactggttttcgtcatacttaggatagggaataataccgaagtcggtttccatttcgcgaagctcttcaatgaagaagaacgacatatccatgaagagagcctttccttcggagaacatttttctcgctgtcgattgaatctgtcctcgatatccgtcgacgccttgtacatagcgtcgtttatcggcagagcaagcatttcttccgccgtcaccgcatagtggaaattctgattttcaaatgtcataatgccgaaggactcaccgttatagttgtgctcgccgaggtcatccttatatgaagtgtcctcttcggtttcggctgtggtttcggcggattcttcggtcttctccgtaccttttgtttcggatgagggagctttagtttcgtcccctgtacctgatgagcaggaggacaagagcatgagagaagctaaagcaagcgcaagagttctttttttcatgtcgttctccttacatatcatattcggcaaacgggcggtacaaaagtccttcccatccgtcggtattcattgtgtctgttacatatccgtcctgcctaaaccatattctcatgggaagcggaccgttgttgttccatgttctgtattcaatgagcgtgaattcttctccgtcctttgattttaccgtaacggttccgtcggagttcatcacgggcttatcactgccgagtgtgaagtcaagctcttcccagttttctaccttcttttcgcagcagtagagaacgggaccgcgcatgaaagcaactcttccgtggtctgcgtcaacatacggatgtgccatgagcttcataagcggcttgtccatctcgactgtgacaacggcacgatgtccggcttcaactacggcgtatccttttacgatgacttcgggagctttgccgtttaccttgaagtttcttgcccacgcgggaattctcagcataaggcggacgttttcgtcggattcaagtgtgaccttgccgtttttgtaggacagctttgtagaaccaaatgatacttccgactcaatgtagaggttcagcataatgtcgcggttcttcttcgcccagatataacgcggcatttcgcctactatcttgagcagcatgggaggacagcaggggcagccgtgccagctccaacgctcaaaatctccgcgagtctcaagaggattctggtatgtgtagtgatcgccggacgcagatacagacgcgggtacaacgttgttcagcgtgttctcgactacatcccaaacggaagcgtccgaggtgattctgaacatagctccgccgaaaagcgcaagtccgacgccggcacaggtttcaagatacgcgttgttcggaagatcgtactgctgaccgaagctctcgtctccgggcgctacgcctacgcatccgtttatgtggagctttgattccgcaatatccctccagataaggtaagcggcgtgtgcaagctcttcatccctgctcgacgctgcggcttctgccataccttcatagaaaaggactgctcggacggcgtgacctacagcttcatgctgatctcttgcggcacaatgatcctgagcgtattctctgaggaacggcgggaatgtgtgtctgtccttatggtttcctttgttgttgatgaggtcaaggcacaggcggagatactcacctcttaccgcaccgacttcttctgcaagctcgggattttcttcaaaaagtctttcaagctcgacaagcgcggtttctgtgatggagtgttcggtggtaacgttccacttcggtgcgtctcctatgactgagcagaggtagttcgccatttttacagccactttaagaagtgtagttttctttgttgctctgtagtggtgtactccggcttcgataagacaacccgcattgtacacctcatgctgccagcgaatgttgccaccgtttctgccccatctctgctccggtctctcgagagtggtgtaagggttgatgtatccctcgggatctgcgtcctgcgccttctttatcgcttcgattatttcgtcaagaagagcgtcgatttcagcattcggctcgtgtacgaatatgtcggaaataccgcgaatgcactcacagatgagcccatgataccatggaggacctgcatgaccgcctttttcacctcttgcaacgcggttgtagttctcgatagctccgtcggcgaggaatttctttaaaatatccggcactgacacggtgcgaatcttgcttgtgaagtccgagaagaatccgtcgcacagtctcacgtcggcaatgtcggcatacttcgggaattcaccgtaaatcatggttttggagtagttttccatttaagtctccttatctgttttcgttaattttagacaaatgaattatagcagacgcgtgattttcgtacaacctttttttattatattaggtggacaattcttagtttttttagtctctcacacttgacaacgcggaaacgccggactataattaagctgagttattacataaagtggaggcataccatgctgtatctgtgccacgatgtttccgctcccgtagaatactgcacaagcgggaagtttgtctgtgacaaggggggggctgttcacccgcgaaggacgctcaatagctatgtgcttcttctcggatgcgagggagaatacgccattgagcaggacggggttgaatatatgctgactccggggacgtacatgctccttttagcaggtcacactcacggaggaacaaagccatgcccgccgaagctgtcccacttctggtgtcacttttacatgagaagcggaacatacataacggacgcgccgagcataaaatccgcggaaacaaaaaattccggatatgctccgcttgatattccgcccaatacctgcgaaaacgaggagcttattcttccggaattcggtacgataccgtctactgaaaaatacagactgttattcaattctctcattgactcctcactcagcggaaacagattccgtcgcgagatttgcaacaacattattaccgaaattctgcttgagctgtccgacacatttctctcgtcaaatgctccatcagctaaacagtccagtctcgcgctcaccgaaaacgtcacggaatacataagaattaacgccgcttcaataaagaatgtctccgatgtggcggactatttcggatataatcccgagtatctaaccacgcttgtgaaaaagaacacatcgcactcgataatcgactgcatcaacatgagcaaaatctcccgcgcaaaggaaatgcttctcggcacaaacctcagaatctcggaaattgcaccactctgcggcttcacggattcaaaatatttcagccgtctgttccacaagctgaccgacacaactccgggagaataccgtaacacgtactcaaaaatgcacctaaacggcgaaagcaaaacggaagaagagcaggtgaaaaaatgacttcaatcaagataagcgacaaaatcagttatataaaagcaagcgaaaatcccctctcggctgacgtcggcataataaacgtgtgcggcgcaacatggctgtacgacgtcgggaacaacgaggatataccaaagtcactctgcggcgaatataacgtcgttttgtcgcattttcacacggatcacattggaaacatagacaaaatccgcgcaaaggatacctatctctccgctactacatatgctcacgttcaccgcggaatcgtagttggcagtgatattttcacggatgagattcacatttttcccctgccgtcaagccatgccaagggatgcctcggtcttgaagtggacggaacatacgcttttgtcggagacgcgctctactgcaaggcaaaggacggaggttacgcttacaatgctcagcttttgaaggacgagattgaagttttaaaaaatctccgctcgcagtatcttcttgtcagccatcatgacggattcattcgcgaaaaggacgaggtcatagccgagcttgatgagatttacaaaaggcgtgagaagaacgcggcgtatatcatgatatgattaaatctccgcaaacgtaaaaaagtcgtatatccattcagccggaatgaagtgctcgtttttcacaagttcaagtatagtgtccttgtcggcaagcatagcgtcgcaggtctccccttcgagcagcttaacatcagacagctcaaactcatgctcaaaaagccagttatcgacaaacgtgtccgtatatcttcttgagagtatgagttttccttttgctctgtcaagctccagtcccgtctcttcacgaacctcacgaaccgcggcactgaggctgtcgtcccccgcaaccgcacttccgcccgtgcattcccacattcccgcaaagcctttgttcggggagcgttttgtcagcaggaattttccgtcgctgcgtcttacaaacacctgcaccgtcaaatgataatccccctcatcaagagcttcgccgcgcttatgcagtcgtcccttcagatttctgtccgcgtcgtacacatcccacagctcatcgggactgctcatcaggttcagccatccctgcgtatgctcgtaaagctccggttgaatgtcgggatacgtcagcttgtcgggcaggcagtcgctaaggagtatttccgtgatttcaaaattcgggagtttgtcgagcctttttacctccgcatagaacagcgcgccgtaagttgtgactccgttgttcgtgcaactgtagtctgtaatctttttcagcgtaaaatcgaccgctccggtttcctcgtacagctctcggcgggcgcagtcttcggtggtttctccctcctcgcggtgtcctcccggaatttcccacgtttccctgtcaaagcgtctgccgaaaatccatttgccctcgtatttcgccataatcacggagaatccgattttttcgtccggcacagtctcgtgtacgcaaatttttaccgtcatattattccatcctttttagctatagtgtagtgattatatcacattgcgccgctcttttcaattgtccgcgaaagaatggattaacgagttctttcccttgattttatgtgtccgttgagttataataaagtcacggtaagggtgagcttaaattcccgggatgaagttcactcgccgaattcgtaaagaaggaggtagctgaataatgatcgaatctatggaggtggcagtttactgatctgcccacgatcataattactgccgctgtgaatagtcggaatagctcgaaggattttacgcctgtaaatcttatcgggctgtttccgcgtacaataacatcatggttacgaaaggcggtaacaattatcagatacctacgcgccgatgaggttctgccgacagagcttcttgaagaaatcaagcgttacattgacgaaggctgcgctatttatattccgaaatcgcaggaaaagtgcgtctggggaggaaaaagcggctcccatgagctactcgacaggcgcaacgacgaaatacgcctcgcatactcaaacggagaagacattctctccctgagcgaacgatactgcctatgcgaggacagcatacggaagatactgaaaaagaaccgcgcaggctaacgaaaaacaaaaaagcatccgaaagtcagatttttctccgactgaggatgctttttttcggttatatcaaaaatcgggggtaaaacgcttggtagccgacgctctctcctgcataaatccgtcaaatccgagcttcaccgcatattcgcgcaccttttcgtactcgtatgtggttatcttacgccgtatctcgtgaaaatccgcattatcgggcagaaaatccggtgtgtactgcgccatgagtgagagcagaattttgtcgggcggcagaattttcgctatcgtgtcgagcaccgccatagagtcgtctttgtgggacggcagaacaagatggcgcacaataactccaccgagaagcataccgtgctcgtcaaacttaggctctcctgcgttctcgaacattgctttaagtgcttcggcggcatatttcgggtaatcggcggcgtttgacaggcgttttgcaaggtcgggggagaaatacttgaagtcggtgaggtaaatgtccaccgtgtcccgcagctcgcgtattatctcggacagctcgtatccgcctgtgttatacactatcggtatcgtcagtccgagtttttttgcttcttttaccgcttcccttatcccatccgaatactgtgtgggggagacgaggttgatattatacgcgccgcgctcctcaagctcgatcattgcacgtgcaagctctgagggagagtacacctttccgcttgactttgtgcggctgattttggagttctggcagtagacgcatccgagcgggcaatgggtgaagaatatcgctcccgaaccgcgctcttttgtcatatcggcgtaaatgtcgctgttgtacccgcttatcggaggctcttcccagtggtgcagcattatctttgagacttcgatattgcagtccgctccgcagtatcctcgggaaacagttctatttaccgcgcattttctcggacagatggtacatttactcacctttgttgcctttgatgtactttgatatcatgtcgtgcttgagatcccacagcttctgcgagaggtcgacgtagtattcgtgaggattctcgaaacgcaggacttccttccacattgtagcaagctcacgtgcgcagtggtcgcgaatctcgtcaagcgggggaagattatacacaagctcgccgtttttgaatatgggaaccagaagctcgcgtgcggtgtagttctcaatgacgcgtctcttccatgtgtactcggggtcgaaaatttcaagcggagcgtcctcgtctatgctttcgtcacggagcatgagaaggtcagcttcagccttgcctgtttcattggagtacagtctgtatatcttcttgaatcccggatttgttatctttgcggcgttttcgctcaccttgattttcggagtgataacgccgttttcatcctccgacgctgcgagcttatatacgcatccgaaaaccgcgtcgctttttgccgtgataagtctctcacccacgccgaagccgtcaatgcaagcttcctgcgctagaagttcggagatgagatattcgtcgagggcatttgaaactataatcttgcagtcggtaagtccctgcgcgtcaagataagctctcgcctttttggtaaggtacgcgatgtctcctgagtcgattctgatggcgcattttttcagtcccatgggccacagaacgtcctttatcgccttgacagcgttcggaagtccggagccgaaaacactgtatgtgtctacaaggagcgtaggattgttcgggtagagtctgcaataggtagagaaggcttcgtattcattgtcgaacatctgaacccacgaatgagccattgtgccgcccgcgggaactccgtagagcttatcggaaagtgtgcaggcagttccggtgcatccgccgatatatgcagctcttgctccgtataccgccgcgtcttctccgtgcgctcttcttgaaccgaattcggatatgggtctgcctttagccgcgcgaaccattcttgaagccttcgttgctatgagcgactggtggttgagcgagagcaggacgtatgtctccacaagctgagcctggattaccggtgcgcggactgtgagaatcggctctccggggaatattacgctgccttcgggaactccccatatgtctcccgtgaacttgaagtcggcgagatactttaaaaattcctcggagaatattccctttccgcgcagaaattctatgtccgcctcggtgaagctgagattttcgatgtagtgtactatctgctcaagtccggctgtgatagcgtatcctccgccgtcgggtactcttctgaaaaatacgtcgaagtaggctattgtgtttcgcttgtcagtatcaaagtatcccctgcccatcgtaagctcatagaagtcgcagagcagggcgagactgtattcgttgtttttcattttatcctcgctaaatttgattaaagttcctgatatatcgtctcaagataacgtgtttcccacgcttccgcaataagtccttccacatcaacctttgcttcttccgcaagcaccttttcaagctccggctgagttctggggtgacggggtgtgaatacggtgcagcagtcgtcataaggctgaatggatgtgtcaaacgtacctatcgcgcgggatatcttgacgatttcttctttgtcaagaccgatgcacggacggaacacgggaattgacgcggcgtcctcggtaacgcacatcgccttcattgtctgagacgcaacctgaccgagagattcaccggttacaaggacatggcattcgttttctgcggcaaccatggacgagagcttcatcatgaatcttctgagcagaagtgtgaagtagtcctctacgcagttgtccctgagctcttcctgaatgtgcgtgagagaaactacgtgaaccttaatctttccgcagtattccgtgagatgtgcggcgagctgcattaccttatcgtgagcggcttggcttgtgtacggcatggattcaaagtgaacgcagtcgactaccattccgcgcttcatcatcatatatccggcaacaggggagtcgataccgccggagagcagaagaagtcccttacccgcagaaccgagaggcattccgcccgcacccttgtcctgacccgcgtgaatatatgcgtgagcttcgcggacttcgattttgacgacaatttccggctcgtacaggcttactgtgagatggggtatagcttcaagtatcgcgccgccgacctcacctgaaagctcgggagaggaaagagggaattttttgtcgcttctcttagcctcgcacttgaacgttttgtagtttttcagcttctccggcagatattttacagctgtgtctattatcgactcaagagttttctcggcaaccgcggctttgcatattgcgacgaaaccgaagactttgccgagctgatcgtacagaacgtcaaggttttcctcggcttcttcgtcggcaggctctacgtaaaccgtgctttggttgtagcttacctcgtagtttccgaccagtttcgcgcgtcttttgacttctctcagcagctgagcctcaaatgtcgagcgatttgttccctttaaaattatctctccgtatttgcaaaggattatctctttgattttttcgttgtttggcattatggcacctatataattaaaataaatttctattataacccatattagtatatcatatttttttgacatataaaatagtgacttttaccaaatagatttcgcggaatttgtgccttttgcggtattttcggcaaagcaaaaagcacacgtccgatattacacgaaacgtatgcttttctctcttattttgttgtctcttgtacggcgctgagaaaatctcccgcgagacggtatgacagctccgtcgggttcatttcgggatgccactgcactgccctatagtaccgcagagatgggtagtccgccgcttctataattccgtcgcacgacacggcgcaggcttcaaatcccacaccgagctttttcagggactggtggtggtagctgttcgtcacgatttcgtccgctcctgcgagagttgacacaaatcccgacgcttttaccacatgggcgggtctttcgttttcgtccttgtaggtgtggctttttccgccgagcagctgagacgtgatatcctgccacagcgttcctccgagagcgacgttcattatctgtattccgcggcagataccgaacaccggcttgtcgagctttattatctctccgagcagctttatttcgtattcgtcgcgttctgtttccacgtcaccgcagcagtcgagcttttcttcaccgtatatcggagggtaaacatcgtctcctccggtgaacaaaaatccgtcaaactcgcgggcatatctctctataacgtcgcttttgtccgttatcggaagaacggcaggcattatatcgtatccgtatctctcagcggcttccataagatactgcggatatcttggctttataaagtagtttccgtcattgaacgagcaggtcagagctatctttaacataatttttctccgagtatggttttattatattatactccgaaaatcatgcttttgcaaggctcagtcttcgtcatcctcgtcctcgtcatcttcttcatcgtcgtcttcatcttcgtcatatgaagctttgccgtgaacggtaacgttatttgcgtcaatatcaccggaagcgtcgccgccgatttctacatttccgcccgcgtctatgtcgccttcgctgtttccgcttaccgtgaccttgtttccggcttctatatcaccgtagttgtctccgtttatcgtaacatttccgcctgcatcaacatctccgttgcagtctccgttaacggtaatgcttccgcctgcgtcaacgtctccgccgcattctccgccgatttcaacgcttccgcccgcatcaatgtcaccgccgcattctccgtcaaccgttatatttccgccggcatcaatgtcaccgcttgcgtttccgcctacatgaacgtcacgacccgcgtcaatgtcgccgtttgcgtcgccgtttacagtaaccgtatcggcttcaat

SEQ ID NO: 1100 - DNA, 6648 bp, Unknown
  16S sequences of unknown bacteria
ttttcctccccggaaacgtaagctcgcagcacgtcaccggacttatattcgcgctgtccctgcttgacggagaatcgaagatcacgctgacctcgcctcttctgtcaaagccttatgttgatataacacgcgcggtatgcgcctccttcgggatcacagtctccgaaggcggcggagatttcggttcgtttacggtaaagcgcgcgaaaaacttcgtgccgccgtcggaataccccgtcgaaggcgactggtcaaacgcagcgtttgcgcttgcaatgtcatgccgcgtgtccgggctatcgccggattctcttcagggagaccgcgcattctgcgatatccttgaaaagctcggcggacgcataaccttcaccgatgataccgttgccgccgacacctccgcgcttcacgctgcgtcgttcgatgccggggacattcccgatatcgttccgcctatcgccgtactttgtgcggtcgccgacggcgaaagccgcataagcggaatatcccgtctgaggataaaggaaagcgaccgtgtgaaatcggtatgcgatctgataaactcgctcggcggaaactgcacggactgcggagaggagctcgtcatacgcggcgtcggatcgctcgcgggcggcgaatgctcgtcgcacggcgatcaccgcatcgcaatgtccgccgcgctcgcgtcgtgcttctgccgaaatgacgtgatcctatgcggcgcggaagccgtcagcaaatcatacccggaattttgggaagattttcgcctcctcggcggaagcttccgcgaaatttcgtgaaaaggagttcaaaatgtcttctgtattcggaaacaggataaaagtatcggtgttcggtcagtcccactccgaggcgatcggcgtcgtcatagactccctgcccgcgggattcgagcccgacatggaaaagctccgccgatttacgatgaggcgcaccgcaatcggtaaagaaggcgttaccgcacgcaaggagccggacgaggcggaaattctctccggacttgtcaacggaaagacctgcggcgcgccgctctgcgcgatcatacggaacaccgatgtgcgttcctccgactatgattcgctgaaaaacaagccgcgcccctcacatgccgattacaccgcctttatgaaatacggagagagtgcggattttcacggcggcggacatttttccggcaggctcaccgctccgctcgtgttcgccggagggcttataatacagctcctcgcgcagcgcggaatacggatcggcgcgcgcgtgaagtcgataggcaacgcatacgacaaatacatcgaccccgccgaggtaagcgaagaaatcctcgacgaaatcgcagcctcggatttcccgtcttacggtgatccgcgcgccatgcagaaggagatctcggacgcacagaccgcgctcgattccgtcggcgggcaggtcgaatgctttatactcgggctcggcgccggaatcggagagccgatgttcgacgggcttgaaagccgcatatcctcggcggtgtttacgatccccgctgtcaagggaatcgaattcggagaaggctttgccctcaccgggatccgcgcaagcgaggcaaacgacgaattttacattgcggacgacggcacggtaaagacccgcacaaattcaaacggcggaatcctcggcggaatctcgacggggatgccgatcgtgttcagcacggcgttcaagcccacgccgtcgatcgcactcaagcagcgtaccgtcgatctcgaaacgatgaccgacacggatatagaaattcgcggaaggcacgatccgtgcatcgcggtaagagcagcagtgtgcgtggaaagcgccgccgcgatcgctctcgcagatcttatactttaacagataaaacggaaggaagtacgcaaaaatggacatggaaaaactcagaaacgaaatcgatgaaatcgacgattcgctcgtcaagcttttcgaaaaaagaatgcagagcacggctcagcttgcgaagtacaagaaggagcactccgttcctgtatccgaccgcacaagagaacgtgagataatctaccgcatgagcggcaaggtcacccccgagcttgccggatatacgaaatccctttacaacacgctcttcgatctctcgaaatcataccagaattccctgatctcccccgagtcaaagctcgcctccgaaataaagaagagccttgagggctcggaaaagctcttccccgagcgcgcggtcgtcgcgtgccagggaaccgagggcgcgtactcccaattcgcctgcgaccgtatgttcaagtatcccgagatcatgtatgtaaacagcttcgacagcgtattcgaggctgtcggacgcggactctgccgctacggaatccttccgctcgagaacagcacggcaggctccgttactgcggtatatgagctcatgcagaagcacaaattctacatcgtcggaagcatcaagctctgcatcagccactcgctgcttgccgcgcccggcgtccgtctcgacggagtaaaggagatcttctcccatgagcaggcgctcaaccagtgctcgaaattcctctccgagctcaaggatgtgaaggtcaccgtttgcgcaaacaccgccgaggctgcaaagtccgtcgccgattccggacgcagcgactgcgccgcgatctgctccggcgactgcgctgagctttacggtctcagcgagatcgcctcaggaataagcaacacggaaaacaactacacccgcttcatctgcatatcaaaggagcttgagatctaccccggcgcaagctgcacgagccttatggtccgcctgcctcacaagcccggctcgctctacagcgtgatctcacgcttcgcggcgctcggcgtgaacctcaccaagcttgaaagccgtccggttcccggctccgatttcgaattcatgttctatttcgacgttgacgcctccgtctattcgcccgagcttgccgagcttattactcagcttgagaacgagcttcccggacttgtctatctcggaagctacaacgagttctgatatgagaacgggacttctcggaaaaacgctggcgcacagcatctctcccctgctgcacggtcttctcggcgacgaaaactaccggcttttcgaaattcccgaggaggatgtcggcgcattcatgacgggcggcgcctgggatgcgataaacgtgaccatcccctacaagaaaaccgtcattccgtactgctcttccctttccgaccgcgcggcggcaatcggctcggtaaacaccgtggtccgccgtccgaacggcacgctctacggcgacaacaccgatttcgcgggcttttccgacatggcgcgcgacgtcgatttcaagggcagaaaaacggttatcctcggttccggcggagcaagtcttaccgtgcaggcagccgtcaaacatctcggtgcgtcgagcgtcaccgtgatctcgcgcagcggcgatgacaactactcgaatctgtcgcgccacgcggacgcggatataatcgtaaacactacgcctgtcgggatgtatccccatgaagccgaatcgccgatttcgcttgacaccttcacgtctccgtcggcactcctcgatctgatctacaatccgctgcgcacccgccttgtcctcgaggctgccgaccgcgggatatactcccgcggcgggcttcgcatgctctgtacgcaggcatacgaagcgcggcgggtattcggatgcgaaaacatgatcggcacggatacgctttacaaaacggtgctcggcgagcgggaaaacatcgtcatcatcgggatgcccggatgcggcaagaccgtattcgggcgaaagctgtcccgaaagacgggcaagaaattcttcgacaccgacatactgatatacgagcgctgcggaatacgcgccggagagatcatcgaaaaatacggcgaggcgcgctttcgtgagatcgaatcggatgtgctgcgcgagctctgccgaaaaagcggcgtgataatcgcaaccggcggcggagcggtgctccgcgaagaaaaccgcatcgccatgcgttcctgcggcagggtgctcttcatcgaccgaccgccggaaaagctcaccacggacgggcgtccgctttcatcgactccggagaagcttgccgcgctctatgagaaacggcttccgatctaccgcgcgaccgcagatatcacggtcaaggtacccctttggacacgcgaagccgaagaaaatctgtttgcatcatgtacccgaccgcttacttaagcatacacgaaattttcagaaaaggaaagctccccttgcgggagcgcccaccgaaatgaaaaaaatcttggtcataaacggtccgaatctcaatatgctcggcatacgcgagccggaaatatacggacaccgcacatatgacgacctcgttgactatatcacggagagcgtccgtgcgctcggcgccgaggcgaccgtcgtacagtcgaattacgaaggcgagatcgtcaccgcgatacagtcggcatacggaaaatacgacgggatcatcataaatcccgcggcgtacacgcatacaagcatcgcaatactcgatgcggtaaaggcagtgggactgccgaccgtggaggtgcatctgtccgatgtgaattcacgcgaggagttccgccgcgtaagctatgtcagagaggcatgcgtaaaaacggtatccggtctcggattcgacggatacgccgaggcggcgcgttttctcacggaaaattactgatacggcaaataagggaaagaggcatcaaccgatactgttgatgcctctttcctcaggctgcccgtcgttctcttgaagtcccggcgaacaccgaacgcagtaccgaccgcttatccgctgtcagccgctgcggtatttccgctttcacaaaaataatgccgcaggcggagggatcgcctgcggcattttgcgttccggctgaaaatcagccggttttattttactgccagttccaccattccttttcacgcatgggactgtctccgaggcgatcgaccaaagcgcctatgttctcgtttatgtcgaaatcggagagctgcgcactttttcctcccgcaaagatatacgatgaattgacggcgagattgcggaagtattcccaaagctcggtgtagcgtgccttctgcgcgtcgtttccgttctcataccaatcgtggtaaaccgagatcagcccgcgaacgtacatcgagcggctcgcaagacgcactccgtattccgccttcgcgctcggtgcatattttaccgcatcgtcgaacatcgagaggcaaagctcaaattcatcatgcacctttgaaaagtcaatgcgcttgcgcgggtcgccgaatccgagcatgaacggccagcagccgatcatgtctgtcgtctcaagccacttatagtaatccccgacaaactttccgccctcgccgtagaggacatagaggtaatcgtcgatcaccgcctgaaattcctcttcggtcatttccgcattccagagaagccgctggaacaggtacagtccgaggatatcgatactttctcttactccctcggaagggggattcgcacagcatatccatataccgtgcaccccgttgtcgctgaagaagcgcatatcctcacgcatcgtcttgatcgtcgaattcgtgatggaatcaagaagccagttgcccggataataccaaaccgtaacgcgcttggaaattctgcaccactccctgaattcctcggcataggtgtgattcgacgtgccatagccatctgccgcatgttcggtacatttttctccggaaagcgggtgatttccgcaggtaagctttccgatatcgttgtagaagcagtacgatatgttgacattgtctctcggcactgtctttttgcacggtttggaggttccaaaatatgcgagcatcgatacccaaagcccgggatactcttcgccgatagcatctgccattatgttcgtaaaatagagtacgggcgccgcatcggaacgttccgttgctatcgcgttcatgcaatttttgcatttgcagaagtcgccgctgtcgatctgcgcaacgtcaacggcgctgaactcttttccgatctcataccctgccgcaagaagtcttgcgacatcattcaggtaatattctctcgcctcttcgataaatgtctcatcggtaaagcacggctgcggtgccccgaaaattgaatacatatcggggtcatagttcgagaaagcccccgcctgaatcgggaactgcagtccgtggcacgcaccgatgcaggttgactgaccgtagccgttgtatttggacagattgtttacggaagagctttccttgagctttacatattgattgtacgcctgcaccatatgacgtcccgtgcggtatgtgaatgagggaacctgagtgtcgtcaagatcggcgggaatttcaacgtgctcggaatcgtagaggtagtagaagctttcttcgttcgcttcggtatatttttcggtttggtaattgaagaagaaccgccagccgatgtagcgctcgagaagctcatacacgccgtacatgcagccgcgccatttgccgcccgtgatgtagaggtttccgtcgtccttcacggaaagcgtaaagccttcct

SEQ ID NO: 1101 - DNA, 14614 bp, Unknown
  16S sequences of unknown bacteria
gtcgccttcggctcctccaaacatccaaagtcttactcaatgtagttttcatcatatttttttgagaaaagtgtaacctatcattgacgactgtacaattatagagccccttaataatacatttctattgacaaccctccttttatcatatataatacccttgtaacatggtttgaggaaattgtcaaatttgacttttgcttttttagcaagcgttcaaattatggcattggtacgagttattggtcggatttttcccataaagggagaagtccggccatttttgcgttttagagcaatttgaaacgcccgcagctaaactcggtaatcacaagattgaccgaccaattctgtttaaagcagaataggtcggtcttttttgtttttacatacaacaaaacgcgcctgagaaaaaagcggcgtatctttaaaagaattcacaatttcactttaattctttgagatattccgcattttaaaaaggcgcaaaaggagacggaaaatgagcaatcaagacaacatcaacagcttcctcgacagtatggactttgacagcacacctgccgagcaagcaccaagcccgcaaagcgtgccgtttactcccgcagccgtatggccgggcgaagaaccggcacagcaaacggcggcagcggctccggttcaggcagaacccgtgcctgctgctccgccgacagcacagcccgcagcgccgcaggaggtaattcctacgcctgctccggctgttcagacgacgcagatcccacaggcagctccctcagcagagcggcagactgtaccgcaacagcaacccgcaatacaacaacaggtcataacgcaaacacagccgattgtgcagcaacagcctatggtgcagccgcaaccggtagtacaacaacctgtaatgcagcaggcagcgcccgagcccgcacccgttcaagagacaatgctcgacaagtttgacatggtaatgcagaatcttgaggtgcagggcgaaaagcgtatgcttgaagcattggcggcaaagcccgcaatattctcctacgcaaaggtcaaggaaaatattgaggacagagactcgacctttgaggatctgcggcaaaggtatgaggcggatttcccagagctttcggacccgaagaccatatcctggacggtgaattacggaaaaaccacaaagagcgtaagcaaccccggctcggataaggtctacgatattaaagccgaaatcgagaactccaaagcctttaaggaagcgcttaaaaaagctaaaacagacgcggataaaaaccccgaatgtatagtaaagcttttcaaaaaggcgcagaccaaaggcgaggcgctctccggtattaaggagctttgccttaccaaggcggaagccgcacagacaaataagcctatcgtactcctgccgtcgaaagacggcagggtgtatgagcagcgcagaaacgaaatagggtgctttacagccccggcagagaatgtccgtgaatttgaggatatacaggcggagtttaaaatggcgctgcctaaaattcccgcacatatcttttcaaaggttatgggcttttttaagagcatttcggacgagctgcattacgaggtattagtgcatattctctacgataaggaagaaaaggaatacataataaaggttcctaaacagagaatatccgaggcctcggtaaacagcgaaacggacgagccgtatcccgacagatatattcatgttatggattttcattcgcataacactatgcctgcggtattttccggaaccgacaatgccgacgaaaaggaaacaaggctttacgccgttgcgggcaggttcaaccagacattccccgaaataacggtaagagccgggtgtgcgggtaagtttattccccttaaccccgaagatgtttttgagggagatttttttggcagctacccggaggagtggaaagaaaacatacgccattggggtactgaaattaaaaaaccgcggcatatggggttacggtttaaaaaggttttcggggaggacagaatatgaagtattccgcaacagcaccggttaaaatcattgttttgggcgcaggcggtacgggcggatatttaatcccacacctctaccgcatagccttttcagatgaaaaccgcgactaccgcattattatctgcgatggggatattgcagagcgcaaaaaccttatccgacaaaattttattgagcaggatataggcagaaataaggcgtcggtattagccgagcgctacgccggagctttcggcatagagtgcgaatatataccagaatatattgaaagcgaacagcggctgaaagagcttgtccgaccggactttacaaaaagcccttggagcaatgccagggaaacccagcgtgtaattttaatcggctgcgtagacaacaataagtcgagagccatatgccataaggtcttttacgaaacaaaggatttggtgtatatagattccggcaacggagagcatacgggtcaggtagtctgcggaataagacaaagcggacgaacaacctttaagcccgtaggcacgctttacccggatattttaaaggctgaggataagctgccgaccgagctttcctgcgcggaacgcgcggtatccgccccgcagtcggtaaccgcaaaccttaccgcggctactgccgtaacctcttttctttacgatttacttgtggcgggcgacctgactacaaggtatgtgaccttttcctctaaaattatttccacaagagcggaaacggttaaaaagcgtaagaggaggacggaaaaatgcgcggcatagaaataccggcaggtgcaaaggataaaaagaacagcggcgggttttatgttgcaaacagcgcggtttttaccacggacaatcccacaagggattgggatatgtttactatatttttaggcgatcagctttcaaaggccctgccgaagcttgaaattaccaagtgctttgagaatgtacccggcggcagaagaacctatgtattcgcgaaaagcgaccgtatgaaggtaatccttgacgatcaggagaaatacattgcggtttttttagttgcggacgacagtgtggaagatttggttttcaatactgcgcttaatacccttaaaaatattctcaccttcgggtataaaggctcggtgttcaggcggataaactaccgcaggctaagcgaggtaaaggatgagcgattgtgaaaataacggctgcttttgccttgacgagctgaccgagtgcagcgaaaatctgaaacgcttaattgcagctctcaatgaacagtaccccgtttatcttgaaaaaagggattacggttcaatatccgagctgcatattaccgctaaagcattatgggcggagtttgcaaacatattgcacccgctcggtgagtacggggatgaacagctatactccaccgcccttaaaatgtttgaggcagcaaagcgctttgactaccttaaaaacggaaattaccccgccttaatatctgcgcttaattcctttgcggatatgctgccgaataaaaagagcatcgacgcaaaagcggcggcgcaccttatgaaccgtattaaaatgggatactttcctacggacttggagcacataaggttaattaagcaggcggttaatttcccgaaaacgcaggtaaatattttagacccctgctgcggagagggactggcgcttaaagcttttgcggaaaacgagaacgccgatacctacggaatagagcttgacgaaagcagaggacatacagcgcaaaagaatctcgaccgcgtaggtctcggcagctttttcggctcgtctgttccgccaggcagatttcacgcgctgcttttaaatccgccttacctttcctgccccgacaaaaacggcagcaaaagaatggaacgtgcttttcttgccgacactctaccgcttttaatgaaaggcggactgcttatatacataatcccctaccacagggctaacgaatcggtatgccgtattctttcgtcttactacaaaaatctttcggtatacagattccgtgacagcgagtttaaaaagtataagcagatagtgtttttcggtattcgcaccgaaaggcgcacggcggataaaaccgccgcaaggatagagcagctttgcttgcagccggataagattccccttatagataccatacccgcgggactttacacattgcccgaaaaggaaacggaaatttcccatttcagaggctctgttttcgatgttgaagcattagccgaacagcttaaaagctcggacagcttagatattctttttgaaagctcacagcttgaaaacagaacgcgaaatccgcttttaccccttaatctttcgcaaataggactggtgggagcgagcggacttatgaacgggcttgtggactgcgagcacccgcacgttataaagggcagaattgtaagggagaaaaagcagaagaacataccgaccgacagagagggcgtaacccaaataagcgaggttgaaagcaacaaaattatctttaacattcttactgaaaacaaatatatcacaataggttaaaggagacagaaaaatgatattaacagaagaaaaagccgcgtttgcggcggaacatcacggagttataacgcaatacctgaaagagcgaggactatcccccgatgaatactacgataccgttgtattcgcgtttttggattgcgttatatccggcaaagacaattttaaaaagcgcgcatatgcggcgatggacagagcggttgcggcagtaaaggcggaaagcgaggaaaacgttataagcctgttctgcaacgacgactattaccgcatagttgcggaaaccttagcggacgagcgcgacggtatagccgagcttttggagcgcatacaaatatccgagcttttaaacgcctttgaacaaaacgagcgcgaggtgctgacactgctgcttgacggctttaagctgacggaaatatccttcaggctccaaaaaagcctatgcgagctggataatataatgcagaacatccgcaccaaaacggcaggcattttgcccgccgcagcgtgaaaggggtacatatgaattttaaaagagaaataattgcaaaaatacgcctgctgtttcgttcaatgaaagccaagcgcgcaaagaaaaagctgcttgaagcctttaaaaattatcctcagagcataaggaaattatctgccgcttatgagagctttttaagggcgatacaggcagagcaaagggcgctggttacgctcaaagcgcttaaaacacagtattcccgcagacccatacttatgaagatacgggatatagggcagtatacgttgagccgaaaggcaaaggaaatactttcggagacagatattgcctgcgcgctcgagcgccacaaatgcggcgactggggagaaatctccccggaggactgggcgcgctgcaacgcctgtatggaaacggggtacggctatgtgtattcccggcataaaacggcaggtaaccggtatttctgcattataaccgactacgcaaagccaaaaaccagaattgtaaccgaggaggaattattgaatgcaggcggaaatagtaccggagctgtttatgaagaatctcagagctatcccctcaaaaaagcaggttaatcaccttaaaaggctcaaagaaatatcttcgggtgccgcgtatctttacaaggcggtaatactccccaaaatgcagggaaaagaggtatataccggcaaggttaatatggcagcgtttgaccgcacggatattgaaacggtatgtgactattacaaggataatgttgccgcagagcgaccggaaaacaaggcgctttttgagttgtattcaaaaatagcgtatactccgccgctcaattcacattcggactttatctaaaggggtggttttgtgtttgatagctatataggagatatagaccatgatatttccgttctcgctatggataagatactgtatgacaacggtttttccgtaacggacagtgaaattcattcagacagcgaatatgacaccttttttgatgcattgtttactatggacggatatattgacgaggacgaaagtgatgaagcagattgtacggtaatggttttcagaaacggctgccttaaaagatatatcggtcttgcgctgaaatacggcagcatgaacggcatacctaaaggcaataacttttggataagccgccttgaagcgcacataaacaataaaatgcgctctatcggggattattcgtatgactgggattacaatgtctcgtcaacaagaaaggcttttttgaaggtatatataggtccggaattttaccaaactgtagaaatgatacaggcgatagcctcaatactgcattttgcaaatacttcctgcaaggagctcgaaaggctgacggacaaaaaaacggcgaagataattcctatgaaaaaacagaaagaaaggaagatggcagcataatgaagcgcaacagattatccattcatatctcggacagcgcggaaataacggttgaggaaagaagaaacggcattaaacgtattaaaaatatctcaatcaatgatctgcttgtctgcatacaaagcagtcttcgggaaataaagccggtataccatgccgtattacccaaaaacgcgctgttttacagctgttgcccggaaaccgaaaatttctccgcagcgatagaatatccgtactcaaaagccaccgttacatatatggcgaccgagtacccggactttccgctgccgaagcttgtattcggctttaagataggcggcagcggcaaaatcctacgggtatatttaggcgttgccgaaaacggaatactgagagaaaattcaaaaatgtttgtttatccgttttcaaatgtcagcaacgacttctccttatgtaccggagaaaatgagctgccgaaaatcaactcgccctattccctttccaatatgccggactatattttaagtatgccggataatgacgatcacttcgagccgaaaaacaacagactgcatctcggtcatagggagctgatggagcatttggcagataagacgcccgaatactattattcggatattcttattccatccggcaaaacgcttgcggacttttatggggaggtatctttatgaccgaagcgcaaaagcagaagctgttactccctttccctgcctcggatattgaatggcgaacggcgtatacaaacacggaaaagaccaagggctttgccgtaccgtttgtaaattcgcgtgctattcaagagcggttagatgaaatattcggtcctgaaaactggcagaacgaatttacggtagctccgagcgctgagggcaagtcatctgcgtatgtatgcgcaatttccgtttacagccccgaaagaaacgaatggataaaaaaatccgacggttcgggcgctacggatattgagcctgtaaagggcggactttcgggcgcactgaaacgcgcggcgtctgttctcgggatcggcagatacctttacagccttgaaggtaaatgggttgaaattgagccgagaggaagcagctttgttataaagcagagcgaatacaaaaatttagccgcgcattataaccggcagatgaccgaacaaaaaaccggaataaaattcggggacacatcaccgacagcgcagacaaaagcacctgagccaaagccgcaagaaacccccgcgggcattaagttccgtgtagtgaaatcagtagtgcgtaacagcgctaagggtacgcagacggcgcttactttagaaaccccgcagaatcagctgataaccggatatatgcagggcaatcctgagcttcgcgacggacagatcatctgcaatgttaaaattgaggaacgggaaagcgcgacgataggaaagtacaacattatacgcggctttgaaaaagcggcataagattaaatcaaggagacagaacgaccatgaaaaagaacgcacaaacagcaacggcagtcatagctatatccgcaattcttctgctgacggtcacggcggaaacggcaatacttttaagccgcatatggacgcgcgaaaagtacaccttggcttttttggtattagccgcagggatagccttagtctatttactgtttaaagcctttgaggaaaaaaccttaaaaaagggatacgataaggcaagcgaagaaatttctttgcttgaaagacaagcggacgagcttaaccgcgcgcttaaagcttcggagcacaacctgaaaactctaaaggaaaacgagccggaatacaagcgcaaaagcgaggtgctcgaaagctaccgtaattccttcccctgtttggtacagccggggtatacggtattcaatgttatccgcacagaagtcatgccggataaatacagccgctggcttattgtaggcgagttcggagacgaattgtggaagactacaattatacggcgggatatgcagacctacggtgaaatgctgacccttataagcaagaccgaaacacccgacggcataacgaaattaaacgagcagaacgctttaccttgggaataaggagtggagcttatggaacagataaccgaaataagcattaaagaaatctctctttcgggctttcgcaaccaaaaggagcctgtaagctttgcgctcggcgacgttaactgcgtcaccgggcacaacggcaccggaaagaccacccttgcccacgcagtcgcattcgccttttacggcgttacatatttcggagagcaaaaggctgatcggcttattaactccgaaagcgcaggatgtgaggtaaagatagacttcaccgaccaaaacggcgtactgcacagccttatacggcgcagagcaggctctaaaaccgagcttatattcgacagcttttctgtaaggcaggaggaaattaaccgctttatctgcgataaggacacctttctctgcatattaaatccgttttaccttacaagcttcagcgaagtaaaggggcgcgagctgcttttccgcaatcttaaaacggtaggcagcgagcagatattatccgccatgtccgaggggttcaaaaaacctcttgaggggcttaatataaccgaacctgccgaaatgcttaccgattacagagcgggtattcgcaggtgcgacgagcagctgcggatattagagactaaaagggcaaccttgcgcgaaacggtacaggcaaacaacgccgagtgcgataagctgaacgagcaggcggaggtttcagccgccacggtgcatatgctgaaagaaaagcagtttgagggtttaaaccttgaggatttcagaaaacggcgggatatactttccgaaaagctgatatcagccgtaaacagcccgaccgccgctttagcggcggcgctggaggaaaggctgaaagcggcaagagagcgggaatatgtttcaaagttctcgggtgatattgcaaagcttgaaacggagcttgcaggtcttaaagtcaggtacactgcccttaaacaaaagctcgaaaagcttacgccgggttctaaatgccctacctgctcggtaacgcttaccgatgagctgtttgcaagcgcaaaggcggatatttcgtccgagatagaccgtatcttaaaaaatgcaaacggactggcggagaccaaaaaggaaatgcttgaaaccgagcaaaaagcaaagcagacctttgaccggtttaaaaaggacgataccgaaaagctgtccgcagagttggacgagctgcgccgcaccgtggacgattcgccggagattatgcagcgggaaattgaggagatagatatgcttctctcccgcgggcttttatccgacgaggagttttcggagcttgaaagcgaggaaagaaaccttgcagaacttgaagcgcagatcaaaaagctgcgggagtattcggtagacacgcaaattacggctttgaacgagcaggcagccgcctttgaaaacgataaacggaggtataccgaaatattatcctctcttgaggagtatgtttcaaagcgaaccgagctgttggcagaggagcttaaaatgccgaatgtaagcataacattatttgaacccgttaaaacaacgggtgagcttaaaagcgtattccgctttgcttacaaaggcaggaattacgcggcgctgtccttatccgagcgcacggcggcagggcttgaaatatgcgcgctgatgcgcaggcttaccgggcttaatttccccgtgtttattgacaacaccgaaagcgtagctcatttcgatatgtcctccctttcctgccagacggtatttttaagaatggttaaaaatgcgccgctgtcggttaaatccatgaaccaagcgactgaaccacttaaaaaagcctcgtaatgggagcgtacattaactttgaccttgtagacacagcggagctttgcggaataaatattaagcgcagcacacttacgaatgacgaggttgaggcacggtgcccctactgctgcgaccaccgttaccgtatgtatttgaacagacacacaaatatgttttactgtcataactgcggtaccggaggcaatgcggtcacattatattcctcttttaatccgaaaggcgtgagccttaaaaattatgagagctataatgcgctgcttaacgagccgtccgtcaggcggcacgatgtgccggtggaacccgaaaagagcaaaatccagatacgggaaattacggaaagaaacgaaatatataccgggcttttaaagctgctgcgccttgaaaaagagcactttacaaatcttttaaacagaggacttgacagcgaaagaatcgcccggaatatgtaccgcagctttcccaccgacaacgcggaacggcaatggatatgcgacagtctcgccgcacgctatgacctgcacggtatgccggggttttacaggaccgacggcatatggcacatagcggcgtttaagagcggtattttaattccgatacgggataagcaaaatcttatacagggcttacagatccgtttcgataatccgcccgttaagcgcgttactacgccggagggaataacgattgaaaaaaccggcacaaggtttatgtggctgtcttctgccaagcagaaaaaatttgagggaacctctgttccctcatatatccacataaccggcaaccgggacagcgacaccgtttatttgacagaagggggattaaagtccgacgtcgcaagctttctgtcgggagataagctgtttatcgggttgacaggggtacagaacaccggatttttaaaggaggttatatccctgctcggacctaaaaaaatagtggaatgtgtcgatatggacgtgcgctccaacccgcaggtgcaaaaagcgcaggtcaagatacaggctatctgcgctccgctgtgtgatacctacaagcgccttttctggcctatcgatcagaaagggattgacgacctccttttatttagaaagctcaaaaaagaatacgaagaaaaaatacggaaaggagagggcaatgcgtaaggaagaaattgttgaaatatctgcctttcttgctcctaaaagcgcgccaaacggcaaagagaagacgaaaatgctggaggaaatcgtaagctccgtttatctgaacagaaaggcgctgaaagacggaattttgtcctgttatgtaaattcaagccgctttgccgtaataacgctggatttaaacaaatacagtaaaaagctgcggaaaaaattcaagcttgattctttacttgacggcacatttcggatatgggaatgcccttattgcggctgttactactttacatatttaccgtatcagtatcgcgataactgcggttgtatcggacggtcttacgaatgtatttcctgccgacagcttgacggtgaaaggctttatttgatttcagaggcttacagaaaaaacggagtcaaggctgcaaaagaataccttgaaaaaatatattcaaataagaaaggaaattgatttatgccggaaatgcagtcatatatgggagtaaacgagggaaacagcggaattataggcaaactgctctattattctacagcaaacattttaataccgaaagatagatttattgagcttggcaaggcctttaatttaccgaaggtaaagcccgcgcgcgaatcggcggcaagcgcatacagatacgctaccacggcacttaaggaccgtgtggttaataaggacgcgggcggtacgcatatctaccgcatttactgccgagataacaagcaggacacctcatcggttatctgccgcgagcttgtaaaggaaacgcttgactctacgaccaacaattacaaaaagcttgcgaacatagcgtttaagcgtgaaaccgaggaaatgttctacgacaataccgaatatgacccggagattgacgcggcgcaatactgcgagcaggcgctcactcttttcgagcggtttaaaagctgctacaattccgaccatgtcgattcggttgtgcagcttttactcgaaaaaatgcaggcggtcaagataaatattcacggcaacctgtattttatacccaatccgcatttgccgctcttaaacatatttgaggattacattgaggcgctttcaaaatgcaacctgaacgcgggtaatgtttcttcaaacagtatgttcgtggcaaacgatgaaaagcagcgcgagaaaatgacagctgaattttatatgaattacaaaagagatattgaaacctacgaggagcgaatccagcacttcattgacaacggctgctcatctgctgcggttattaaccgctggcttaaaaaaattgaggcgttaaaggctaaaaaaacaacctatgagcaggtgctgaaacgccggctcgacgaccttgacaaagaattttcgctgctgcaaatgcagtcgcaggaattgtcgctcagagccgttaagaaccaaatggaaatgccgttagcggcataaaaaacaccgtctgtcccaatagggataggcggtgtttccttgtcagtgtaagcaccggagacttattacccgcctcaaagcagctgtaattatttcaattcatatgcagcggtctgatttcattatacatcatataaaccttatcaagctgtttatcaatatggtagtgtccgcagtaccatatttcgtaatccaagctcctttcaagtctgccgagccattcctcagttgaacggtcaatatcgggcttgaataattttttggattttgcttttttaggctttcgctttatttcggcattttgctttgtagacataaacatttcagtaggaagataatctatcgggcaggtatgcgtcatcataccgtatatactgttgttttccgccgcaagtctctcctccacacctacctttatctcaccgctcggcatttcatccgcaaaaaagggtttattttcttcaatgcagcgcattttatccacactgtgcgcaccgacgacaaccatatatctttttccctcaaatgtgtatatttcaccgtcgattgcaaaatagatattgggatatttcggctcgtaatagaccttgccgccgcaaaagcttcgtataccgtatgttcccacattctgcgggcggtcctccttattgccatgaatacaaaacaaggtaatattaaggcttgatatttcttctttaagcttatcgtcccgcttgtcaccgtaataattaaaacccgcgtcgcctaaaataatcaagacatccttgcgccttgtgttcatagcgctgcaaaacgcttttaccatagcaaaattcctgtgcttatctcctgttatgaaatattttgcgggtgtgccgtcatcataataagcaatcagtttttgatccatccatctcgttttagaaatgcccgaaaaaatagctattacttccgcagtcaatattcccaaaagaacgcccgttattaaatttagagggctgataggtgtaaatataacaggtgatataacaccacccagcattgctcccggaagaacaatgcttttaattgacgatgaaaaaattttttcatgcttgtatgtactcatacaaaacccattatgattagaattaaattaacagaaacaattattgcttgcatttttaatttctcattaaagttttaatttcggcagctgcaagtacagtataaaaaataaccatgacagtttgcgtcagagttagaaaagtattttttgtaatatccctacaactaaggggctgtcgagttaagagagccacatttttcacgcggctgcgcgatgaaattccatcggcgtcatgcatttgagtctctgctggtaacgcttgttgttgtaaaaattgagataacgctcaatctttgatttcgtattgtttgcatatttgccgcagactcccttcgcctctcaggtatatctgcactgcttctgacttcaggtctttgctgtatctcttgttccttctctttgacataattaacccccatggtgtagacttgaaaactttttgttttttcaagtgtctactctaaggggattatatcatatcacagtctgtcgggggattattttattttcttattctgccgggtgttactccgcgctttttcttaaaaaca

SEQ ID NO: 1102 - DNA, 5726 bp, Unknown
  16S sequences of unknown bacteria
aaaaccttgcacctgaacaattcaaaagtttacaccaacatgctcgggttaaggtacttttgaattgttcagcaggcattaaattaagcttctctgtgctgtccgaaatattatttccgaatttctcttttaatcaagtattcttccgtctgtggaaattatgacgatctgccacggaataaatttaccgctttgctgaagtgcggtcttcaccgcttgctcaagtccgccgcagcagggcacctccatgcgaacgacggtaacgcttttaatatcgttattgcggattatctcggtcagcttttcggaataatccgcaccgtccagcttcgggcagcccacaagcgtgatgtgtccttttataaaccgctcatgaaaggcggcgtaggcatatgccgtgcaatcggcggcgatgagcagctttgcaccgtcaaaatacggcgcatttaccgggacaagctttatctgcaccggccactgcgatagccggcttttgggtcttacggcagcggcagctgtatcgccttcctcactgtgctcgattctttgtaatctgctgcccgggcatccgccccttaggtgcatgccttccttatgctttttttcctgcagctttttccgcttattttccataacagctttttcgtcataagccgccgcctcgcgttcaataaaggttatagctcccgtagggcaggcgggcagacaatcgccgagcccgtcacaataatcatcacgcatcagctttgcttttccgtcgaccatggctattgcgccctcgtgacaggctgcggcacaagcgccgcagccgttgcatttattgctgtctatttgaataattcttcttttcacaagagtacctccctgatttttcgtttctattataatgcctgctgaacaattcaaaagtaccttaacccgagcttgtcggtataaacttttgaattgttcaggtgcaaggtttttgcgcatttttgcgaaaaaaccttgcactttaaaaagaatcacattttgattctttttaaaatcaggcgacaatcaatggatactgacggtcaaaacaaaggttttgacccataaaatcgagattttaactcgattttatataattgcatttgctaatgcaattattcagtagacattattataatattatatgtccgataagtcgattaaattttcaacaggacagatttttaaaaaattttttatttgttcttgccgccttccgaattttcataaaaatctttccattaacagactgaaccgccgcccaaaaaaccggacggcggttttaaatgcaagatttactttttggctgctgcagcctttttggctttatgccgtctccaaattacccaaagcggacctgcaatacagagtgaggaaatcgcgccggagactataccgaacgccataggaatggcgaaggtacgaagagttgacagtccgaacagctcggaaaccgtaactatagtcataaccgcaacgaaggttgtgatcgaggttatgatgtttctccttaaggaggtgttaatgctcgtgttaacaacctcaccgatttccgcctcgggcataaggcgcgcgttttcacgcacacggtcgtaaataacgatggtatcgttaagcgaatagccgaggatggtaagcaccaccgcaatgtagtttgaatcaagctgcaggcggaagaacacgcaggtgaagaaggtgataaacacatcgaacaccaatgtgcagagcgctgttaacgcggctgaaataccacctatacgcttaaagcggatacctacataaattataaccaaaactgcggttataagcactgccacaaggctctttgcaaagaacgagcctgcaacggtcgggcttaccgagtttgaattgtaaagctcgatcttgttatccttaaacttatcttcaagggtcgttgtgagcttttcctgatcctctgcagaaaccgaatccttaccgacaaggcttatttcaaaggtctttgtgtcgcccgtgagagaggtgctctttgaaacggtgaaggactttttaataacctctttgacggcggcttctatgtccgcgtccttaacatctcccgtgtaggagtaagcaatctttgtgccgccgctgaagttgatatccagctttacgccgaagcccgggataaacataaacactattccggcgagaaaaattacggcgtaaacaataataacctttttgaaattcttaataaaatcgattttattttcacgcatttttctcacctccgtagaactgcggctttctcataacttttagctgcgaaatgctcttaagcatatacttggaggcaagcacacccattatcaggttgaatataacgccgaccaaaagcgtgtagccgaatgaatagatagaaccggtaatcgaagagccgaggagcgacattatcggtgagaacagcttggctataatactatccggcgtaccgaatgcgcccataagcactatggaaacaattacaatggtaacattgccgtcaattatggcgcttaaggcgttcttaaagccactgtctatcgcaccgtcaatcgtcttgcccttcctgaactcatccttaatgcgttcggaggcgataacattacagtcaacgcccacgccgaccgacagaatgatacccgcaatacccggaacggtgagggtaaagctgtccgcattcgggaagaagcccgaaatgcaggcgatgcttcccgcaagctgaccgagcagtgcaagtgacgcaacaacgccgtttacgcggtaaagtactatcataataaggcaaacgataccgaaggctatcgcacccgcgataagcataacgcggagcgcgtcggagccgagcgagggtgagattatctgcagcttgctgtcgtcaaccgtaagcgcaaacggcagagagcccgcatttatcttatccgcaagatcctttgcctctttagagcccgccatgccgtctatgtaggctgtgccgttggttatcgcggtattaacggtcggggcggatatttccgtttcatccatccaaatggatattttactgcccacaagttcttttgtcgccgcagcaaactttgaagagcctgcatcggtgaaatagagataaacgacataagcgccgttttcgttaacgcccgcctcggcgcggtcgatatcctgcgcaccgcttaagatgacatcgtttttatcctcgttgcggcagaaggtaagcaacgcggtctcaccaagctcctgcaccgccgcagcggcgtcgaaatcgctctcgtttgcagcccatgggaatcttacgattatctgatgattgtcattgtcggtataaacctcgtaatcggttatgttcttgtttacaagacgggtctcgataattgcttttgcggcatccatatcgtttgcggtgatatcaacgccttctttatccggcgagaaaacggcttcaacaccgcccctgatatcaataccccagcgaatatcgttcgcacccttaacataaaccttgcgggtatcgccgtagtaattttcaattccgaaaaaggcggtgtaagtaagcgccagaatcagcagaaacaccacgaaaaataccggcttgcctgttcttttggacttcattggcaaatcctccactatatgtgatcaatatgtattatacatataaacgcggacaaagtcaatcgttatatgtaaaatcacctaattttctttgtcggaaagtaatttttccagcgccgcatacctcacggcaagcgccaaaacctccgacgccttctctatttcctcaaccgaggggtaagagggggctattcttatatttgagtccttcggatcggtaccgtaaggataggtcgcaccggcaggagtcaaaatcatgcccgcattcgcgcacagctgctctactctttttgcgcagccctcaagcacataaaggcttataaagtagccgcccttcggagtcgtccagcgggcaacgcctgtatctcccagctgtttttgaagctctttttccaccgtctcaaacttgggacgaagaatcgccgcatgacgcttcatatgcctttcgatatcggaaacggttctgaacatgcgcgcgtgccttaactggttaagcttatcgggccctatggtctgatatttcattctgccctttaagagcgccacattgttggggcttgcagcctcaaccgccacacccgcacccgggaaggttatttttgaagtagatgtgaaaattatgggaagatccgggcttcccgcctttacgcattcgttgtatatattaaggagcgtgtccccttcgtcgtacaaatcatgcaccgcataggcgttatcccaaaaaattcggaaatcccccgccgctggcttcatgtgcgccatacggcgaacgacattatcggaataggttatcccctcggggtttgaatacttcggaacgcaccaaatgcccttgacagaaggatccttgataagctcatcgacctcatccatattcgggccctcatcattcatcccgacgggaatcagctcaaagccgaaatattcggttattgcaaagtggcggtcatatcccggaacgggacacaaaaatttaagctttccctgcttcatccaaggctcgccgcccatgccgtgggtcattgcctgggcgatggtgtcgaacatcatattaagcgaggagttgcctcccacaattatctgatcgggattaagccccaaaatttcaccgaaaaggtttttaagctctgcgagtccgtcaagccctccgtaatttcggcagtcaattccgcttatatttttaaagccggtgtcgttgcccacaaggtcgaacattttctcacttaaatccatattgtcaaagccgggcttgcctcgcgacatatcaagcgacaaatgcatgctgcgcatatgctcgtactctgcgcgcactgccttaagctcgtctgtcagctcgtttcggctcatattcaaataatctgacattaacttcacctcataactaattaattataatatctgtgcgcctttttttcaagtaataaagcataaaaaatcaattttttacatttcctacaaaaatatacggttcggtttattcttgacaaacactgtatatatgcattattatatattaaaggatgtgtgtaatttgagtaaaaaaaatttgattatattaatttcatcgattgccgcgggactgattctcttggtcgcgctcggaatatggctgacgggcgttttcaaatcggacggcggcacaaaaaacaaaggcggagctcctactgtatctgttggctctgtttcggcggagccgggcaaaaatattaaaattcccgtaagcttcacaggtaaccccggtgcaatgggctttcttatcgattttgaatatgacgcgaacgctcttgaatatttgagcacagacaagggcgagctgcttaccgactgcacggcagcggaagcaggcagcggaaagatcaggcttgtaagcgttgaggataaggatcttcaaaaggacggcgttttagcgtatctgaatttcaaaataaagaacggcgcttcgggcaaaaccgaaatcaaggtcatctgcggcgaaaatgccgtctgcaattacgatgagcaggcgatctccgttaaaaccgaaaacggtacggtcacggtcaaatagacctcagcgcacagattatatgtacacaaaagcacctcgctgccgacagggcagcgag

SEQ ID NO: 1103 - DNA, 21350 bp, Unknown
  16S sequences of unknown bacteria
ttcgaatcccagaaatcctctaaccgccgtgatcaccggcatatatgccccgaagatcagaagaagtgtcgaaccggaaatccccgggagaaacatggcggatatggcaatcataccggtaaagaacagtctgattcccagtccgacggaaaactggcttaaatccatagccgatgccgcagtatgcccgttcagccatacaatccacacgacggccgcggttcccagaatgaaaaagaacattcccttttttacttcccgcagactctccttttcctctttcacaatcagaggaatggacccggcgataaatccgataaacagcgagctgactgtgtaaatgtggttctcgaaaagcgcggataaggccagaaccgccagaatcattcccgccgcccagccgacgcccaattttgccagataaccggccgctgtttttttctctctcacttttccaaatgcaatattgtggaccgcaccgataaacttatcgtaaaagcccatgataaaagctaccgttccgccggatactcccggcacgctgtctgccagcgccatacaaaatccgttgataccttctttcaacatagaaaaaacctcctgtccgttttctgaggttatcttagcaacccgcgctaaacagacagaaggtaattttctaaacaagtcctaaacaatatttaatcgatatcccgcaccccatacggtctcgagaattttgggatttttgctgtcatcttcgattttttcccggatgcggttgatgtgcaccatgacagtagcgctgtcgctcacataatcatacccccagatcttctcaaaaagctgctctttcgaaaacacgatattaggattcatcgcgaaaaatctcaaaagttcgaattcgcgattcggaaatttgatctctctgtctcctttgtaaactttccagctgtttacgagaatcctcaaatctccgatccgaatttcctccgccgcctcctctttctttgcgggatgtctggccatgacccgttcgtacagcctgaggttcgcgtggaccctcgccaccagttccgccggatcaaacggttttgcgatataatcgtcagcgcccagccccagcccccgtattttgtctacagactctgtcctcgccgtgaccatgagaatgggaatatccacttcctcccgtatttctctgcatacctcatagccgtttttgcccggaagcatcagatccagcaaaatcaggtcaaaagattcctgtttcagccggcttaaaaccgctttcccgtccgaaagaatctccgtatgaaaccccgccgcctcaagataagcctcttctatcatactgatgtcttcatcatcttctacgatcagcactttttttccttccgccatctcacgattctcctttcctgagttccatggagaccacaaagccgccggcattctccgcccgcacgcggcctcccatcgcttcgatcagatacctgacgatatacagacccagtccgtttccttcctgcttgtttctcgattcatccgcccggtaaaactcgtcaaagacagcgtccagtttctcctccggcacgccgacgccgttatcggaaaaacgaatgcaatatcccttttctgtcatactcagagcgagcttaattttcagaggcacggtttctgcatattttctgctgttttccagaagattgtcaaacactctctgaagctgctgcggatccgctgccgcagctcctgcacagccgccggtttctgcggagatttcgattccttcctcttccagaatctcctgtttggccgcagcgtagcttttgataaatgagaccggatcgatattctcaatatgcagcggcatatttccggtttccagctttgagacataaaacagctgatccagcaacacgttcatctcgctcgttctgcgataagccgtcctgaggaacttgtcccggagttcgggttctgtcacgacgccgtcgatcagcccctttatcgtccctctgacggcagtcagcggcgttctcagatcatgagaaatacccgcgatcatgtcccgcctcgcctcttcatattttcggtttttttcctgttccctgaggatatgcgcctgcattccgttaaacgcgccgcagatcgtctcaaactccgtatcgcccgcatagatgatatcctcagtcaatacgtcgctttgaatccgctccgctcccgcttccagagcgctcagcggcttcatgatatgccgtacgagatttcccgtgaaaacggaactgacaaagatccataccccgatgcagaaaatgacgtccgccagaagcagaagaaaaaaggaatgctgatgaacggtccactgttctatcatgtgttccacgctctttgctccggctatggtctgcagagaagcttcccattcgtgttcgatggattcccagtatatttttaccacacccagattgatcacgaaaaataaaatcagcgtgaccacgatcatcagagtattcgaaataaagattctcctcttcactgttctttttttcatttcacctgttctctttcctgtttttcgaaagaagcggcatctatcctgccagtctttctttttggacaaaacttgcctttggacttctctgaagctctcctttaagcaacatgccggaaaccttcagaatatatccgcagtccgcctcacagccgccggcatggcgcaggtattcctcgtgcagattttctatatcctgaaatcttcggatccgctgcagatctccgctgtccgtcccctgtcttcgcaatgcggaaacaaattcgcagtgaagctcttgttcatatctgcagtgctgcagaagactgccctgaaaaattctgttgtgcgggtaggtaaacgcgtcggctacataatgcgtcagttttccgagccgatagtaatctctgatccccagcttatctttcgactgcggggattcgaaaagttttctcatcaccggcaaaatattctcatagttatgtccgtgaaatttttctcccttcgtgataccgtgcaaataagtaaaaggctttctgtcgggctccagactgcccaggataaacatcctccgataaaaaaatgacatacttcgtcccatcttgtcaatcagaaaaacggcaagtatcctgtgatctcgcaattgcatatctctatcctcctgtttgtcgatcaatacggtccggctgtctgtcataaattttcctcctatgagatccgcaaaaacacgctttctgttctcccatgcaaaatcatcacaggcccgaatattctcaaaccattccgtatcgtaagatttacctttgatttctacaggataaaacggaactctaaattacagagataaaggatttaaacttttcctaaacaatccccagtcttttggccaaaaaataaaaaagacgcggagattcttttctctccgcgccctgcaggcagaacggccgatctgccgctgcccgcatctcgtcctgcttgaccaatcaccgcagtttcatgccgttatcatcgccggaccgttttttacagatccttgagatcttctttcgtcacgccgccgaaagcatgcgcttcttccggaaacgctcccgacttgacttcagcgatatattggccgatgcctgcagcgatctcgctgccgatctctttatataccttgacaaatttcggaacgaatttatcaaacagacccagcaaatcgtgatataccagcacctgtccgtccgtcccgctgcctgcgccgataccgatggtaggaacatcaagcctctggctgatcagtgcggaaagttccgcaggaacacattccagtacgatcataaaagcgccggcttcctgaactgccagggcgtccgccaaaacctctcccgcagcttcacctttgccctgcactttgaatccgcccagcttagatgtagtctgcggcgtcaggccgatatgtcccacgacaggaatccccgcatcgaccaccgccctgatgatcggcgccatgctgacgccgccttcgatcttcactgcgtcgcaccggccttccttcatgattctcgtagcgtgctcgatagcagtcgccgcggaagaacaggagccgaaaggcatatctgtcacgacgaaagtatccggcgcgcctgcgataaccgctttggtatggtgaatcatgacgtcggtcgtcgcagcgatcgtcgaactgtccccgagcattaccatctgaagggaatctcctaccagtatcgtatcgatgcccgctttctgcgcgagagtcgccgacgaataatcatacgccgtgatcatcgtaatcttttcaccgttttctttcatcgacttcaaagagagagttgtttttttcgccatttgtgttacctccatggtatgacgccggctctccggctgtcatcaataataattcctatatctgctgaactgaaatcagccttttatgctcaattccgcggactccaccagatggcggaggagaatggcggaagtcaccgttccgattcctcctggaaccggagtgatggctgagacgatatctctgacctcatcgaagtccatatcgccgcacattccttcttccgtgaaattaatgcctacatctatgacagtcatgtcagaagagacatattccctgccgaaatatttcggtcttcccacgcccgccaccagaatatccgccttagacgtaatctccggcagattctccgaacgggaatggcagacagttaccgttgcatgttcgttcagaaacagcatggacagcggtttgccgagaacgagactgcggttgacgatcgtcacattttttccccggatctcgtatccgtagaatttcagagtctcaatcaccgcctccggcgtacagggagctaccgcggaagtatctcccgtaaaaattttcctgagattttccgggttcatacagtcgatatctttgcggggatttaccgccgaacccgcctccccgtcgccgatctgctccggcagcggccggagcaccagaatgccgtgcaccgcggaatcctctgaaaatccgcgaagagcccgcaaaaatacatcgtgggacacatcctgaggaaagacagccgtctttacatcgatgtgaacttccccgcagtttttgatcactcttttttcgtaagcgatatcgtcttcccgctcccccgcccgcaggatcatgagaagcggcaaaatacctttctctttcaatttcagagctctgtccgccacgtcggctttgaccgcatcggctaccggttttcccttcaaaatttctgtcatacttatcagatatcctcactcgttctttacagatttgagcccgcaggcctactgagaacaggctttctccactctcgcataagtgatctccgcaagatgaacgccggaatctgtaatcgcgtcgagtttatcggacaattcctttctcttttcttcatccttcataagtttgagattgatgagcacatttaatctggcgcccttcagcgctgcgaggcagatcgccgctcccgtgccggcatcgctgacagccagtctgcttccgatcagtgaaaaactgtccaggatccgcagagccttcagacaggtctccgcgatctcaagaggagcctgcgccgcagcgatcagagcctcctgcactgcctgttcctgagcccgcgcttcttccggcgtagatttcggcatccgataggccgccgccagcggcagaaacgcctccgcatctttcgtcaccagctcgtcaaatttctgaatcagctcctgagaacgaaaaatcaggtttgaaatttccgcctcatgctcggcgtatttcttctttccgacggtcagttcgcccaccatcgcacccagcgcgatccctacggcgccggccagcgcggacgcgccgccgccgccgggtaccggttctctggaagccagaacgtcgatgaattctctgcatgtccggttaagcataatcgtttctctccttaagatttcccgaccggttaaaataatccgctgatctttccggtactgtccacgtcgatattctccgcagcgggaatcttcggcagacccggcatagtcatgatatctcctgccagagctacgacgaagcccgcgcccgctgacaccttcgcgctgcggatgctgattctaaatccggacggtctgcccagtttcttcgcatcgtcggagagagaatactgcgtcttagcgatacataccggcagattcctgaatccgagagattcaatcgtatcgatttccgccgcggatttgccgatgaaatccacgccgtcagcgccgtatattttctttgcaatcgcttcgatcttttctctgatggagagagaatcgtcgtaggagaatgtgaagtcgctcttatcttcttcgatgagacgcacgacttcttccgccagagccacgccgccttcgccgcctttgccccagacttccgtcagttttacgtttacgccgatctctttgcacttatcttcgataaacttcagttccgcttcagtatcggtagggaaacgattgatagctaccaccgtcgacatgccgtatacattctgcatattttccacatgcttcagcaggttttcgattcccttttcgatagcaggaacattttcattatttaaatctgtcttaggaacgccgccgtggagcttcagagctcttgcggtagccactacgacgacagcgtccggctttaatccgctctgtctgcatttgatatccaggaacttctccgcacccagatccgcaccgaaaccggcttccgtcaccacataatcgcctaacttcagagcgatcttcgtcgccatcacactgttgcatccgtgagcgatattagcgaaaggtccgccgtgaacgaacgccggggtatgctccagcgtctgtaccagattcggcttcagagcgtctttcatgagagctgccacagcaccctgagctttgatatccgccgcggtgaccggctgaccctcccggtcgtaagctacgataattctgcccactctcgccttcagatcatcgatatcgctggccagacataaaatcgccatgatttccgaagccacgctgatatcgaatccgtcttctctcggcacaccgtttgccttgccgcccagtccatttacgataaaacgaagctgtctgtcgttcatatcgagacatctcttccacacgactcttcttacgtctacattcagccgattgccctgctgaatatgattgtccagcatagcggcgatgagattgtttgcggtagttaccgcatgtatgtcaccggtaaaatgcaggttgatgtcttccatagggatcagctgcgcgtagccgccgcctgcagcgccgccctttactccgaataccggacccagagaaggctctctcagcgcgattaccgtgttttttccgatctttttcagcgcgtctcccagacctactgagacggttgtcttgccttcgcctgcaggtgtcggattgatggctgtaacgagaatgagctttccgttttctctgtctttcatgtcgttcaggatgttgtaatccaccttcgccttatactttccgtataattcgaggtagtcttcactcacacccgcaatcttcgctatctcgttgatgtgcataagttctgcttcctgagcgatttcgatgtctgatttaaatcccattggctttctcctttgcttcataaaaaatagagtgaaattatcatgtttccctgccccgaagacggggtcacgtcaacatcatttgtgttttccaatccgcgcctggtgatttcacagagtatgacttcgctgaccgcgacttcatatgcgcgtattgttttctgcccgtgaagggataccggtgcctctccgcccctcactgctgtcaaatctttccccggcagttcctttcgccgcccgtacaggcgcagcgaattctctgccttttcggtttgaatttataataaaaaaagtatcccaaaatgccgtccggccactaattcactccctatcatatgataggtgggtattctgtccggcacatcgaatcttcccccggccgaagcggagggcatggctctgaatgacggaacgcgaattcccgtgaacgtattgtaggttaaattacatgaccataacgcacatcctaggatacttcttttattctactcttataatacaatttatatgagccgttgacaactgaaaaattgcaatccggctaaagccgggcaatttctgtatgggaactgcgtattttacacagcttcaactgtatcgcaaaatacggcagcgaagctcataatatgagcggaggaagacggcttctgccgtctgttgcgcgccgcagcttgctgcaggcagctcccgactgaaaattcaaatcggtgcaaactccggtagactggcctgtttaaagagtatactccccttttatacagcgccggtctttttcatcaatcctccagatcgagactgcagtttgtcgtgactttctgaacgtcgtcgttatcttccagatctgcgatcattttcttcagcgctttgatgtcggattcctccgtcggtgtggattccatcgaagggagatattcgatatccgcctccacaaattcatatcccgcttctctgagagcgctgctcaccgcgttaaaatcttctaccgaagtgtatatttcgtaggaatcctcgaggacctgcatgtcttccattcccgcttccataccgacttccatgagagcgtcttcatccaccgcatctgttttttcgatgataatcagaccttttctctcgaacatgtaggatacacatcccggtttgccgagatttccgttatatttgtcaaaagcatgcttcacaaaagctgtggttctgttattgttatccgtgagcacatcgacgataacagctacaccgccggctccgtaaccttcgaaagaaccttccacaagaagttcaccgtccagttcgccggttccttttttgatcgctttctgaatcttgtcgttcggcatattgatgccttttgcccggtcaatcgcatgcttgagagccacgttatagtcgggatctccgcctgccttggcggcgatcgtgattacacgggcgtatttcgtaaagttagctgctctctttgcatcctgtgcagcctttctgccggcaatcgtaccatgtctgcccattctgtcttccatctccttcaatcaatatatttgaaaataccaacgaaaaaccgcgcatctcttttcagccctgaaaagagatgcttcagactttcgttttattataattcccggaagaagtatagcacatttgctgtctgagttcaatgtgtgaatcgtttgtcagctcatatattctctgattttacgatctgccgccgtaaaaataccgggaaagttccgaaaaacttcgaaaaatataaatgatatcgccgtaaatcggctgaatatttccgaaacttcaaatttttatcgtcatattttgtcgctaatttttcatggagtggatcggcgcagggattctgccgcctctggcgacaaagtcctcacagctgtacctgctcaccggcatcaccggcgccgtacccagcagaccgcccatttcgatgctgtcgcccacgtcttttccgatgacaggaatgattctcaccgccgtggtcttattgttgatcacgccgatggcagcttcatccgcgatgattccggagatcgtcgcaggagtcgtcgttcccggaacagcgatcatatccagacctacggagcagacacatgtcatggcttccagtttttcgatggagagtgcgccggaatttaccgcggcgatcatgccttcatcctcactgacaggaataaacgcgccgctgagaccgcccacatgagaagacgccataacgccgccctttttcaccgcgtcgttgagcatggccagggccgcggtggtgcccggagcgccgcagacctccaagccgatttcttccagcactctggcgatgctgtcgcccaccgccggcgtcggagccagagaaagatctacgataccgaaaggcatgtccagtcttctggaagcttcgctggcgaccagcatgcccatcctcgtaactttgaaagcagcttttttgatcgtatcggcaaccacatcgaaaggctgacccttacaggcttccagcgccacttttacgacgccgggaccgctgacgcccacgttgatgacagtatctggctcgcccactccgtgaaaagctcccgccataaacggattgtcttccaccgcattagcaaatactaccagtttggcacagccgatgctgtcctgatccgccgtcagttccgccgtcttaacgatagtctcgcccatcagtttcaccgcgtccatattgatgccgctcttcgtggaaccgacatttaccgaagagcagacgaattctgtctctttcagggcttccggaatcgattcgatcagaatccggtctcccttggtgaaacctttctgcaccagagcggaaaatccgccgatgaaatttacaccggtctctcttgcggcgcgatccatcattttggcgaattctacatagctgtcatccgtactggaaccggccgcgatagacatcggagtcacggaaattctcttgtgaatgatgggaataccgtactccttttcgatgctctcccaagttctccgccttctgagtgattttatcgtacattctctgtctcgcgatctcaccgttggagtgagcgcagtcgagaagagaaattcccatggttatggttctgcagtccagcttttccttctcgaacatgttcagagtgctgagtatcttgtctacgtttatcacggaagccctcctaaatttcattcatggcattgaaaatgccctcgtgctggattttgatggacatgccgatttcttttcccttttcttcaagcttcttctgaagttcctcaaaggataccggcgttttggaagtatccaccaccatcatcatggtaaacacatcctgcataatcgtctggttgatatccaggatattgacatcatactccgtcaaaacggatgtcacctgatggatgatgccgattttgtcctgaccgattacggtaatcactgctttcatattcatttttctccttttttctttttttccagattggcatgagcggtagccatcatcagtttgatccggttcagctgattgacgtcgctggcgccgggatcatagtcgatcgccgcgatgttggaaagtgggttgtgttttctcagcggttttatcatacccttgccggtgacgtggttcggcaggcaggcgaaaggctgaagacacacgatattttccacgccgctgtccagcagttctgtcatctcgccggccagcagccagccttcgccgcactgggttcccagagatgtgacggtttccgccttttccgcgatcttatcgatatgcatgggcggctcgaaacgcctgctggcgattaattctttcgaaatcacgtcgcggtaccgatagatcagtttcattccgattctggaaatcatgtgcatggaataacttcccgccatcttttcgtaattgaagtcgttatttttcaggcagtacatgaagaaatccagcagatccggcacgacagcttctccgccttcactttcgatgatacccacgatgtcgttgttggcattgggatggtatttcacgagaatctcgcccactacgccgactttcggtttttcgacgtttaacagaggaatctcatcaaactccttaacgatctgtttcacattctttttaaactgcgaaaaactgcggtcgatcacatttttccgggcgatttcattccatttccgatacagcttttccacgctgcccggttccgcttcatacggccgggtggcgttggtgacgcgcatgaaaagatccccgtacagcacagcgtacagcaccccgaagatcagcttcggcgtaaatttcagtcccgggtttttttccagtcccacatagttgactgagaccactggaatctgttccattcccatctccttcagagctttccggagcagagcgatgtagttgcttgctctgcatccgccgccggtctgcgacatgatgaccgccgtacggtccggatcgaagtctccggactgaagggcgctgatgatctgccccagagaaacgatggtcggatagcaggcgtcgttatttatgtaccgaagacccagatccaccgcatttttatcgaccgcgggcaggacgaccgcgttataaccgccttcccggaaagccgtctccaggagatcgaactgcatcggcgccatctgcgggataataatagtataatctttcgccatctgttccgtaaagatgacacgctcaaaattatcgatttcacctttatgttcgatttcgtgctcttttctctcgtcgatggccgctttcagcgagcggatacggatgcgcgccgcccccagattagagccttcgtcgatcttcagaacggtatataatttattatgcgccgacagaatctcttccacctgatcggtggttacagcgtcgagaccgcaaccgaaagaattgagctgaatcagatcaatgtcgtcccgcgtccccgcgaaatcagcagcccgatacagtctcgtatggtacatccactgatccagcacgcggatcggccggttgatgtgatctctgtgagctacagaggactccgtcagcactgcaaaaccgaaagaagaaatcacctggtcgatgccgtggttgatctccggatccagatggtaaggtcttcccgccagaatgatggcattcttgtcattttgttcgatataatcgatgatttcatccgcttttttccgaatatcttctttaaatgcctcatcttccgctctggcggccgccacggcggtcttcacttcagaagcccggacacccatgcccgccagctcttcggtcagacgctgcaccagacgcttgtcatcataatacggcagaaacggatggatcagctccactcccccggcttccagttcatcgtccatattgccggcgataacctccggatacatggctacgatcgggcagttataatgattgtttgccccctcgtcctcgacgagctcataattaatgctcggatagaaaatccgctttacgccggattcgatgagcgctttgatatggccgtgcaccagcttcgccggataacacgccgtatcggaggaaatcgtatccatccccttctcatatatttcttttgaggacgccggagaaagctccacccggaatcccagtttcgtaaaaaaagtaaaccagaacgggtaattttcgtacatattcagaactctcggcataccgatgacgccccggtgcgcttccgcctcgctgaggggcacgtagctgaataatctttcatatttataacggaagagattcagttcgtctccggcgctcctgctgtgaccggcgccccgctcacagcggtttcccgtaatgaagcggctgccgtcgttaaaccggctgatggtcagctgacagttattttcacacagaccgcagcgggtatgcatattggtcatggagaaatgatccagaccttcccggctgacgatgccggaaggcgtctttccgtcaaatctttcaataccgatcagcgcggcgccgtatgcgcccatattgccggcgatatccggacggatcacatccttgccgagaatcatctcgatgctccggagaatcgcgtcgttgagaaacgtaccgccctgaacgacgatatgttctcccgcctcggatacgtcgcggagctttatcaccttatagagggcatttttaatgacagaatacgacagccctgcggagatatctccgatggtcgccccttctttctgcgcctgttttaccttggaattcataaagacggtacagcgggtgcccagatccaccggttcccgggagtggatcgcttcctctgcaaaatccgaaacgctcatatccaccgacttggcgtaagtctcgataaaagatccgcagccggaagagcatgcttcgttgagcataatattatagatcgcaccgtctttgatcttgatacatttcatgtcctgtccgccgatgtccaggataaaatccacatccggcaggaaggatctggccgccttataatgagcgatggtctcaatctcaccgtagtcggcgccgaaagccgccttgatgagatgttcgccgtagcccgtggtgacggtataggcgataaacatatcctcatgcatttttgagtaaatgtccttcaaaagaattttcgacgtctccaccgggctgccttcgttgtttctgtaaaaagtatagatcagatttccttctatgtctgtcagcgccgccttggtcgtcgtagaacctgcatcgataccgagaaacaccggaccggaaacctgagaaaaatcttttctcggaacgcggtgctgactgtgacgccgagagaattccctgtagtctccgtcgtcttcaaacagagccggaagatatttcgtatccgtgctctcagtccctccgggttcattgatcctctgaatcagcgtatccagatccgcagcaggatatttctccgacatcagcgctgctcccaccgctacgtagtactgagaatcctctggaaagatcacctgatcctccgccagacccagagtttcgataaaacgccggcgaagttccgacaggaaggacagaggtccccccaggaaagccacattgccgcggatcaccctgccgcacgccagaccgctgatcgtctggttcaccaccgcctgaaagatcgataccgccagatcttcatgagacgcgccttcgttgatcagcggctgaatatcggtctttgcgaacacgccgcagcgcgccgcgatgggatagatcgtctgatatgatttcgccagctcattgagaccggaagcatccgtattgagcagcacagccatctgatcgataaacgcgccggttcctcctgcacaggtaccgttcatcctctgttcgatcgttccttcataaaatgtaatcttggcatcctccccgcccagttcgataacgacgtcggtctgaggaatcatctccgtcacagcggccgaacatgtcaccacttcctgttcgaaaggaatctgcagcttattggacagagaaaggccgccggaaccggtgatcgtcacatgaaattcaccttcatattctttcctgaaatccgtcagcagttccgccaccttgtcaaatacgctggacatatggcgttcgtaacgcttatacaatatcttattttcatcatcgagcaataccagttttactgtcgtagaccctacatcgattcctaatttcattctctataagtcctcctgaaagaagatgacattttagggaaattcctcatcatcctattcttcccccataagtctcgcttcaaaaagaacggtgtgaagaccggtcacagtcagctcagcgatccgttctgcgctccagcccggcagatccgccgctctctttgccgcctcgctgtccacatgttccgtgaaagaagcgtcttcgaattttccatgacgtacaccgcaccggtatccatgatgattccgtccggatccccttcgagcgccgctgtcacaagttccgtcatctcacccgcagcatacggaattattccatcacggtctccggcttttcatctgcgtactcatacatccacagcccgccgcggcgcggataaagtctccgtcgcagcttgccgttttcataatctcttcagtctgcggcagtgcgcttcgggacattcctgacaatgtaagccgtaaagaaaacctgaaagttccgcaatagatcgcccgcctgcactctgcttaccggaaagaacaaatgctactcctcatctgaaaaaatatcttatctaatagaaaatacccgaaaatatctgaccctaccattttaaaaccatgttccaaaaccattttatctatcttttcataaatcccgcggagacagattccttcccgcctacttcgcgttttcaacggaaacccgctgtctgactgaatcagcggcatcaccgctatgttataaaatcaaacaaaaagaacggacacctccgcgaggttcgtccgctcttgcacatgccgtcagtcgagatcgatatcgtcgagaatcgcctcgatatcatcgctgtcagaaacgcccgcatctactacttcaatatcatcgacgttcgccgcgcctacagcgtctttttccttttcgagagacgcgatttccgcatagaccacatcaatttccgaacaaatcgtccttaccttatcgtcgatttcctgaccgctcttgaactgctgataaatatattttccaagttcgaatttcagagttttcgcatctctttctttcttcttgatatccatggaaatttttcccgtctcaaccagttctccggatttctgggcgacagacttgccgatatcgcttaatttgtctaaaaatgccatgagccaacctcctttgatgtcttttcataattcagaggaatctgccgctgaaaagatacggcgcattccggtcccgcaagggatctcttcttcaaatcggacaaaaactccggcagtttcccctgccgggcgcacgaatgatttcaacacagcgcgcagacacatctgctcctccgaatctccgtatgagacctgcgattttcatcgagactcgcggatgaaatccgccgcctccggaaacggaaggtatcggcgccgcatcatatataatatactactatattcatcaaaaaaatcaatgtgagcaaacctgtaagccgagttctgtattaaacaatcatctttctagacgcgccgtcgccggcgcgttcgagcgacctacctaccgggcagcgacgggcagccgctttttatgccctttcttggtcttgctccaggtggggtttacacggacgcgcgccgttaccggcgcgccggtgagctcttacctcgccttttcacccttaccgctgattcagcggcggtaattttctgttgcactttccttgaagtcaccttcaccggacgttatccggcacctctgccctgcggagctcggactttcctcatcttataccgcgaattgtagccggcagacgccgggcaatctctgtttcgatacggatgcgattgtctggcttactcacattctgatctctgtattttttctgaagatcccagccttcttcaccgccgcttatcttcacggaacggtgcagaccgcgggaatttccatctcttttacaaataaaacactcaaaatagtttaaaaggattgagatccgtcttcgcctccaagatctccacttccggaggacacagatctctcagctggccggcaaaattcggcgtaaaaatattttccgttccgaaatgacctgcgtcgaccacacacagccctgtttcgcaagctgtccttgcatcatgatacttcacatctccggtgatgtaaacatcggagccgttttctttcgcctgcgcggcaaattccgcaccagctcctgtacaaagggagactctcgaaataaattccggacatctgccggaaacccgaaagatattttcatcacagacttctttcagacactcggcaaatctcccgaaggaaagaggttcgggaaaaattcccgtgcggcccataccgcagccctcttcagctgccggtttcatcggaacgattttcgtcagtccaagctgttccgccagatactgattcgttcctctcttcgcggaatcaaaggacgtgtgagcggaatacaccgagattcccgcctgaatcagacgaagaatatagtgtcccgtaatatgattatcgtctactgaatcaatcttcccgaaaatcatcggatgatgtgtcacaatcaggtcagctcctgcggaaatcgcctcggtgacgagttcgtcggagacttcgagacttacgaggatctttcggatctgctgatctgccgaacagcggatctgaaaaccgcagttatcccattcctccgccagatgcggcggagcgatctgccggattgcctcttcaatcctgccgatatctgccatttttatctcctttctgaaacatctctccgacgcagtcttcgatgcgccggaaagcgccgagtcgctctctgctctccttcagccgttttaaggaagccgcagagattccactgtcctcaattctgcggatgatctgttcttcggaacggatttttttctgcagaaacctcatcgcataaggaacgccatccgtaaaatacgaaagcggcagttcgtatgcgacagcttccgacacatccgctctgcgccgcagttcttccgcagcatcgatccgatcctgccggatgcccaagagagtcccgcggtcaccggcgacagaaacgcgcggcgactcttctgaatcgcattcctccgacgattcaccgtcttgaaaaaacagatctgctgctttgtctccgccggctaacgcattttccacaacgataatctcgcacagacgcccatcctcttccgccagcagttctctgcttatcacgaattccggcgtctgcgccgcccaccgccgcaaaagctccggatgatttctcggctgaaggataaaacgggagatggagaacgtcttttcaggattatccagaagaatattcaaaatcagattaccgcccattcccgcgatgataaccgtatccgcatcccccggatccaggacggaaataccgctgccctgccggagatcaaaaggaaaatccggcagatagttctgtatattttcctgagctttcctcagaggcccgcggttgatatctgagagaatcaccctgcggcatcttttattgcaggcgagccagataggcaagtaaccgtgatccgatatcggctgcagcggcgccttctgcaacagcgtctgccatcatctgcagtctttctgataacttcagctccatatttttactcaagataatccttcaacttcttgctgcggctcggatggcgaagtttgcgcagcgctttcgcctcgatctgacggatgcgttctctcgtcacttcaaatcgccgtcctacttcctcgagagtgcgtgcgcgtccgtcttccagaccgaatcgcaacttcagaactttctgttctctctcggtcaatgtatccagcacttccaccagttgttctttcagcatcgagaaagctgcggcgtctgccggagcaggcacatcgtcgtccggaataaagtcgcccagatggctgtcttcttcttctccgatcggtgtttccagcgataccggctcctgcgcgatcttgagaatttctctcaccttttctacggagatttccatctccgccgcgatttcctccggcgtcggctctcttcccagttcctgcagaagctggcgagaaatacggatcagtttattgatcgtctccaccatatgcacgggaattcggatcgttctcgcctgatcggcgatagatctcgtgatcgcctggcgaatccaccaggttgcataggtgctgaacttatatccttttctccaatcgaacttgtccaccgctttgataagaccgagatttccttcttggatcagatccaaaaagagcatgcctcttcccacatatctctttgcaatgctgacgaccaggcgcaaattggcttcgcagagttttttcttggcttcctcatctccgagttccattctcttcgccagctcgatctcttcttctgccgtcagaagaggaactttgccgatctccttcagatacattctcaccggatcgtctaccgcgatccccttcgaaagggacgcttccagatcctcctcgctctcttcgccgatatcgtgatctatatctttatcttcttccaatttttttaattcaaaatcttcaggatctgcttcggaaacgatttcgattccgttggatatcagagtatcatagatctcatccatctgatccttgtcgaattcgatatgatccacctgatcagagatatccttatatgtcagattcccctttgtctttcccttttccaggagaacagacagacactccgccttacgctgttccatattgtttacttcgttttccatcgtcagccactccatatcatagttttctcattttacattgtcatctgcagttccatcagctcttttgtcagagcgtcagctctctctctgtcttcgtcttcttcgccgagaaatgccaagacatccagaatttcttcctggcgcttcttcagctgctgcgttcggatcgtcgcaatgcactcctgaagcacctgatcgctgttttccgggaaaatgattttctccagagcttcccgaaacagaacgtcgtcttccggaagaagactgtcagacaccttattgatatctacctcagaatcttcgagataaacattttttatcatctgataaatcctgtaataagcgggatcttcgaatacgaactcatattgtccgatctgcggaagatagtccggattgaccgacgtcagcttaatcagatgcatctggagaactttatccccgtccgtatctctgacacgctctttttctctccggtaatcgcggcgcgccggtgccggctgtctctgccggccgctctcctgcgcttcgttgacttccctgcgaatagcactttcggaaatccgggtgtcttctgcgatcttttttatgtaaatatccgcctccaccggactcataccggacagcatatcgcgagcttccttcagaaatccgatacttccttcggaagtcgtgatatcgtatctgcttctggcggcggcaatcctgtattccgcataaggaagagcccggtccaccagtgcccgaaatgcctgcggaccgttttttgtaataaactcgtccggatctttcccatcggatatatgcagtacttttgccgcaatccccgcttttctcagaagctcgattccccgcagcgcggccttctgccctgcagaatccgcatcataagcgaggaccacattttcggtatatcttttgagaagcgaacactgctgctcagtcaacgcggtccccaacgaggccgctacatttgtaatgccatgacggtacagggagacgaggtccatatatccttccacgagaatggcacagttactgccgttaatgtccttgcgggtcaggttgagaccgtacagattgtttttcttcgaaaatacgctggactccggagaattcagatacttcggtcctccgtccgccagagctctgcctccgaagccgatgacttttcctctcgtgttaaaaatcggaaacatcactcgattccggaatttatcgaaagttctgccttttgatctggacacga

SEQ ID NO: 1104 - DNA, 1638 bp, Unknown
  16S sequences of unknown bacteria
aaaaattagatggatctgatgggcggcgtgtaccgcatcaatccgctggagcccaagtgctgggatgacggcagtggcccggaggacagggaccacatgcagcggaaatcctcgctgccctcgttcttgatttcataggtgaccctgactccgccgttttctccttcagacacggtttttttatagccgtagagcagctcgtcggagtgataatatgtggaaaatccgccgtcaaaaaactcggtcttgtgcgccacgcggcagacctctccgtgacaggggtattcctttccgccgcgctcgccctctttaaatgtcattgggtcgatggtggggaacatatcgtcgcagcccgaaacgtcgccctcgatatagctgccgccgaggaactggggcttaaaatcgggatccttgtcaagagccatgaattcggtgccagtttccttgtcgattaccgactgcatacggcagccgttttgcggcaaaaatttaaccttgattttttcggtttcgcattcgattgcggcgacatttttataggtcgtttcggttattttcatattatatctccttttcagctgattccgccgttcgaaacggtggaaaaaagctttttgatttgaattttaaggtcattgttttttggctttgaaagggaagggtcgtcccttaaaatatccttcgcggcggccgccgaaagagcgaccaaccccgaatcggtggtcaaatcggcgattttaaaaatgggaagtccgtgctgtcttgaaccgaaaaagtcgccgggtcctctcattttaaggtcctcgtcggcaattttaaagccgtcgcaggtcttgcacataatatccatgcgccgctttgccgtttcgccctttgaatcgcatatgagaatacaggtggatttgtccttgccgcgtcccacccgtccgcggagctgatgaagctgggaaagtccgaaacggtcggcgttttctattatcataataacggcgtttggcacgtcgactcccacctcgaccacggtggtggaaatgagcagctgaatttttcccgaggaaaaattcctcataacggcgtccttttccttgggcttcattttgccgtgcaaaaggccgacggtgtatcccgaaaactcgttttttgaaagctcgccgtacagcttttcggccgaaagcagcgtgccgccgtcgccttcttccacgagagggcagattatatacccctgatttccgccgtcaaggtgtcggcggacataggcataagcgcgtgggtgaagtgcggagcttaccgaataggtttcaacgggggttcgccccgggggcatttcgtcaagcaccgaaaggtcgagatcgccgtaaattataagggcaagactccttggaatgggggtggccgacatgacaagcagatgaggattttcacccttttcggtcaggcttgagcgctgcttgactccgaaacggtgctgttcgtcggttatgacaagcccgagatttttaaaggtaacgccctgctgaatgagggcgtgggtcccgatgacaaggtctgttttgccgctttttaggtcggcataaatttcggcttttgtcttttttgtcagcgagccggtgagaagggcgatgttcatgtcctccccga

SEQ ID NO: 1105 - DNA, 32759 bp, Unknown
  16S sequences of unknown bacteria
gtcttggttctatgcggtgtctttcattaaaatccactcactttggggttgaccctttttataaagagccgcacgctgttttagcgaatgacgcgcgcgcccgccgaagtttccgcaaggcgcttgacctcctccaagcgcgccgttgatgtgtctccgggagtcgtcatcgcaagcgccccgtgcgccgcgccgtagtcgaccgcaagctgcgggtcgccaagctccatcattccgtatatgaagcccgacgcaaaactgtcgccgcctccaacgcgatcgaatatctcaagattttcgcgctttttggactcgtagaaatttccgccgcaccagcatatcgcgctccagtcatttagcgttgcgcttttaactttgcgaagggtggttgccgtggccttaaagttcggatacttttttacggcattttttatcatctccttaaaggcttccacgtctatctttgatatgttttcgtcaagcccctcgaccttcattccaaggcatgccgtaaaatcctcctcgttgcctatcatcacgtccacgtattttgcgatctcggaatttatctcgacggcgcgagcctgcccgccgatgtcagcccaaagcgacgggcggtagtttaagtcgtacgatacaatcgtaccgtgtttttttgcggcttttgcggcttcgagaactacctcgcctgttgtctccgacagtgcggcaaagatgccgccggtgtggaaccagcggactcccctatctccgaagagagactcccagtctatatcgccgggcttcagctgcgacgccgccgagtttcccctgtcggagcagccgagagcgccgcgtatgccgtatccgcgctcggtaaagtttagcccgttgcgtacctttcttccggctccgtcagccttcacccatttcacgaagtccatattcaccccgccctgcattatgaagtcttcaatcaagtatccgacttcatttttcgcgaatgcgctcacaagccctgcgcgcagcccaaagcattttttcagcccgcgcgccacattgtactctccgccgccctcccatacgcggagagtgcgggcggttcgaatcctgtcctcgccggggtctaaacgcaacattacctcgccgagcgaaactatgtcaaattgagctaatgatttgtcttttatgcaatttttcataataatttatattttgaaattttcaaaaatttattgccgtgcggtctcttgcatcagcgcattgtgctcttgcggactataagttcgccctcgactaaaatcgtctttacgtctgatttgtcgattaccgcattgaagctctcctgtacgaaacgcttagtcggctggcggaaggaggttatcgaaggaatgtagttggctgccgagggtatgtcgtcaaagccaacaaccgccacgtcgtcgggcacgcgaactcccgattcgtaaaagcattttattatgcccattgcaatattgtcggtcgcgcaaactacagcctgcggcaaattttctctgccgcgttcgagcatttttatggctatttccattcccgccttaaaatctgaatccttttcggagggcttcaaaatctccaccgaaattccgcataatttcgacgattcctccaccgcttggagcctcatttcatgggctgccatagcgcgcgacgcataggctgcattgctcaaatttaagtcacatttgaggtgagtaaaaatcttcctcattgcatcggcctcatctacgcccgccgaaagagccaaattggggtgttcgccgtgcccgattctcactatcgggatatctttgaaagaatccgtccaagataggtcgccgcccgttccaagtattattattccatcgacagaatgcttatagagcggcattaggtcggagtctttcggcttgcggtttaggaagcccacaagcagcgtggaatagttgtgcatatgggcgatttcttgcacatctcctatgagcattgcgaagtacggatcgtaaaaatcatacactacaagccctattgtgcgcgtctttttccctttgagcataagagctgccgggctcggcacgtaattcagctccttcgcaaccctgaaaatctcttctacttttttcggatttacgcctattttatgcgcttgcccggagaggactctcgacaccaaagacgttgatgatccgaccctttttgcaatatctttttgtgtgactttcataagaaaaatgcttgaccttaactcaaacgtttgagtatcttttcgtcaatggaaaaatttttaaacgaagattttcttctcgaaaacgactactcgcgcgagctctaccacgactacgccgagaaattgcctttgatagacttccactgccacctcgacccgaaagaaatctgcgaggacaagcactgggacaatatcgcgcaagcttggcttggggccgaccattacaaatggcgcgcaatgcgttccgacggagtcgatgagcgctattgcacgggggacgcccccgaccgcgaaaaatttcaaaaatttgcggaggccctgccgcgcatgctgggcaatcccatgtaccattggtgccatctggaactcgcaaggtttttcggcatagacgacgtcctgctttctggcgataccgcccaggaggtttgggacagggcaaacgaagtcctctccgccggcctctctgcgagaaaatgcatgctcaaatgcaacgttgaaactgtctgcaccacagacgatcccaccagcgggctcgaataccacaaaaaaatcgccgaagaacccttcggagtaaaagtgctgccgacattccgccctgacaaagcgtttgccatagacggctacgaaaaatacatcgaatatttgaacagcctcgaacaggcgacgaatatggagataaaatcctacgacgacctgctcaacgccctaaaacgccgccacgactacttccacagcataggctgccgcgtgtcggactacggcatcgacaccgtatggtataaagacgcattttactacgaagtcgaagacacgtttaaaaaggcaatttcgagccccgaagaaatcgcgcccgaagaagccttggcgttcaagtccgcaatccttttggagtgcgcagcaatggactacgacagcggctgggtccgccagctgcacatcggcccaataaggaacaacaattcctcaatgttcaaaaagctcggcgccgacgccggattcgactctatgggagaatccaattttgcatggtcgctatcgcgccatctggacagcctgaattcggcagaaaatctcggaaagaccattttctacaatataaatccgaaagacaacgaggtgattgcgtcgatgctaggcaacttccaagactcctccatgccgggaaaattgcagctcgggagcgcatggtggttcatggactccattgagggaataaaccgccagcttgaagcagtatctacaatgtcgcttttgggacgatttgtgggaatgcttacggactcgcgctcgttcatgtcgtacacccgccacgaatattttaggcgcattttgtgccagttcctcggcgagcgcatgcgccgcggcttaatcccgcgcgatatgaagctcgtcggaactctcgtaagcgacgtctgctacaacaacgcaaaaaaatatttctcattttaaccggccgcgccgactcttgatattggaatcggcgctttttttaaaaaataggtcaaacgattgattaaacaaataaggcaattatgattaagataggcattgtcggactcggacccattggctccatgcacgctgaaaatctcaaatccgggaaaattcccaacgccgtgctgcactgcgcatgcgagcagaaaccggtggacgaatcgaaatacccgggggtcaaaatttttaaggacacttccgatatgttcgcaaacggcggaatggacgccgtaataatctcgaccccgtcctttacgcactatccgcttggaatcgccgcgctaaacgccggccttcatacgctcgtcgaaaagcctgtcgccctatgcacggccaacgccgacgaactttccgccgccgcgcgcaaagcgggcaaactgtgcgccgtaatgctaaaccagcgcacgacccccctgtacgcgagaatcaaacagctcgttcaaagcggagagctcggcgagataaaccgcgttgattggacaatgacaaactggtaccgccccgacatctactttacttcaagcccgtggcgcggcacttggaaaggagaggcaggcggcgctctcctcaaccagtcaatccacaatatcgacatattcgcgtgggtttttggaatgccaaaactcgtgcgcgcatggtgcaagttcggcaaataccacagcattgaagtcgaggacgaagtctgttgcagaatggagctctccaacggctctaacgcgacgttcacgacctcgacaggcgaatatcccggcctaaaccgccttacaatagccgccgacaaggggtttgtcgtcgccgaaaacgacaccctaaaaatcacccgctataagaacggctctttgaagcaatatacgcaaactacaaaatacatgttcggctccccggaaacggaggacactgtcgaaaccttcgagggcaaaggcgaacagcatgtgggtgtgctcaaaaattttgtaggcgcaatcgaaggcagggaaaagctcgactacgccgccgaggaagggaaaaagtcccttgagatagcaaacctaatgttgctttcggcatggaaaaattcggaggtttcgtcgccgatagactccgccgaatacaaaaagattctcgaagaaaaatccgcggcctcaaagctgcgcgaaaatccaaagactgactttatagtcgaattccaaaaatcgttcaaataatggcgcgccactcgacaggatacgactacgtcccagacggcggaaagaacgccgtaatcggggaaggcgaacttaaatttgcggccgcggggctcgaccacgggcacatctacgccatgactgctgggcttgaaaacgccggtgcacagtgcgagtttgtctgggatccggatcccgcaaaggttgccgcattcgtcgatagatttcccaatgcaaagcccgtaaaagagcttggcgaaatcctcggttcccaagatataaagctgcttgcaaacgccggcattccggcgcgcaggttcgacatgggaaaagccgctctggaagccggcaagcacttctttgtggacaagccgcccttcactactctcgggcagctcgaagaagcgcgaaaacttgccgcgcgcacggggcttaaatatatgccctactacgccgaaagaatccacaacgaagctgccgaaagggcgggagagctcgtacagcagggtcgcataggaaaagtcgtgcaggtgctgataacggcgccgcacaggctatcgaaggcggcccgcccgaaatggtttttcgagcgaaatcagtacggcggaatactctgcgacatcgggtcccaccagtttgagcagttcctgtatttctcgggctgcgacaatgccgagataaaatacgcgcgcgttgccaacctaaacaatcccggcactccccagctccaagacttcggagaggcgtgcgtcgagatgaaaaacggggtatcgggatactgccgcgtggactggttcacacccgacgggctgccggtatggggcgacggcagaactgtaatcctcggcacggacggctatatcgaaatccgcaaatacatagacttttctcaggagggcaatccgccccagacgctatacgtcgtggactgcaaaggcgtggaaaaaatacaatgcctcggcacgggttttccatttttcggcagattagcactcgacattctaaacggcacggagaacgcaatgagccaagctcatgcgtttgccgcggcggaactttctttaaacgcgcaaaaatgcgccgaactcaactcggacaaacaatgggagaaataatcggcaatcctaaactcgaagcccagcgccggcagctcgtgcaggcgcgcgaacagggaacttgggcaactttaaaaactttcgcgaaattttcagggcctgggtggctccaaagcgcgactaccctcggaggggggtcgctcgcttcggcgctgtacctcggcgttttgggcggagtcggctttatgtggctgcagccgcttgctatgattttcggcatagtgatgctcgctgcgatatcgtatgtcacactatcggtgaaagagcgcccgatggacgaaataaacgcgcgcatttcccctattctcggatacggctgggcactttgctcaatgcttgcgtgcttcgtgttcgcgatgccgcaattcgcgctcggggtggccggaatcacccagaacctcgctcaaatgccgacttccgaagtgggaatcggcttggaggcgctcataacagtatgcttctacgggcttgcaatgtttatggtttgcatgtacgcgctgggcggaaaaggactgaaattttttgaaagaattataaagctgtcggtcgcggcgattgtaatatgcttcttcggagttgtggcgagccttacattctcggggaaaatcgactggtcggcggtcatggcagggtttattcccaacttctccgtgctttcggagccgtcctccgactttatggagtacatagcaaagctcacgccggacggagcaaagttttggtctgaaatgatagtatcgcaacagcgcgacgtcgtaatctcagcggcggcaatggcggtgggcataaacatgacgttcctattcccctactctatgctgaaaaaaggctggaacaaagacttccgcgaactcgcgatattcgacctcgccacggggctcttcattccgtttctgctagcgacatcttgcatagtgatagcatcggcgtcccagttccacgcgactcccgcgcaggggcttgcggaatcgcaaatagttggcggcaagctcgtctcatctggcgcaaagcccgcggaaaatctcgtagccggatatatcgacctgctcgacaagcgcatatccttcgacatcggcgcgcaaaagtttgccgcaatggcgcccgcgcaaaaagacgccgcgcgcaacgccctcagccgcgccgagcgcgacatggcggcaatgctcgtaaagcgcgacgcctccaacctttctgaaacgctcgccccgctcgtcggcgaagacattgcaaggtacgtattcggattcggagtaatcggaatggcaataaacgcaatgctaatgaacatgctaatatgcggattgtgcttctcggaaattctcggaaagcgcggagcggcaaaatggcagataacgggttctgcgctcattgcactcagcgcgatagcctcggttttcttcaagggggcaaaaatgtggctcgtaatccatgcgggagttattgcaatggtgttcctgccagttgcgtactgcgcgtttatgctgattatgaacagccgccaaattttgggttcggaagttccacgcggcggaaagaggctcgcatggaatattcttatgttctgctctgttgcggcaagccttatagcgagcatctgggtgctttggaacaagctcggaatctgggggccgtcgattctcgcggtattcgcgattgccgtagccgtatcaaacaggctcttaaagaaatcctccaactaatttcatcaaacatatttcatgaaagatttgtttgacataggtaaaaaagtaattgtcgtcaccggcgcaaccggcgttcttgccggggcgacagcgcgctacctcgcctcctgcggggcgcgcgtggcgttcctcggcagaaacgaggagaagctcgaagaagcccgcgcatattgcgccgaaaacggatttgaagggctcgcaataaaatgcgacgtactcgacaagaatttgtgcgacgccgcaagggacaaagtcctctcaaaatggggggctatcgacgcgcttgtaaacggcgccggcggcaacctccccggggcggtcgtcccccccgacaagactgtattcgacatcgacgtcaagcagtggtcggacgtattgaatctaaaccttgcggggactctcctgccaacgctctcattcggagaatactttaaaaaatcgaaaacgggggcaatcgtaaacttttcgtcgatgacggcgcagtctgccgtcacgagagtgctcgggtactcgaacgcaaaggcaggcatagacaacctcacaaaatggctggcagtcgagttcgccaaaaaaatcggcgagggcgtaagggtgaatgcggtcgcgcccggattttttataagctcgcaaaatagaactctcctcacaaaccccgacggcagcctcacggaaaggggcaaggacatcgtccgcaaaactccgttcgggaggttcggagagccggaagaagtatttggggcagtacgcttcctgtgctccgacgcgtcgaaattcatcacgggaacagtgcttgcaatagacggcgggttctcgtgcttctcgggcgtttagcactttgaaaggggaaaatatgcaacctttaaaggcaggttttagatggtatggcgacaacgacgaagtcccgctggaattcatagcccaaagcggcgcgaaaagcatgtttacgtcgctgcaccagataccgtacggagaagtttggagcgtcgaagacatcgccgcccgccaagaaaaagtcgcatcttacgggcttgaatgggacactgtagaatcggtgccggtatcggaggacataaaactgcgctccggcgattttgagcgccatattgagaactacaaacagactatacgcaatttggcggcgcgcggcataaaaaacataatatacaattttatgcccgtgctcgactggatacgcaccgatttgcactatcggttgccggacggctcgcgctgcctgcgcttcgaccccgtgcaattcgccgcgtttgagatataccttctaaaacgcgagggcgccgaaaaaaactatacgcaagcccagttagaagccgctgaaaaattctttgaatctctcgacggcgataagagaaaagcttttgagaggtctataatcgacgtattccccggctgcaaaatggggcttgaaataggcgacgtccgaaaaatgctcgccaagtacgacggcatagacgcagcaaagcttaaaacacacttgaagctgtttttggacgaagttctgcccgtggcggaggaatttggaagcgtaatggcaatccaccccgacgacccgccttttgacgtgctggggcttccgcgcatagcctcgcggctttcggattttcaggaaatgttcgcggcaaatccgagccgttcaaacacaatctgcttctgcacgggctccctaagcgcgggcttgcacaacgacattccgcaaatgctcgacgccctcagggacagaatatacatcgcgcaccttcgcagcacacaggtcaacctcgacggcagtttttacgaagccgggcacttggaagggcgggtgcctatggtaaaggtagtgcgcaagcttatggagcttcaagacgagcgccttaaaagcggcggaaacaaaatagtcttccgccccgaccacggccgcgatatggcggacgacctcctcaaacccccgacggcaaatcccgggtactcgtacatagggcgaatgaaggggcttgcggaaatccgcggcattgaggcggctctctgcgattgacgccgaataaaaatacttttttttaagcgccgactgacgtttagcctgcgctttttttatccacagaatgctaattcaatattttgccagtatagcaattatagaactaaaaaaattggccggcggaattttttttggggaattgccagtatgcgctaccccgcttagatatttttgccaagacaatttttttcattcgctaaatgacgggcggcattgagcttaaaaatgcggagcctcccgcgccttgaaacgcaacaatcagaagacaaaaaaatttttcagcgcgcagaaaaaaatccgataaaaaacgcgcatttaaaatcgccgacaaattttctataaaaccgtttatccaataaaaaaatatgccgcgagcgtaaacaagaaagcttgcgttattaaatttccagttgcggtaaaagagcctattaacgcctctctttgagggagcgggcggaatttccgcgatacggtttagcagtctgaatttaggggaggaaacccgcctttgattgtctttccccaacgccaaaaaaatttccatttgcacaggcaaagacattttttacgcgcgccgagttccttctgcccttttcatttcagcgtaaaagacaaaaaacataaaatatttgagattccaataagtatgccccgccccgcgggaaaatgaaaaaactccgcgccagtttttttacggcggctaagttgaaaaatagagttaacggataaaaacaacgcaatgcgcttttacccgttagggttagaaaattgcgcatcaaaagccgttttcagccacagacaatacatacattccggcgtcgggtgatttgcgggaactctgcaagtgcaggtatgaaatccctatcggagctttgcgggagattttgcaatcggcaatttttttgccgccgcaggaaagttcagccttgccgctgtcggcatcgaatgtaaaaacaagctcgcgggtggagccgtcgccgagagactcgggtatgtccgcggaaaagagcgcgtaattttcggcaacttcgtcggacggatttatccagcggtcgtgcagcataattttagctcccttaaatcccgacggaatttttactttgagctttacttcgcccttgctcgccattgggaaattccacaccgccccgcggaggtcgcctacgagggaatcgtcgggaacatattttaacagcaggcattttttgcccggggaatccggattgtcggcaagcccgcaaccctcgattctatcatatgcgcagtgcccctttattcccttcttgtagttgaacacgctccaatcctgcaaaccgtttgaaaagtcgcattcgcgagacttttcaagaagccatcggacgtcgaaaagcacgagcctcctgttcagctcgctttgcccgattgaagccaaaatttttccgggcgcaacttcgataaactgcgactggtggacgcttttgtcccttccgggggcagaagaaaagtcggaagcattgcggcgcgggtcgagaagcacctcgcggaatccgcgccacgttttgccgtcatcgtcggaaattgccgcatgaattgcgctgcgattcgtaaatacgtcctcccagacgccgtccgcgccttcaacttcaggaagggccgttccgttcgaccacatcagcataaggcgcccgtcggaaaggcgttttatttttggcataacgcatgtcccgtaaaaatttgtcggcacgggcttgctccaagtcaagccgccgtttgaagaatacgattgccacaggttgtcgagcgacgttcgcaggataacccacaaccttccgtctttgaggcgcacggcggagggttccattgcatcgtgattccagcgagtgcctttgtgcaagcctcccgccttgtggtgcggaacgtttaggcgattcgatttcttccagcttttgccaaaatcgtcgctaattaaaaaaatcgctccgaatacaaaatcaatgttttgcgagcttgaagtccgcaatgtaatgggcatcagaatgcgcccgtcaaccatcagcggctctgcgtttatctccaacctccacgggcatatctgcgttttttcgacacattccccgtctgttccgcaatccaagaaccaagcgcttccgccgatatttataatgttaaaatatttgccgcgcgacttgtcgaaatacaccccgaattcctttccagccggagcctgggtttcggtccaagtcagccccatgtcggaactttcgatatacattctgttggagacttcgccgtgcgtgccgctctttaaattttcgggctgcccaccgtagttgtaatggcgtatttttccgtcgggcatagtgcaaagccccgaaactgcgtccgccggcgggactccaacaaccttaggcgaatatattttatccaaaccgttttcgccgccgatacaaaattggccggcaaccgacaataaccccgcaagacaataaacgccaaactgtttcatacgccactaatattagcgccgcattttaccgtcaagcatattgggcaaatcgcccctcggagaaataaaaatttcagcgaaaaataattttgtggacacccggacgccgccggattataaaaacacgcgaattaaaaaataaatcctccgataatataaaccatggcaaaacagaaaattcccacacaacaaatcgcaaaggacgacaaagcgcttgaagccgccctcagcatggtcaataaacaattcggcgaaggctcgctggtgcggctgggcgacgctacaaaaatgaatgtcgaaacgattagcacgggttcggtcgcaatagacctcgctctcggcgtcggcggccttccgcgcggaagaattgttgaaatttacggccctgaatcctccggcaagacaactttgtgcctttcacttatcgccgaagcccagcgcaaaggcggcaacgccgtgttcatagacgttgaacatgcgctcgacccccactacgcaaaagtcgtcggggtggacctcgaaaacttgatggtcgcccagcccgaatgcggtgaggacgccctaaatatagcggagaccctaatacgctccggcgcgattgacgtcgttgtgatagactcggtcgcggctctcgtatcgaggcaggaactcgacgggcagatgggcgacaccacagtcgggcttcaagccagaatgatgagtcaggcaatgcgccgcctcacggcagccattagcaagacgcgctgcatatgcgtattcaccaaccaaatacgcgagaaaatcggcgtgatgttcggcaatcccgagacgactcccggcggaagagcgctaaaattcttcgcttcggttcgcattgacatacggagaatcggccagattaaggacgcctccggcaaagtcatcgggaaccgcacaaaaataaaagtcgtaaagaacaaggttgcgccgccgtttacagaatgcgaatttgacatcatgtacaacgagggcatttctcttacgggcagcctaatagacttgggcatagagcaaaagatactcgaaaagaaaggcgcttggatatcgtacaacggcgagcttatcggacaggggcgcgaggcagcaaaagcctatcttgccgaccacccggacgtcgccgacaaaatccgcgaggctataacctcgtcaacgacagtcgttggcggaacggcactcggcgagaacgtttaactttattccgacctcccgcaaactactaagtccgccaaattctttttgcgcaaggcttagtgtcggcagcgagatttttagcatcgcgctacaaacgcaaaaaattcttccttcctgaaatggggggaagaatttttttacgctttttaatttttatatctaatatgccattcaaaaatttttaattacttgtattggctctttccttttaaagaaaaaatctaaaaagtcttgcacgcataataaaaaacattcgccgcgcggcgcctgccgccaatccccagtggtacaaaaaatctgcacgccgcgcgggaaagcaaaacgcgtatatccatcccgcacaaaaaaacgctctatttactttctacggcgcggctgattaagaaaaaattcgcccatacaaaaaaatatttatggtggaactgggcgaaaaaatattttttaaaaaaccaagattgccaacccgcgcacagccgcgatacggagcgcagaagcagatgttagcaacttagactgtttgaaggcgcacctaaaatttggtcgctatttaagaagcaaaatatttattaaaaaaattcccgcgatgtagaataaaagacgcaatttaagcatatcgcacaaatcaggcacaaaaaattttgcgggcggaaaattatttccgccctgccctatcggaacgccgcataaaaaaaaccccgcaaccgcggggttttcccattcaagagatttttttaaagctgtttaaagaagtcgttgcccttgtcgtcaacaaggataaacgccgggaagttttcaacttcaatcttccaaacagcttccattccaagctccggatattccacaagctcgactttcttgatgttgtcctgcgcgagaatcgccgcggggccgccgattgagccaagatagaatccgccgtgcttcttgcaagagtcggtgacaacttgcgagcggttgcccttggcaatcataaccatgcttccgccgttggattggaacagatcgacatacgggtccatgcgccctgcggtagtcggtccgaaagagccggacggcattcctgcgggagtctttgcgggacccgcataatatacggggtggtccttaaaatactgcggaaggggctcgcccgccttcaacctcgcggcgagcttggcgtgggctatgtcgcgcgctacaattattgttccgcgcaacttcaacctcgtcttcacggggtattttgacagctccgcaagaatctcgggcatcgggcggtttaggtctatatccacagcgccgtcgccggtatcaacatttttatatttttcgggaatgaatcttccgggattgggttcaagctgctcgagccaaattccgttttcgtcgattttggccttcatgtttctgtcggcggagcacgaaacgccgaggcctatcgggcagctcgctccatggcgcggcatgcggattacgcgcacgtcgagcgcgaaattcgcgcccccgaattgcgctccgattcccaatttgcgggtttcctccaagagtttcttttcaagctccacgtcgcggaaggcgtgtccgagcttgttgccttcggtcgggagagagtcgagatacttgaccgacgcaagctttacggttttgaggcacgcttcggcgctcgttccgcccacgacccacgcaatatggtatggcgggcatgcagccgtcccgagacccttcattttctcaaccataaagggaatgagcttttccggcgttattatcgccttcgtttcctgatataggtacgtcttgttggcggagccgccaccctttgctatgaacaaaaattcgtatttgtcggagtccgtcgcgtagaggtcgatttgggcgggaaggttgcaaccggtgtttacttcgtcccacatattaagcggggcgttttgcgaatagcgcaaattttcctgggtgtagcagtcgtaaacgcccttggagaggtattcctcgtcgcaggcgtttgtccatactgactggccctttttgccgatgattgtcgccgtgccggtatcctggcagaacgggagctttcccttggcggcaacctccgcgttgcgaagcattgtgagagccacgcttttatcgttgtcggaagcctgcgggtcttcgagtattgccgcaacaagctttaaatgcgccggcctcagcataaacgacacgtcgcgcatggcgtttctggcgagaaccgcgaggccttcgggatcgactttgagaatcttgcgcccctcgaattcggcggttgaaacatagtctttggtcagcaggcgatactgggtgtcgtccgcgcccatcggaaacattttttggtatttaaacggtggaactgccataatattttagtctgttaaaatttttttgaccggcgcattagtcggcgtattttcgcataatctgccaattccgccccttagacaagcaattttttgcccgcgcaggcttatatgggaaaaaacggcaaatagcgtcttgacgcgcgctaataatttctgaacatagaagacaggagttttaccaaataaaaactccgcgattttttattaggcgggaatatgaaaattatcgattccaaaattatagacagcggcttcgaaaaatttaacgggcaaaaaatactaaaactcaacctcggctacgccgcaatgcggacgctctgcactaacacgcggcgcgaatacgtaatagactgctcgctcaataaaaaggccgacaggggaactgtcctggccctcgcgctcgccctcaaagaatacatacaaaaaaaattccccgaatacgagagaatcggcatagcgctgccgtcctgcctgcccggaatcgcggtgaatcttgcagtgcagctcgcgggaaaagtaagcgtaaacctcaacttcaccatgggggcggaagccgaaagatcctgcctcgagcgcgcaaacgtaaaaatggtaatcggctcaaagaaagtccgcgacaaggtcgattcccactcgccggactatccatggactgacaacttcttcgatatcggcgatattttgaaggaaatcggcaaaaagcgcatagccgcaaagctcgttgccgtgcgcctgcttccgttctgggtattgtcgcgcatgtacgggattccgcgcgacggcggcgacagggaggcgtcgataatattcacaagcggctctgagggaatgccaaaagcggcagtgctcacccaccgcaacataatggcaaactgcgtgcaaatgtggaatattgggcttataaattccgacacccgcctgcatgcgaacctgccgctattccacagcttcgggcaaacaatacaggtttggatgaccgcaatatacggaatgcagtcggtgactgtccaaagcccgcttgaagtgcaggcaaacttggaggcctcccgcaagtacaaatcgacgattatgattagcaccccgaccttcctgcgctcctattacaaaaaaggaaagccggaagatttccccgcaatgcacggagtaatcggcggcgcagaaaaaactcccgaaggatttatcgaaaaatggaatgagaaattcccgaacgtgtattattgggagggatacggattgacggaagcctcgccagtagtagccgtaaatcttccgccgaacctgaaacgcggggaattttgcccgcagccgagccaaacaaaggcggaatccgtaggcgaaatttttcccggaatgcttgcggcggtagcgaaccccgacacaggtgaatttctgccggtcggcagcgtcggcctgctgcacctcaaaggcgcgagcattttcggcggatacctaaaccagcccgacgaaaacaagaaaaaactgcgcgacggctggctaaataccggcgacctcgccgcccttgacgaagacggattcatatttataaaagggagaatttcccgcttctcaaaaattggcggagaaatggttccgcacatgagcgtcgaggagtcgatagtcaaagcgcttggaatacaggattcggaagttccgctgattgcgataggctcgcggatagacgaagctaagggcgagtcgctcgtgctgatatcttccttcgacattgagatggcaaaactgcgccgcctgctcacggaagccggacttccaaacctctggatacccaaacacctcgtgcgagtggacgcaattccgctgcttagctccgggaaactcgacctcggcaagattaggaaactatgcgccgagggggaaacgcctgccgcctaacagccgcaatactttacaaaattggagcaatatggacttatctgaaaaatccgcatttttaaaaatcgcctcgtccgtcgcaaaggccgcgggagaacggctatcggcgatagcggagcgccgcgtaaattccgacgtcggcaacgacgtcaaattgcaagaggacgtcgaaagcgaaatgtttatccgcggcaagctcgaaacgaccggcatacccgtcataggagaggaaaacggcggggacacgtcgcttgcattcaacgattcctactattggatagttgacccaatagacggcacttacaattttctcaggggcattccgggcgtatgcgtaagcgttgcgctgatgaaggggcgcacgccggttgtcggcgcaataaacgacttcacccgcggcgaactttacgcaggcggcaaaggccttccccttacgctaaacggcgcggaaataaaacccgcctgggcgcacgaacagtcgcaggcagtgctaatgacgggcttcccgagcgcgaccgactattccgacgaaaaccttaaacattttgtgacagccgtgcaaaaattcaagaaggtcagaatgtgcggcagcgcggcgctcgcaatggcgtgggtagccgccggaagggcagacgcctacaaggaaaacaggctgtatctatgggacgtcgcagcggggctttcgttgatggagtccgccggcggagcatacgagtttgaatttttgggcgtcgaaggaaagcctctttgcatttccatacaggcggccgcccgcaaagaattttttaccgagtgacaatgaaagactccacctacctttcgcatctcgtacgccgcattaaatggagcgacatcgacgaaaaatacgtcgccgagcttgtcaagactgcgcgcgccgaagacatagagggcgcggggcttgcagtgcttccgaaagtcgcggccgacataactacgcgctcgctgaccccctccataaaaacgactgccgccctatgcgcgcgccgcgatatggtcgtttgcggcatggagcttgtgcggattgtcctaaaagtctatgaagaagcctccgacgactttgagtgcaaatttacacccctcgcaaaagacggcgacaaagtttcaaagggggctaaactcggagtgatagaaggctccgcgcgggttatattgcaagcggaacgcataatgttgaactttctgcaaagactgtcgggagtttcgaccgaaaccgcaaaatacgtcgaggcgctcggcgattctcccacaaaattgctggacacccgcaagacgacgcccggtttgcgcgtgcttgaaaaatacgcctttgcttgcggcggcggatacaaccacagaatagggcttttcgaccgcgtaatgctaaaagacaaccaccttgccgcagcaggcgcctcaaagggcgaaaggctggcggctgccgtgcgcaccgcgcgagaaaaaaacgcgggattcgcgatagaagtggaagttgacgcgctcgagcaaattccgcccgtgctcgaggctggcgcggacgtcataatgctcgacaactttacccccgccgacataaaaaccgcagtgaatatgattggggataagtcgtggactgaaatatccgggggagtcacgctcgacagcattggcgaacttgggaagctcggcgcggattttatatctacagccgcccccgtccattcgagcaaatggatagacatcgggcttgactcatagccgcaaaatatcccgcatttgagaaatttgccgcggcctgcaacagcagggttctcgcggcaatttttttgccctcaaatttttaattttatagattgccgaaatattttttctgtatgggcgcaataaaattccgaatattatttcgcgctttaccgcgcaacagaacccgaaaccgccgccgctgaacaggcggaatttaggcggcgggcaaaggcggactgaaccccaagtattacagccgccgcaaaggcgcgcaccgtaatttttagcatttttttcataaaatttttctattagctctttaccaatttttataaagaaaacgccgcctgccacgagcttttttattgcattttatctttgcttttttgcctcgtatattttatgctttattttgtaaagaaaggatatacggaatcgaaagcggaatcgaaagcggaatcgaaagcggaatcgaaagcggaatcgaaagcggaaagcgagagtgaaagagctgccgccgatagattgtttttgatttcaaaggcaaaaggaaaatattatgaaaaacctcattctacttgcgttgatttgcttttcggtaaacgcggcttgcgcggagggagcgcgcgttttctcggtagtcgctaacgagactactacggcagatggctcaaaaaatatggtttatttcaaccacgagcccggaacgatagattttccggatagaacgcgcagtgagcgcatacaaaatgaatattgcgttttaataaacgatagaggcgcgctttcaaaacaaataaaacgactgcggaacttttcgttgtacaatcctgtgaaatatctcgccgagattgacggcgcaaatgccaaagcatttatatcgcctttagagggaagtatagaggaattttcgtcttttaacgcgaggctttatatcgcgctttatcccgacgcattcatcgaagctctgcgcggcaaatttgccgacggcaaaaacggcctcaaaatctcggacgactcaataaaatattccgatttatcgacggaccatttcatacagttggagaaaagaaaaattgtctcggttcagatgcgcaacaaacattccgaagaaaagctttcggacctgcatttccactacgcagccgacggaactccgataaaatcggaatttaagatttactcaaaaggcaaagttctatcatctatacaagacacctaccgcgaactaaagaacatcgccgactccggcagcgactcactatttaatacgcgcgacttaggccctatgaaattttacgacagccgcatttgccccacaaagacatacatttacgccaaaggcattccttccgtaccatccgcaaaaagcattcccgaagcggacaatagcggaaaaaaagcaaaagctcaggaagattctttaaacgcgcccgcaaaatccaaatacttggacagggcggaagatttttttgcaaagttttacacccagttagaccgcaattcttagactatttttagcttctatactttaaaaaaaatttaaaaccgcaacgcctgcgcgcgcaaaaaattaaagcgcctgccgccctccgcgccaatcgccaatccgcgagcaaaaaggcaggcgttagcaccgaattgcaaaaacaatcaaaaaaaagcgtgttaagccaagagagcgcgcccctacatgcggcgcatgagagaggacatcattcgccttcccttttcgcccttcatcattttcatcatttttctcatctgctcgaactgttttagcagagtattgacatccctcacctgcgttccggaaccgcccgcaatcctcattcttctgcgcgcgtttattatcgacggattgcgcctttcggcgggtgtcattgacaaaattatcgcctccattcggcgcatgcggctctcttccttttcccctatttcaattcccatgcctccaagccccggcaacattttcattatgcccccaagcgggccgagctttttcatctggcgcatctgggcgagaaaatcttcgaggttgaactccgccttgcggagcttttcggccattttggcggcctcctgcatgtcgatattttcctgagccttttcaacgaggcttacaatatcgcccatgccgagtatgcgttgcgccattctgtcggcgtggaatacttctatgtcggaaattttttcgcccgtgccggcaaacttaattggcgctcccgaaactgctttgatagagagcgccgccccgccacgcgcgtcgccgtcgagctttgtcataataacgcccgtcatgcctacagcctcgttgaaggcctttgcgacgttcacggcctcctgccccaatgcggcgtcggcgacgagcaaaacctccttcggggagacgttttcgcgcagcttttttatttcttcaataagctcggcgtctatctgaagcctgccggcggtgtcgagtattacaacattagccccgttttttatggcttcgtcgcaaagagtttttccgagccgcgggacgtccttggaatttctgtcggaatataccggaacgccgatttgctttccgagtatttcgagctggtcgattgcggcaggtctgtaaacgtcgcacgctacaagcgcgggattcattccctgctttctaagcaatgccgcgagttttgcggaagttgtagttttccccgagccatgcaagccaaccatcatgattttaagcggccttatcggagaaagttcagtctcgcccgcgccaagaagcttttcaagctcgtcgcttataatttttacaatctgctgcccaggcgtcacagactttaccacttcaagacccacgcattcggccttaaccctgtctgtaaagtctctggcaaccttgaaatggacgtctgccgatagaagcgccttgcggacttcgccgagggcttccgccatattttcttccgttagctttccgagcccgcgcaaattgcggagggctttggatagattttccgttattgcttcaaacatttttgtggagtgtcggtagtatgcgaatatttcttggcagaatttttctcttttttcggccgcggcacggcgagcaaacgcgccgttgcgttattgttctggcaggcgggcgaacccgccacagaaattagaattttaccggcttcgcgccgcggcccattaataacaaggagcgcagcgtatcccgaaaattttgcaaataggctggcgaggagcgaagcaacggcaaccctatggcgaaattgccccggcgcgccgcagcacggcgcgcggcaaagcgcgctattttccgagagtgtcggaaccgtaccagtgggaaagaacttctggaactgcaatcgagccgtcgtcgcgcacattgttttcgagcagggcggccaaaacgcgcggtatcgcgagccccgagccgttcagtgtgtggacgaaagctggctttccgccggcggacttaaaccttatgtttgccctgcgcgcctggaaatcggtgaagcaagagcagctcgacacttcgagccatctctgctgtcccgccgcccagacttcgagatcgaactgctttgcatgcgggaaaccgatgtcgcccgtgcatatcgagagcacgcggtagggcagattcagcttttgcaggattccctcggcgtctttgcggagtttttcaagctcttcgaagctgtggtcggggtgaacccatttcacgagttccactttgtcgaactggtggaggcggttgagcccgcgcacgtctttgccccagctgcctgcctcgcggcggaagcacggagtgtaggcgcaagcgtacaccggcaattcagactcgtcgaaagtttcgtcgcggtaaaagttggtgacgggaacttcggcggtgggaatcatatagtaatcgtcagtggcgtcgtggtacatttgcccctctttgtcggggagctgtccggtggctgtggcgcttgccgcattcaccataatcgggcacataagctcgcagtagccgttcttgcgcgcttcgtcgaggaagaatgccaagagcgccctaacgagcctcgccatgtcgccgacataaaaagggaagcccgcgccggtcacttttacaccgcggcggaagtcgagcattttttcaaaatagggcaaatcccagtgcgggacggcattttttatctttgcgacgtctccccaagtgtaaactgtgacattgtcctcggcggattttccgaccggaacgctgtcgtcgggcatattcgggattgtgaggaggatttgcttccagcgcttgtcaatctcggcagcggcggcttcgagatcctttacgcgctttgagacttccttcatttccgcgagtttttccttaaattcgggggaacctttgggcaattccgccatggctttgcttgcggcgttttgcgcggcgcgcgcgtcttcaaaatcggcaacggccttgcgcctctgggcgtcgagggcgagcacggcgtcgatatcgcactcaaaatgtttgagggcaactttcgccttcaccaattcggggttttcccttaaaaattttacgtctatcataataggtgtctataattgacttccagcgtttgcatttcaacaaaatagttcattagataaaacaaatacatttatttaaataattataaaaataaaagcgcagaggataatcctctgcaactttaagtaattttataataataaataaggaatattatttcatttttctgcgcattgcgatagccagtattactgcactaaatatcacagctactgactccggttccggaacttgagcaaatccaacttgcagcgaatatccatttcccaacgattccacccacttgaataccgcaatgccattcgctattccttcggcgacaaagtcgtcattcgcatcatacacgccgtcacttagccgtttttcgaggttgaagccagaaagctcactggctgtaagtatctccgtccacatttcaatagattcagcgctatcagccaaaatataatcgtaatccgccaaattcagcgcatttccgttggcatcagaaaaatctattgatatttttccgctccctgcctcctttgtaaaggtatcagttattattaccttatcagatggattatagtcaaatacgttatggttcacaaaattttcgtacgcaaacccgccgcttttaaaattcgccgtcttaaaatatgcagtaccggtctgcgacgaatcgtagtgtccagccccaaatttgcccccttccattgacaacttcgcctgtctataatcagcagctatccgcgaattgtccataataagacggccattcttcacagtgtaagttccactttgacggcctaagatatccgttgcgtcatcctttgcattgaaaattctctgcacgccctctccgtccatagtcacattcatgacagcttttacttccgaaatattgggcctgttatttccgtcatctgctattacacctataaactgataatcactcccagcagcattttttaatactattgtagaattgagactggatccctgggaattatgtaacgtaaaatttgaagctatatttgtagcatctatacctccaacttcaaacgttgcagacctggaaaaaaacatgtttgaataacttgaaccgttgcggtcaaaccgcaatacaccatttaccgataatttatccacatagaggttcaaaacacaaccagcatactcatataatcccccaccaattctaatatcgcgatctactaacaagttccaatctgttattctattatctggagttccaatcctaagatccactcctccgtaataagaaaaagttttatctctataaatctctgtccctacattaatttcgccaacatgcatttcaactgcgacctccccatttttaccaaaagatgctcctatttcaggcgaagaaaatactccgattatcggagaagacagttcaccggttatatcaatatatactttacctttatcaagaacatcatcgccaaagttcatgtggtgattccctgtgataactacattgtataaatatgtgtcagtttgagataggtacaccccgcgccaatcggttttttcactatacataatagcagtgtcctgaccacccgaagtaggcgcgctatctgcctgaatagttctttcttcgtcaagataccaatttgtcggatcggtaatttgagaatttctatcatcaccaaaccatttatcagcagaatatgacatcgctgctgagcaaattgcgaaaaggaataatgttgtttttttcatagtgaaattttttgtactgcattcattaactatgtcaatacttttctaacactacttttccgcaattcgataaaagaatactctgacctcaccttacacgtcttttcatttttccagctctaatattaactaaccgacatttatacaccatcttggattatagatattaaagaatatttatttatgccatgaggataaagctatagaaatgggaaataaatagggactaaatatttaaatacaatttgtcgcacctaaccctaaacctttaaataacttatattaacttaaagatacagaattaaccccatctgaaaaaaattcattttttttgagaaataccgcctcaattttttagttttttattattaatattctatattgatgctaaaaatataaatttaacgttcccattatactttatacattacaaaattttccctttatataataaggctttatattatgaaatacaaagtccacttcgcttttttcctataaaatataaaatggcgaataatatagccatacaaacttacgccctatctgtatttttcgcgctattggcagttatctgtgtaaagaatttagcagtcgagagatcaagcctctgcactaataaatatctataatttatttcccacattcgcatttcaacaaaatagttgcgcctattgtcgaaacgcccctaaaattgcttgtattccgcgacggcggcggctaacattgcaatagatttttacccgtatggttagcactttgaaaagaaacaccctatccgccctcatttgcgcggccttggcaaacctttccccgtttgcaagccaagctgtggaagccagctcatatccgccgccaccaggacgcgagcaatggaaatttgtaggcgacctcgcaaaacgcgagccgcaaagatttttttggagccgcaaagccctgccctcagagctcgacttgtcgggcggcataacagtcgtcgacgaatacgccgcgggtgataacctaaaaaccgccctgtccggcctcgattcatttctatccgacgcaaaactccctaaaaacggctccgcaaaacttacactaaaacgcggaaaagtctcgggatacgaaagctaccgcattgaggtaggcaaatccggaataacaatcaccgccgatgacgacgaaggtcttagaagaggcgtatattttctccaagacttgattcaatcgcaagacggtgcctttttgcccgtcgggaaaatcgagcgcaagccgtggataaaaaacagaatatcgagatgctttttcgggcctataaaacgccccccattcaaccgcgacgaactgctggacgacatcgactattatccggacgaatacctgtcgaaactcgcgcgcgagggcataaacggactatggcttacaatcgagtttagggagcttgccaaaacttcttttaccgaacgcgaccccaacgccgaaaagaggctcgaaaagctccgaaaaactgtagagaaatgcggaaggtacggaattaaagtttggctgtttgcaatagagcccaaatctcttccggccgacgacccgctattggcggcgcatcccgaatggaaaggcgcgcgcggctgggggaacgactacgctttctgcaccgcaagcgaatcggcgcggcaatacttgcgggagtctctcgccgacattttcgcaaacgtcccaaatctgggagggcttataaatatcagccacggcgaaagaatcaccaactgtctaagcgcgcttccggccgtctctgacgctgagataaaatgcccgagatgctccaaaatccccaagtggaaagtatatgaagatgcggcgcaagctatggttgagggcattcaaaagtccgcccccaaagcccagttaatcacatggctctaccaaccccaacagacgcccgagcgcgctcagtgggcatttgaaatcgcgcggcacgttcccaaaggcgcaatattgcaatataattttgagagcggaaccctcgcaaggcagctcgggcggtggagatgcggcggcgactattggctatcgcgcacggagccgtcacacatatttaggcgggtagcggataccgcggcttcgtcgcgggcagaattgtcggcaaaaatccaagtcggctgctcgcacgaattggcgactgttccgtttatccctgcgccggggctactgtatgaaaagtactcccgaatgaaaagcctcggctgctcgagcgtaatgcagtgctggtacttcggcaactatccgggcattatgaacgtagccgcagggaagctcgcgtttgaagatttcaagagcggcgaggacgaatttttaatgaaaatcgccaagccgcattggggcgcaaacgccggcaaaatcataaaaatatggaaggcttacgccgaaggatacaaaaattatccgctttcaaacaatatgcaatactacgggccaatgcactcgggaaccgtttggccgctgtatctcgacatacaaatgcgcccgctaaacccgacgtggattcccgacacttgccccaatggggaaacaatcggtgaggcgctcgaaaaccatacgctcgaagaagcgttgatgctatcgcggctaatttgcgaaaagatggagtcggtcgcgccggaaattgaaaatattgaaaagtctctttccaaagacgacatcggcgcaaaactcgacatcggattattgaaagcccttagaatacagtttgagagcgcgagaaacatatttgagttttatctgctaaggcgcggcgcctattgcgcctcgcgggttgaaggcgacacaaaaaaagctctgaaaaacctcgagcgcatggaggaaatagcggaatcggaaatagacgcctcaaaaaggctcgcggaactgtgtgccgaggattcgcgtttgggcttccactccgaagccgaaactcacatgtattcaaaagagaggctccaatggcgcgccgacagcttaaaggatacgctcaatcaaatcgcagccgttaaaaatattttgcgcgaaggcggcaaacttccagaaagttcatttgaaaaaaacgctccgaaagtgcaggccggcgcacagtggaatgaaaccccttctacgcgttggaaaatctccgaatgcagcggcggaataaaattcgaggcgcaactgcgcggcgactacgggtacgacgaatttagcgtggcaatgctcgacgccgccggaacgattttcccgcttaccgtaaaagtaaacgggaattctgttgccgacgaatccgggctgtttgaaacaaaaatagagcgctcgggagatttaaagaaagtgtcaatatttctgccaaatctcgcctatgcggaaaaggaaataaaaccgtcgtggatatttgtgcgccgcgacgcagcgggaagcccgacaaaattgcccgccgtaaaatacaggtggcccgcgtgcgagatcctgcccaaatggcggctcaacatcggcccaatgcgccccgatatgttcggaaagattatttattgatttaaaattttttgcaaattttccattattgtgcgcgcggagaaggcaaaggcgaggagaccaattatccgcttaactacggagggggattgggcatacatttaaccctttcccctattgatttttgccgcatttcttccagcgtgctaaaatatccatattatgcgcaacgtaaaattcagcgacccattttacgggaaatgacctgaacgcaaaagtttttttcgcccgcaaattgcaagccttcacgcgcaaattttaactttgcgcagcgcaaataaaaaaacatcgaaaatatcatagtgtttacaaagcacaccgccccgcctaagcggaaaatctattctataaattgcggtgcagactactttgattttttacaatgcgccatgtaaaataaaaatggcggcacaaatacgtccgccacttctcagaattttccgcgcaccaaaaatctcagacttttgtaaaatgcgcccgcgcgttggtattttgtagcattcgcgcggtaaaagaaattttctttgagtttaaggcttcacgactctcaatatcgaaactacgggcttgtatccgtcgagccccacaatttccaagtcgtgcttcaatttcatatttttgaggaagtctgccgttatgaaaaacgtcgctgttctgactttcccggtgtcgccgcattccactttcctgctttctacttcgccgtcgagattgtacctcagctcaaacgctcccttgccaatgtcgaagtacgatattttaacggcgactttcttgttccttccgcgcaaaaatttgtcatctactttgaatccgattttttcgcctgtccgcgcaacatagtcgtaccttttgtcgtcgcgcaccatccacatttttatggcgtggtttatcttaacggctggctgcgtttcatagccttcgctatcgcgctgatagacccacctctcaaaattcttaactccggtatttaaattcggaacccccgcgcgcttcaagtatgacttccacagatagctctcgcgcaaaaagcaccatgcgtccggcgcggttttcgccgtcttgccaagctcaagcccgacccacacaaacatctcgggatttattgtaaactcgttccatataacatcgttcgtgcgcatttgaagcaggcgcaaatttgaagtgaagtagcggtatccgaaagacgctgtgctctttccaaagcggtacctgccctccggagttgtccaccaaacttcgtactcctcgttttcctcgccgttgcgaacgccgctttttactattttattttcctcgtcgacatacaagtatccgtccttgtcgattttctggccaattaaatcgtcgggtatgtggtataggtacatctcgacaaatccgcggcggattccaaaaccttttgatatgccgtagtcgctccacccgcccatgaatactttatgctccactcctttggcagcgtttgcccaagcgtcgagccgctcccttacatgcggaaacccatcgggatttttatcctccgcgacggggcctacgccctcatcgccgtttgagtacgaagcgtaccctacaaacattccctttacctcctccatctgcggaatcccagacttcccgaacgcatcgaccaatttcagatagcgcttgtggaactctgggtgggcggggtcgagaggcttcattccgtcgcccttgcgctccggattttcgtctatgggaattccgtacttaaacagccactctggtgcgaaccgcgtagaggccgtgtggattcttatcacgcttccgtagcctttttgggcggcgacctctatcatatttttaagcgtctggaagtcgtacacgccctcggttttttcaatatccttccagtcgagccaaaagcccacgacaggtatcgacggaaagttcacaggctttaactttgaaaccttccacatgccgttcatattcgtgcggtagagggtgacgtaggatttcggatcaggctttacgcgcggcggcaatgaccaatcccagccgtctttgacggagtcttccgcaacccattccgcggggcggacgtcctcgaatttagtctgtttatactctccccaatacgggtattcgctctcaggcaaaacgtggcttgccgcgtcctctgcgccgaaagaggataaccccgccatagagcatgcaatgcagcctgccaatacttcaatttttttcataatagctttaaatttagttcttttccaaatcttatcactgcgcgtataaacttatccgccgcgcggcttttgcgccgtttttttcccggcaaattatttaaataccgacaaatcccagcggtcataccactttattacaggcatatcgccctcccattcaactggaagaacgatgtatcgcccgtccatggcgtcttcgggcatccatctgtctccaaaatatatgaatgcgtcttttttgccctgcactggaatcaccgcgctgctttgcgagcggaatgtcgtgtccgccttggcttcgagcggggcagtcttccattttttctggccttcgccgcggcacggattgccgagctcgcgccaatcgccaagcattttgtccgcggaggaaaccctgcccggattcggcgcccagccggtgcagtgcgaagaaaacatatagtatttcccgccctttttaaagaaagctggcgcctcgtggtagccgcccgggaatactcggacaaatcttccggagaatccggtgtagtcggagttgagctcgtgaatgtggaaggtcgagttgtcttcgctcgcgcagccgaggtacgcttttgagtcgtcatcgacaaacagcgtcatgtcgcgcgacatttgtcccttgtcgaaatcgcgcagaaacgcgaagccttttatcatagctttcttgtattcgtccttttttaattttttcgatttccaattggggtctttttcaagttccgccttgtacgctttgagttcctcggcgcagtttaaaggatatttcccggcattcgggcgtaaagagccgatgtatttgtacggcccagtaatcttgtcggcaaccgcaactcccgcgcgggctgtggagtagtcgggcttttctttgagaatgtccgcaatatcggtcgattttgcagtcgggcctttgcggaattcaaggtgcatccacattacatatttttttgttttggggttgtatatgactttcgggcgttccagtatggttccgagtacaatttccgaatttgggtcggactgcattttgagggctatgccttcgtccgtccagttgtacaagtcttttgaggaatagcagtggacgccgacaaccgccttgttgccgagagttccacccattttatgttcgccgaaaatataatatttttctccgtcgaaaatcgcccctgccccgtgcgcattgatgtgcctgccgttgttgtcgagccatactttgccgggattgaatgcgtcgtacttcaaaatctccgccgaattaacgcctttgtcgcatgcgcaacccgccgcgaaaagcgcgcaacccgcgaataaaattgccgtaaattgtcc

SEQ ID NO: 1106 - DNA, 7825 bp, Unknown
  16S sequences of unknown bacteria
cgaccaagtacgccgaagagctcgtcaagaagatggaaaagagcggcgcaaaggcttacctcgtcaacaccggctggaacggcaccggcaagcgtatctccatcaaggatacccgcggcatcatcgacgcgatcctgaacggctccatcctgaaggctcccaccaagaagatcccttacttcgacttcgaggtgcccacggagctgcccggtgtggacagccacattctggatccccgcgacacctatgccgacgcttcccagtgggacgccaaggccaaggatctggccggccgcttcatcaagaacttcgccaagtacgaaggcaacgaagccggcaaggcgctggtggccgctggtcctcagctgtaattcactggttttctcaggggtgcgctttcgggcgcgccccttttcctttatcaatctttttcggaggtgaaaccccatgtccatcgtcattcgccgggcccggccgggagaccatttgctcattcgggagcttcagcaggaaattgccgcgctgcactacgaaggccgtcctgatcttttccaaaaagaaggccgatattattccgaggaggcgtttgcccggctgctggccaaaccggatgagttcatctggatcgccgaggaggacggcagcgtcgtggggtacgcctttgcgctggtgcagcgtgcccggaacaacgcgacattccgggatttcaaccgtttttacattgacgatgtgtgcgtgtcctctgcctgtcagcggcagggaatcggccgtctgctgatggaggaatgcaagcagcaggcccggcggtcgcactgccataccattgatctgggcgtgtggagcttcaatcataacgccatcgccttctatgaaagctgcggcctgaaggagcgagaaaggcggatggagctcatcctgccggacgaagaaatgatcgacgtcagcggcactgttctggaaaccgatcggctgattcttcggcctttccgggaaaccgatctggaggatttttacgcttatgccagcgtggagggcgtgggggaaatggcaggctggccccatcacaccagcatggaaaccagccgccgggtgctggacagctttatccgcggacgcaacatcttcgccgttgtctggaaggaaacgggccgtgtgatcggctcgctggggcttcatgagtcgtggaccgcagaaaaacccgaataccgcggcctgcgctgcgtggacgtaggctatgtgctggccaaagcattctggggacgcggcctgatgcccgaggccgtccggcgggtgattcgctactgcttcgaggactgctgtctggatgcgctgaccgtctgccatttcgaggaaaacgaccgttcccggcgtgtcatcgagaaatgcggcttccgctatgtggacgacgctctttggcacgcggagcagctgggacgcgacttcaaggacaaacgctatattttgatgcgtccttgagaaccccaaaaaagttcatgaaaaaaatctcctgcggaggcttcctcccgggaatttttttgcaccccgaaccgccccaagcatatggtgacagtgaaaggcgcgaggaaagagcgcacgtcgcattccttcccttgcggccaaacattaaaggaggcgtgttcatgtctttctattcttacaagaacgccaatccctgttcctgccccggcaccatctcgggcaatgcgctggacggcctgcaagaaaaggtctgcgtacaggtcaagcgggtctacgacagctgcctgcagcaggagcagctggataacaaggaagtcaccatcaccagctacgcgcaggtagccaactccggctgcggatgcagctgcaataacaacgacaatacggaaaccgtggcccccacgtccgcacccgtgccgcccatcaccttcgaaagctgccgctctactaccacggaaggtaccatccgcgacctgacggtagaacgtctgtgcgaccgtccctgcttcgcccgggtccgctgcaagatcgacgtgcccattgacattctgttcgtggacagccgctgcgtggagtacatcggcaagggcgtgatcacggtcaataaggatgtgctgctctccatccccgatgagtccatcgtgccttatgcgctggaaagcatggtcagcgccatctgcgtagcgggcacctatcagggcaataacaagttcaagctgacggtctgcgtcaccgtgattctcaaggtgctggcgcaggtggagatcctgattccctcgtatggcttctgcaccgtgccgccctgcgaagaatttgcggagaatgtgtgcgacgagttcttcagtctgccgctgttcccgcccgcgtcgctgtgcaataacaacgatgtggatctgaaaaatgcggcgtgccatcagggcagctgcggcggatgtggttgcggctgcggatgcaaccgctgaaaaaacttcctatgataaaaccctgcgggagaccttctcccgcagggctcgtttcttttattgaatgatattggatgaaatttcacgaaatgaaattcatcaggcataccgacgaacaatttcttccaaaccggccaagccgttgtgaaatccgttgccgttgtccatgactacgtcggcggcttcccgatagatgggcatccgttcattgtagatgcgctcgatctcctcccggcccttttgagccagcagaggtcgcttttcggcccggatatccagtatgatgtcgtcgatggggcggtcgatcagcacaatgaccccgtgattcttcattaaacggcggttgcattcccgcagacaaacgccgccgcctgtggaaataatgcccggcacggccccggcaaggttctgcaacaggcgggtctcaccgtcgcggaaagcctgctccccaaaatactggtagagctgggccgtgtccatacccgtggtttcggtcaaatagacgtccgtatccagataggggatctgcagcttggaagctaccctgcgtccaagggcgcttttgccgcttccaggcatcccaaccagaaagatatgtcgatccattttaccgaatcctcctttgtgctgacaggctcaggccccgagctggggctgacccggcgtttgcgctgcctgcagggtgaaacggaaacccgcccctgcatccagaggaagaacttcgatcgtttgtccgtgcatttccataatttgtttacagatgctcagaccaagacctgtgcccttcccggaagtgtgggctttttccgccatataaaagcgctcgaaaacatgcgcccgatcttgtgcagcaataggttcaccgtcatttttaatctcaacagcgacaatactattttgcatcaactgagtgcgaattgtcaagtggccattttgtgaaatatatttcagcgcgttatcgacaatatttaatacgacctgtgaaattcgatcgctgtcggcgtgcaccatgcagggatccacggcgaaatccagctgcaaatcgagggatttctgttcaatatcgttcattcggccgatcagcaggcggcgaatcaattcgttgatatcaaaatccgaccattgaagtttttccacgccgttgtccatgcggcttaattgaagcagatcggcgatcagccgtttcatgcggttggtctcgtcgtaaacgatctgcaggtagcgggggtattcctcctgcggaatggtgccgtccagcattccctccacaaagccgtggatgctggtgacaggggagcggagctcgtggctcacgttggacacaaattccttgcggccctcttctactttttccagcttggcggccatgacgttgaatgcgcccgccagctggcgcacctcgttcaccccggtgacggaggcccgggcgctgagctcgcccttgctcattttttccgccgcgtgggtgatgacggtcagcggacggatgatgccgcgggtgtacagcgctgtgcccgcaatggccacaaatgccgccagcgtaaagccgatcaatacctgcagcaatagcgcgtggtagggggcttcaatgacctgcgcactggtgtggatcagcacggctccctgcaccgtatcgtcctgcacatagggcacggctacggtcatgatcgcgccccgggaggcgttggtgatgcgcttctgcacctccttgcccttgagcacgtccagcattagctggctcagctcctcggaattgagggattgcagcatatcacccgtactgtcctgcagggcggcctgcatattatccatcacgtggccggagcggtcgacaatcaggatgtaggccccgtagtcctcgtagacgttccgggccttccattgcaggtaattcatggtggattcgtccgtcgtccatacgctggaagaatccagattggccgccagataggcgatctcccgcgcctgcaccagcagcccctccatgcggctgtttaccatggccccccggatggagaacacggaaaaaccggcgctgatcagagccatcaacagaatgaccgccataaacagcgctagcagccggtcaaacatactttgacacaaaacggtttgcctcccttattaagcgggcttgtaatcgaatttgtagcccacgcgccagacggtgtggatctcccagccgtacttttcgcactctggcagcttttcccgcagacgcttgatgtgaacgtccaccgtgcggctgtcgccgaagaagttgtagccccaaacctgctccaacagctggtcgcgggtaaagaccatgttggggtgggaagccaaatagtacagcacttccagctccttggggggcatctccacgggcttgccctcataggtcacttcgtagctggccaggctgaccgtcagccccggaaaacgcagcgtgtcgtccttctccggcttggcggcggagaaagccggttccgcttcgccgggtgcgcggcggagcaccgctttcacccgggccaccagttccttgttttcaaaaggcttggtgatgtagtcgtccgcgcccagctccagccccagcaccttgtcgaaggtctcgtccttggccgtcagcatgatgaccggcaccttggaggtcatgcgaatctccttgagcacctccagcccgtccttgccgggcagcatcacgtccagcagcaccagcgcgggattgcagctgcggaaagcgtcgatcgccgtatcgccccggtcacattccgttacgccgaagccctctttttccagatatagccgtaccaaatggctgatgttggggtcgtcgtccaccagaagaatatgctgcttgtcagccatgagcggtccctccttcgtgataccacgtccctctgcccacagaggcggaaagggcgtttcgtttgtattttttccgcgcggcagccggtgaaaaaacaacgaaagggcggaaagtctatactcgtctgattatactgacttttggccgctttttcaatgcttttggggcaaaacgggccggctgtaaccgggaaaggacgtaaaaaatctgccgggagatgcttctcccggcagatggagcgattatgtgaaaatcaggacaacacttggaaaatggcgcatttcagatactcggtctccggcgagctgagcagaatggggtgatctcgtccctgagtgcgccattccacctgacggagcttgacccgcgcgtccttctgggcgtccagcagcatttcccggaacaggggcggagtcacgtgctggctgcaggagcaggtgatcagatagccgccctcccgcaccagcttcatgccccgcaggttgatctccttgtagccccgcagcgcgccctgaaccgccgagcgggtcttggtgaatgccgggggatcgaggatcaccacatcgaatttctggtgcgcttcctgcgccgcccgcagatagtcgaagcagttggcacactcaaagcgcacccgatcctccacatggttcagccgggcgttttcggcggcaaattcgcaggcatagtcgctgatgtccacgccgatcacttcctttgcgccgaagtgcgccgcgtgtagagcaaagctgcccgtgtgggtaaagcagtccagcacccgcgcgcccttgacgaagggcgcgatggcggcgcggttttccttctggtcgaggaaaaagccggtcttttggccttccttcacatccacccagaaatgaacgccgttttccaccatttccacccggtcgggaacggtgccgtacaacaggccggtctgctgggtcagcccttccagctcccgcacgggaacgtcgttgcgctcataaataccggcggggtggacttcctccgccagcgcgtccacgatgtcctgcttgaactgctccatgccgaggcacagcacctgcagcactacgatatcgccgaatttgtcggcgatgacggcaggcagaccgtcgctttctgcaaacagcagacggcagctgttcaggtcagcaaaggtacggcggtagtcgatggccgttttcacctgccggtggatgaaagcgctgtcgatgggttcttctttccggctcaggatgcgcaggctgatctgggagcgggggttgtagaccgccatggccagaaaccggccccggctggacacgacgcgcactacgtcgccgtcctgacaggggccttcgacccggtcgatatcgctgcggaacacccacgggtgtccgctgtagacccgctgttccttcttggggtgcaaaaccactgtaggcatggaatgtctccttctgtttgcgttacttcatcacacgccgcaggaaatcggcggcgaaggcgggccagtcggcgttatccggcacgatctggcttgggtcgttcacgttggcagtctcatggttgcacagggacaggccgtggccgccgaaggggtaaatgtgaatttccgtgtccaccttgagggaacggagtttttcggccaaaatcagcgagttctccacgggaacgcagccgtccacgaaggtgtgccacaggaaggtgggcggacagttctccgtcgcccagttttccagcgaatactgaggatgctggctttcgtcctttgtgccggacagcgctacaaaggagccgcggtgggcgaaggggccgccgctgaccacaggatagctgagaaccatggcgttgggccgcacgtcctcgggggtcaggcccatttcctgccacagctccgcccgctgccacagtacgcccagactgcccgccgcgtgtccgccggcggagaagcccatcacggcgattcggtcggggtcggtgtgagtctcctccgcatgggcgcgcacccacgccaccgccgcggccacatcctgctgaggcaagggatagcggttgggcgctacgcggtaccacaccacaaagcagttgaagccctccggcaggaaacgcagcgcgatcggctcggcctcccgctcacttaaaaactcgtagccgccgccggggcagatcacgatcgccgggcggcgtaccgccagatcgatctctttagataccgcgggcacataaacgtccagcgcaatttccgcaccggcggaggtaggaatggacagccgttcgcagcgcatcataaacaaaaactcctttggtttgtttcggaaaggttctgcatcaatatacccgcctgagggcggaaagtcaaggtttttcgcgcgtgagggcgatggaagagaaaatgcaaaggccccggcaaagtgccggggcctcagtgtgtcaaaaaaagtgggggtgcaggaggcactgctgccactcaatcgtcgcagggactactgccgtagtccctgctcgtttcgtgtcacacctgcgggtcgctaaccgcctacggcggttgtgccca

SEQ ID NO: 1107 - DNA, 2833 bp, Unknown
  16S sequences of unknown bacteria
gccggtcgtcgtgtattgcggaacctttaccgcaagcggcctgaaggtcgagatcaaggatggaaagctgcacatcctgcaggaaggaaaagtcaagaagttcatcaaggatgtagagcaggtcacgtttgcggccgaatatgccgcagaggtcggacagaaggtgctttacatcactgagcgcgctgtcttcgaattgatcgacggtgtgctgacactgacggagatcgctccgggcgtagacctggagaaggatatcctggcgcagatggaattcaggccggcgatcgccgaggatctgaaggaaatggatgctcggatcttccgcgatgaggtcatgggtctttcggcttaaatgaatgatcaggcagatgcttttgccaggcaggagcatctgctttttgaatccggtttcatgcggaaattgtcagaaatggttttgtgtttaggattaaaatcaagtataataaagaacatgatgtaaaaaggagaaaggggataaacggtatggaagggaaccgtcatattgaccgcacggacgctgtcgtgcgtcccgtctttcagaaagaggggaatgtctatgtaaggggaaaatccggaagtgggaagaccacgctgctgctggaacggctgcagtttcttgcgcaggaaggggtggcgctgaaacgtacgctgaacctggtcgcttataaggaagataccgcacatctgaattacttgtggaagagcgaatacagcagcgaggaagaggaagacgcgccgatgtttcgttcgatctatcagttctgttacaacatcatccaccattacaatgctaaacgaggcattcatgacagccgtgtgtcgcgcgatttcaagctgcaggtggcccggatgatccaggagcatttttctctttcgctgaaccattatgcgctggacagcgtctatcgcaagctgggggaatgcaagggcatgatgatgtcagagagcagcatcgcgcagatcgaagtcgacggcatcgactttccgtatctgtattcccgctttgaacaatataaggagcagcgcgggctggtgagctatgaggatctcatggcccatgcggcacagtgcctgatgaaggatgaggagctgttggatcagtatcggagctattacagccatatccatgtcgatgacgcgcagaacctttcatttgcggcgcatgtgatgctgaagctgctttgcggggaagggacctcgctgaccttgttcatcgatcctgaccagtatgcgggacagcatgcgccgtatctgctttcctttgaggatttcgcttcttcttatccggatgcggccctggtcgagctgaaccgcaatttccgctgtgatgtcaacatcgatgagatgatccagaaattcatgcacagcgatcatgcgttccatctggaggacgattccgtggtccgcttcatcacggccaaggacctcaatgagtcttatcatcacgcgctcgtgctcgcccgcaataacccgcagatggtgttcttgagccgggagcatttcacgctgcttccgttagccgatctgctggagcaggagggcctgccgtttaccgtttcggattttcacagcttcttccgggatgagacgatccatgatctgatcgagctgttccgtctcatgctcaatccgcgcgatctggaggcgttcagtgcgatccagaagaaggtcggcttcggcttcagcgagcgcaacatcaatgagatcggcgcgctgatgggggcggatccatccttggacatctacagcgccatcgtcaacagcaatatccgctcatcggtcaagaaccgcgtggtcgcgcatatcgaggagatccgcatcgcgcagcatctcagctccacgaagctgctgctgtatgtcctcagcaagctccattatgaggatcatatgaagcagcgcggctgcacgctgaagagcccgaacctgctcgtcttctcggtgatggcgcagcgttatgagcggccgatcgaactgctggcgcggctcgagcagctgacctcggtcggcagcgatcagatccattacctgcagctgtacagcttctctcaggtcaagggcaaggaatttgatgaggtctgcttcttagactgtctcgacgcattctatcatgtgttcccggatcaggagaatgagcggcggctgttttacagcatcctctccaagatccgcagccggatgtattttctggtcgcgcgcacggcgttcatgcagagcatggttccgcatgccttcatcaacgacctctaccgcttgatgaaaaagaagaatgtggaagagaagccggtgcgcaggacggtgaagaagcagccgaaccgcaccaacctgaagccgggcaagcgcatcgtgcattccacgctgggaaaaggccgtgtgcgccgcatcatcagcgatgatgatgagatcgagatcgtcttcagcgacggcgtggccaagcggctgaatctgacttcctgtctggacaacaatatgctttcattttgaccgtacctcgcgtacggtttttttacggttttgttcattcagccgtcattttccacacggatatgcttcattccgatatgttagaatgcagaagataaggggacaaacacatgtatatcttaaaacatgccgtacgcagcatctgccgcagcaaaggacgttcgatcttgatcggcgtgatcctcttcgtactggcgctttgctcatgtatcggactgggcattcagaaagcggcggacagctcgcgcgcggcgatggaggcgctcaccaacatcacggcgacgatcgaaacggaccgccgcggcatgatggagcaggcacagccgcc

SEQ ID NO: 1108 - DNA, 1686 bp, Unknown
  16S sequences of unknown bacteria
agccctttcgcatggaaatcattaagacgcaaagacttccagccccgaaaaaagcgatcaagccacttatgcagtgcgtaagctacagcgcagcggcaagcggcccgcacaccggctatcagggcacggatgcagtcacaaatctgcctggtagcccgtacagtgtgcggcagcagctccgacacccacccaaggggtgggtccttagggcgggagcccccgccctaagcggcgtctttctttccatattctttcttcgccgaagaagaaagaatatggcccccggagggcggtagcccgtttgcatggaaaatattaagacgcagcggcttccagcagccccggagggcggtagcagaattgcctggaagaaattaggataagaaaaatccccaaaaaactgggaaacaaattttgcaggaaaaaaccacacgaaaggagtttcgtatatggaacactatgagcgccgcgatgcgcgggatgtgatggaggctttggcgacaggccgggagggcctctctgccgaggaggccgcccggcggctgcaaacgcatgggcccaatgggctggcggaggagaagcggcagggagttctggcggtttttttgagccagtttaaggacctgatggtcattattttgatgatcaccgccgtcatttccttcgtcaccggcagccgggagagtacgatcgtcattctcgccgtgctggtcatgaacgccgttctggggacggtccagcattttaaggcggaaaagtcgctgcagagcctgcaggcgatggccgcgccgacggcgaaggtcatgcggggcggcgtgacgcgggaggttccggcccgtgagctcgtcccgggggatattttgctgctggaggcgggggatctggtcgccgccgacgggcggatcctcgataacttctctctgcaggtcaacgagagcgccctcaccggcgaggcggagagcgtcaacaagacccacgaggtgctcaccggcgaaaatctcccgctgggggatcgaaagaacatggtgttctccgggtcccttgtgacctacgggcgggccagcgtcatcgtcacggcgacggggatggagacagagctgggcaagatcgcggggctcatgaacgcgacgaagcggcgcaagacgccgctgcaggtggccatggaccagttcagccagaagcttgccatcggcattttcatcgtctgcggcgtcgtcttcgccctgagcctggtgcggaggatgccgctgctggattccctcatgttcgccgtcgctctggcggtggcagcgatcccggaggcgctgagctcgattgtcaccatcgtccaggcgatggggacgcagaagatggcgcgggagcacgcgatcatcaaagagctgggtgccgtcgagagcctggggtgcgtcaacatcatctgttccgacaagacagggacgctgacgcagaaccggatgaccgtcacgaagctctacgcggacggcgcgctgctggagccgggggcgctggactttgcagacgacgcccagcactggctgctcaagacggcgctgctggccagcgacgctgtcagcaccggcggtcaggagatcggcgacccgacggagctggccctggtgcatctggggcacaagtacaccgtcgacgagacggagtaccggcgctatcacccccggctggcggagc

SEQ ID NO: 1109 - DNA, 7072 bp, Unknown
  16S sequences of unknown bacteria
tcatgcgaagaaaatcgtcccttttcgccgcttgggttccgcttaaaccttcatcggcataaattcctgcaaaacgccacttcggattttttgcgatagcgtccgtataataggcaacctgtgccttataactttcaagttgatcggaactatccgttgacacacgacaatatgccgctgtacggagtatcgaaagttctgcgttcgccgctttctttttcggatccgcttctattcgcgttataatcttttttgccgcattcactgaacttttcacctcccatatcgcttgaaacaacgcttccgttcataaatgtaacggttatgcttccgttttgctctatttgcaattttgaaacatactcgttcaaaaaattttcgcttacaagaccgggagtgctctctgtttcttcttttatcgcactgagcaattgttccttacttgtatcatccacctgttctttacaatgactgtattttaactttgctaacttaaaaataagattttttcctttgttaaaatcgggttcgggcgaatccataatcttacggagttcgtttctgcattgtatttcctcaaaattatacgaactgcttttacctgaatttcgattatccaaaagcgacgaatcgtcttttattgctgtaaatatttttccaaactcggcaaaaatcaatgcatcatctacatagacgtcatttttacagccgtttccgcatatccacttttctctcgaccgccatttcgttcgccttgtcatcaactttccgcattgggcgcaaacgatgttctttttcagatattctatatttcccgaaaaatgctctttcttaaaacctttcgtgttttttaagccatacgcactttgaaacaattcgttcccgactatcgtcggataatcatccgctccgatatactttttgttttcgattatccttgaaacgcgatttttattccaattacagtttccttgaaaaaaatccacgttacgcacggttagttcatcggctatttcctgtaacagtttccctgcggcatatttctcgaatatttcgcgcaccacaacggcttcccgatctataacgcaaattttattcccgtctatcccgtatccgaaactaatcattctatttgccatttcacacctccgcgctgaactctaaatctcccttcaatacaaaagtgattgcaccgctttcttctatataaatttgcttgattattccattgaaaatatctttatcgaattcggttatccccacaggaaattgctgaagatttcttttaagctctctcagcctttctatacagcgctcatcgtcgtcctcactcaccaaatgcgcccgtcgcgttttcaattcggatattttctttttaatcgtatccgttttctcaaagtataaatcctcgttaaacgaaccttcggaataaagagtagtaaacaaactctcctgtgcgcttaaaacagaaatatctttatcgatttgcactatctcatcgtttccacgatttattcttaccttcagcatctgtaattgggcaatggtttcatcgataagacttttctcgttctgtctcaccttgttatacatcgaaacaaaagccctttctatctgctcgttcgacctgttcggcgtatggcagacatcaatactcaaacctttttttgaacaactccaaagcattttatcgtttctgacgatagaacggtatgcccagccgcaatgccggcattttatcttccccgagaagaatgccttttcttttgtcccgcgacaaaatgttttctgtcgcattttcttgatttctttaaccttgtcgaactcttctttcgttataatgccttcgtgcgtatcggaataataaaagctgtccatctgccctttgttcggacgatttcgtaacggtaaaacgttcggcgtataagtcttccccattatcatattgcccgtataccgctcattctctaaaacataatttattctaccgatattccatagcatatccccggtttcgtgcgcttgcatatattttactatcgcgtttgcgccaattccggacaaatacaaatcaaagatttttcggatgtttcgcgcttcatccggttctacaacaagctccccgtctacaagtttatacccgtatggcgcaatgccgagtttatacgttccctcttccatccgcattcggatagactgaaccatacgtttcgataaagacatcgactcattctgagcaaacgcactctttatgtaaagaagcatttcggaattcatgttttctgtatcgattttatcgttttcaaaaaacacgctcactccgtaagattttaattctcttaccgcttctatacactccaacgaatttcgcgcaaacctcgtaacgctttttacaagtacacggtctattttcctgtttttgcaatctttaagcagtcttttaaactcgtctcttttatccatcaacgtgccgctgatgccctcatcggcataaatgtcaatgagtatcatcttcgggtttgactttatgtaatcggtgtaataccgcatttgcgttataaacgagttgacctgatcggttttatccgtagacacacggcaatatgcggcaacgcgtattttatccgttttattcccggtggttgccgcaattaccgttactctatcggatatacttttataatcattagccaaactcattttcttacgtcccttaaacttattactcgcaccgatagcctttttgctactctttcgtttaattctttcaacacggaatattcgatattccctgctttataggcttttctcataatactccacgccgaaagatataataattcattattcgcaccgttctcttccgcttccatttaagtcctcccttacaatgaagcgcaagaaaacagtattcggttatatcaaggcataaacgcttacgctccatcaattttgattgattggtttttcacgtctatgcctttcgacataccgatttgtatttagttatttcttattttctttctcgacttccgctttcaaggcttcgtagccggcgaagatcaactgcactttcgtgatatggttctttgccaaaaattcgttgatttcttcatataaatcccgcgggatcatcgttccgaaatttccgctcgtttgcttgcgcttatccttgttgcgttcctcgtaacttcttcttgccgctctgcgcggcgttgtttctttcttttccataaaaacctccgttttaaccctgtgaagtgatggcacaaatcaacgcacctacgatgttcattacgaaatgtcctgcaataagtacgcctgccaacgcaaatctgccgatagttccaactacttttaacactttcatattgatacctccgttattttacataaacgatttcatttaagatttcttcttcgataagcctttgcatttccgtttcccgtttcagattttccataaaatcctccgactttttgaaccgctcttctttcgagaacttttcatacatcgtttcgtacagttcatcggcggctttatctacgccgtgcagatattcgggaagattagcaatcgtccaatcgattcctttatcctccaaatactgtttagcaagcgttccgtacttgccgtaaacgtgcttttcaggtttaacagccttttgataaaccttgatttccgccacggtcaacccctcgcccgcttccgcttttcgcattacttttgctttgttcatagttccacctccgattttctttcatcgtatcaatacgatagcacgcgatccgtgatttgtcaagctgtttttataaatttttttgtgaaatttcggctaatgacaaacttttttctttttaccccgcgattaaagccgcgatgccgtttacgagatacgggcaggcgactaaaataaccgctatcacgacaagaccgacgatgtaatttttaagcatttttcttgctttttctttgtcttcgttcttctgcgcgataccgtaaaacactcccatcacgatactccaaatgccagcgcacgcaagcaatacccaccacatgtacgggcggtattgctcgaacagatattccacataagaggatacttgtccgtattggtcgcccatatcttgtgaagtaaccgcgccgcaattcgtgcatatatacgaccgcacgtttctgccgttcacctcttccgttcccgtgagttcgtagttatgccccgttgcgggaatatccgaataatactctttctcgcactttgtgcaatggaattttctctcgccttccgtttcgcaatgcggttcgcgcacgacttccgtttcataatcgtgtccggttgccggaacgatgttgtctttatattcgtttccgcaagacaaacaggtatggagcgtataaccttcgtcctcgcaagttgcgatataatacgaatcggtgaatttatgtccgaccgctttcagaatttccgtctttacgcaatcttcgcaacggcggcatttctttccgcgatagccttcttccgtgcaagtcggcgcaacttcgatttcctcatagtcgtgtccgagcggcgaaacaaacgtatcgttatagcccgtcccgcaacgtgaacaaatatgcgttgtgtaaccttgttccaagcaagtgggttctacaatctccgccttataattatgaccgagcgggcttacgatttttgtttcggtctgcggacaactcgtgcattttctttgcataacgccgctcgccgtacatgtcggtttcgtcagacttgtccattctccgaaatcgtgtcccgttgcgtctgtgtaagagtccgtataggtatgaccgcacctttcgcactcgtggatagtgtttccgcgttccgtacaggacggatctacaacgatgtctttataactatgaccgagcgcgtccgtatcccgttcgtcaacgtaagaacataccgaacacgttctctcgtcttttcccaagtctacgcaggtaggctcttttacggttatccactcgccgtatcgatgtccttcagcttcgacaaagttatccgtataggtgtttccgcaagttttgcaagtatatctcgtataaccttgcgcagtacaagtcggttttacgattttactctcgtagtcgtgtcctttggcttcgataaaatctccgtcgtaactatctccgcaacccgtacatttatatatggtatagcctttttgagtacaggtcggcgcaaccatagaataccttgcatagtagtgatctaccgtgaatttatacgttgtcgaacggttggcgtcgttggtgattataaaagtgtattcgccctcttgttcaatccaagttccgcttgtatagcttttcccgttgagcgttgcatagcagttactcgccgtccaaatcacgcaaaccttatgactgttgtccgaccttactatcgttgcttcgggtgcgtcgatactcatatacatataccaagtatcgctcctgttgccgaaaccgtccaccgcataaaaaccatacgtgccgtttaccgccgtttttgaaaagacgacgctcgaggtggtgcttgccacaaacgaagtgctgttcggcgttttgtaatacaacgttacgccgctgtaattatccgaagcggttactgtaaacccttctttcaacgttttcccgaacccgccgaccgaacttgtaatcgtaggtcttgtgtgatccattgaaatcgtgtaggtctgcgaagcgttccccgcgttatccacgcaatagaacgaatatgcgccgtctgccgtcagttgcgttccgcttgcgtattcggtataactcgacgcgccgggctttttaacgtagattgtttttactccgcttccgctgtccgccgccgttgccttgatatagtttgctatgcttttgtatccgttcgataccgaaacatctcccgaatataaagtcattgtcggctttgaagaatcaagcgtaatgcttttcgtcgcagaaatgttacccgctttatctacagctctgaactgatacgttccgcttgccgcgcttgcagaaatacttgttcccgaagtataggtcaaccaagacgaactgctcggctttttatactgcaaataactgattccgctcccgctgtccgttgccgaataggaaaacgtctgattcgtgtaacttcccgtaatttccgtaccgttactgttcttaatctttcctgtgggttttacggtatcgagatacagaaaatatgttcttgatatgttgcctgccttatctttggcatagaaagaatacaaaccgttcgtagccgtacttgctatcgtagtagatgttcccgcactcgaataagaattgctattcggggatttaacgtacaatgcactgacgccgctgacggaatccgaggcggaaacgtatgtagacgaattcgtatattttccggtagaagaagtcgccgcacccgaaatcgtcggagcgtttgaatccaccgtaaacgtaaaatatgcgttaaagcctgcggaatcatactgtcttgcgtttacaagccagcctccgcttgcactgaaacttgccgtatactttccgtcggcaagtcccgttaaggttatcgtttttgttccgctgccgacgccctttcccgaactgtcggttaccgaaaccgtaggcgttccggaagaagacgtcaacacgatcgttaccgtgctgctttttatacagccgtcccacgttgccgttcccgacgaacccgaaccgtaaagcgaaacggaatacgtcgaattcgtaaactgtcctattcttgccgagaagctcgtagacgttccgcttcccgtagttgatctgccgccgttactgctataccacgtcgaatatgtaatgggtatcgcatacttaggcgtagttactgccgccgcatacgccgtcgtgccgcttgcaaacagacttgacaagcctacagcaaaacacaacgcgaacacggcacacaacagcgttcgtaaaatgcttttccttttggtttttaccatttaattgccctcctgatacaatataattgaccgaaaaaagtgcggtatttgaattagcactttt

SEQ ID NO: 1110 - DNA, 10914 bp, Unknown
  16S sequences of unknown bacteria
gctgcatacaaagcacaactaaaaccctcctgatggcactgatttttgtgtcatagccacatatttacagctttacttaatcaaagcatcgcactgctgctccaaccatttggtcaactgctccaatccatactcatcgagagaaaatgcttcggagcgcacatcctgcgccttttcaaagcagtaggtccggtaagcgtatgctttcagcgcgccatcctcgggcgaaatccggaaccggaattcgccaacgctgcctgtgaacacatttccgcttctaaaaaagtcgaggccccggatttcaatcgcgccttctttcaccgtgattcctccaaatctacaggctttttcaaccgtttgccgcggttatgatgatatcacaaagccacaggctttgcaatgaaaaacgccggagtatagccgaacgttccaataaaagagggggacgcccgctgggcgcccccctcttttattgtgtgttattccttctgcttgcgccggtactcctccaacaacatctggtactttgccttgatcgatccgttccacccagcggccacatatttttctccggcacgcagccgctcctcaatcggcagcttttcctccaggatttccatgacgagcagccgcctgtggtcctcctgcgcatgtgtttccaggatttcaatgcgcgtatccatccggtcaatactgtccttgagcgattcgaccgcgccgcacagcttttctgaattttcctttccctgcgcgcggtcttttcggccgcttgaatgaatcgccagcactattggagtcaccgccgtcagcactgcgacaagtaacggaacaaaccgttcaagcagctccatgccccagctcccccagcatccgtttcaccgaatcaagcgccgctgtcaggctgtcacgcaagcttgtcagctcagacgcgcgaattgggatcatcccgtttcccggagtatccggcttatccccgcgcgtccagccattgagcaggtttgccttgatgatctccggataatcccgatagcaggcgttgatatcgaccggtacggaaatgccgtccacacgccctacaaagccccgcgcgtctccatgatgctgccacatcccatagctgccagtataggtgcatttttcggcgtactgtgcaacccacttgtcataagccatgagctgtctgtcgtccacccagtattgcagccagtttgtcgaggcgtacagccccgcgtagtacccggcatcctccagaaccttcaggaacgcctttgccatgtcggtgcgaagctgttttcccttgcccacgccccaggcgttaccgcagggggattcgtattcctggtccatgtacaccggataggtcgggcgcagaccgtcgagcgccctgacgaatgccgccgcctccttttgcgcttcgacgaccgtcacggcgtcgctccaccagtacgcaccccagtcaagccccgcggccagcactgcgggcaggtatttttgacggaacgtccccatctcccgaaggccctgcccggccttgatgatcacaaagcggacgccgtccgccttcacacgctcaaaatcaatttctccctgatgcgatgaaatatcgatacctttgatgacttgtcccacctcataacctccaaatcttaaataaaggtacaattatcaagcgattttttaacggtttttatcattaatgtttagttggtcaagccgccggtcagatgactggcggcttgataatttatttgtcacgattcggcgtcttatattcgagcgcccgcctgctgtccccaacgccggccgtcgtcgggtcggttatagcgttgaatacgctgactaataccgacagcaacacaacaggattctgtattgcgcgaagccacacatcccgcagcgccccccaggaggtcatgtcctcccaggccaggccgaagtatgccagcatcggcagcaacagtgccgccgctatctgtacccaccacagcgggtttttaatacgtaccttccaattgattttcataaaattctccccatcatatgttactgcacctccacatcgagagcggagaggacgtcctgtacctgctctttgagtagcgccgggacatcctccagcgtctttttacccttgataatcaaagtagcgtaaacaactgccattatgtgcacctccttctggcaaaaaattttggcgaggaaaagaaaaaagctactcattttcgagcagccctttcacttcggcctgtagggccttgggtacgtcactgattgcctttaagcccttgcgaatcagctccgcgtatactttagccatttacctgttcacccccttccagagcctccacacgcgcttgcagcgcaagcatggattcatacacttcggccagcgcaagcaggtcgtccgtgttctgcccgtccgtcgcctcatatgcctcaaccagcgccatctgcgcgtctgtcatctgcgtttccagagacgcgatgcgttcgctctcggagggtggcgcaggagacggggcggggtgctccgcctcccatgcctcgatttcctcgcttgtggcggattctatccacgccgggctattccaggccggcttgataaatccatccgcaccggcatgggggcgcatcacaggcggcgctgcatctatcaggcgttctccttccgaaagcgtgtagtactggactttttcctgcaatttgccggtttcatccggttcattaactaccagcacaagggttttgtatctgttttgtgcgtcaatgacgcagcaatgtttgtaatccatgctgtcattcctttctcataaatgttcgccttagtctaataaggcggagatcgggagccggcctttttactctttcccgttccagagtggattttttggtagtctgacatactcaaaaaatcaattcggagaagttatacttagaggcgatattgcaagagatgccggagcccctttttcggccggcgacgactatgtatttggctgtctgccggaaggataccgccccgggaataatgcgggagcttggatagtggtggggttgagagctgcgaacaataccgccagtatattaggctgcatacttattaaacagaacggtgaagtatcaatgcacgcaccacgtgatacgactacagagtcaatcgtgcttattacaagtattttcactgtataatattgctttagccttacgtatctgcataatcagatgtaaaatccacattgcgccgcaaagctgcggacttcgataccatatcccacatagaaccagatttcgccgctgggataaagaatcaggtttcccatcatttttgtgttgtcgccttcgcccttgccggcccaaaccgggataagcgtgttatctttcgggcggaaaccttccggcagatagccaacaaggatattgtggctgatatggtcttcggtttcgctcttgtagatattaaaatcaagccagaccatcccgaattgatcttttgagtatttagcgcgccccaacagctcattgtgcagcgtaaggtcaaacctttgcggcgctgatgcgtgggccagcagcacccattcttttatttcatactcccaaatgcgggcaacccataccttttttgctagtcgcggggaggtaacaatcagcgtcccgaacgtacatccgccatgctctgcgccgaagcttgtaagaagctgggcgtaaaaatccccagtgttataatccgtcatggaatgcgccgcatcatccagatgggcgtttacttccgctgtcatggcggcgatatggtaaagccccgcgtgtgggagctgccggggcgatgagaatgccgttatcacagctccggcgtaatagtcggactgcaaggttttaaactcctcaagcgccgccttatttgacaattgcgtattaatatcggataattcatcccgtatatcagggtgagattccacactcaggttatgggccgcgatatcagccttggttgccaaaataaccgtgggatcaaccttccactccatagcctcggggctggaaatcgtcagtgaaaaggtaagctctatttcatcagatatcccctgatcaaaacggattttgggggtggaagccatatttccgatcccgatcaagcggccctggtcgtccataatccccatttcacgcatgacaaagccgccgaccgtagaaggaagcagagcggtatagttgataacattcgggctgtcaggatcgatttcggcattggagacaacccctctccacacctcgttgcgcagctccgtcatatctggcgttggagcatattcaatgccccctccatctccgacgacaaaggtggtaatattcacctttgttccggttaaaaaagcgttggaagccgctgctgttcctatttcagtagcaatggtgtaatattgcatgcttaatctcctttcggctgaatttgaatgcgtctgccgatcctggtaaagaacgccgtatgcagaccggcggccaatgaaatattttggggctgatagggccgtacctttatggcgcgcccgatcatagcccggcaggggaggatgagccgcccctgcgtctggcgctgcaaacgaagggccgccgataaatgcgccggttttaacagccgcacaaacgcggctgttttttccatatcgggaatgacctcgacgcttttgatataaacccggaagcggtattggctgtaatactcctcgatcctgcaccggcatccggtcacggcagtcaacagttcttccaaatactttttagtcgccggcggcctggaattcaactggatgatcagggcggcgatccgctccgccaacgaccccgaagggttcagcccgaagatagcttcatagcgtgatacagtaacacggcaggtggatatggataactctgcaatcgtctgcttcacatgtgcggaaacgtcgtccagcacgggctgctccgcctgtagcagctccgctgcctgcgacatgttaagcgttaaagccgagagtaaattgatggtattaagcatggagatccacctcgccgagcttacaaaattgttccgggccaatttctattgtggaggtttgcccgttcagcagcagatcgcgcagatcgttaacgcccggtgtgctgaaaatcagctcgccgattttgtgataacttagatactgcgaaccggcggtatccagaaaggcgatctgcgccagataagctgtgatagcgttctttgcggcctgcacaacggcatccatctcatagcccgatgcgagtatcagcgtcccctcgatgttgattggcagcggctgcgcttttgcgaccgtcagttccgcgccaattggcttgttgtcaagaatatagctttgcaccctctccaccagcgtgtcgtccggtacatcgccagtgtccgagataatcgtgactttaacggtgcccggcccgttccaggtaccaaaacagcgcgcgttcccaactccgctgacctgcttggcccagtagatgtagtggttttcgtttccgctcgtaatcggcttgcgtatcttttccagcagccgggcgcggaacgccccgtcgctctcgatatccgccccgccttcaaaagcctggggatttgtcaccgactcgacacccgggacggcggaaatcaaagtcccaaccgcaccggcagccacattcccaacgcttccgggcgtccggcaaaccgcattgaccatcgcctcgccgtttgctcctatccgcgttgccgccgttgtctcaaacgacagggctgcgcaggcggctgtgaaacccatggggatgtatgtcccgtcagagccggtaaacttcagtttccctgttgacgcggcggcctgccgcctggtttcattgaaatccatggcgcgcctgtccagattttcccctgcggccgtgtccaggaaagccgcgtcgagcagcggttcaatctccatattgtggatgcgcgccagttcctgcgcgaccgcctgcgcattgtccatactgaaggtcccttcgatcgtgctggttggattctgcaggcggtctttgatgcgatcccggatttcttcgaaagtatatcccattatacgcccccctcataaacgtaagactgcctcatttcaccgtagactgtagtacagtcaaaatatacggtcactccggcccggctgaattcaaaccggaacccattcaattccacaatataagggtttaccatcagggcttcaatgataaagcggcgaagctcgctttcgaggatatcccggctgacagcctgccccagcagggtatgtatctcgctgccgtatgcttttgtatacgccacgtgccggaaccgtggtgtaagcagcgccttgtaaatccatatttgcaaggcttcgttgccctcaaccagataggttttcccatccttcagcttcagcgcgttggccttgaagtcgtaggcgtattccctgaacagcggcaaatcaacgggatcgctgttgacggcggcaagctccggggatatgaacgggaatatgctcatgaaacctttaccaccttctcctggatataaaattccgcgcccgctttaacgactgaaaccatgtcgcccacacggatgacggaagcttcatgatattgctcaagaaacgtcaaaagctccaccggaccaggagccatctccggacattttgaaaaaagcttccgggcctctgaaaagaaaagtctgattttgtcaggctgatccgactccagcaagattgccggattgatatacagattcttacaaacaggcacgccgccgattgaaatggtcagaggagccgtacttgtcacaatgccgagcagccgctcctctgagacatttttgccgttggccggctgctgcccgcgccagattgtgtccagcatattgctggcccagttatccattacacgctgcctccctcattttgttggatttccttttcatccatcatgcagtcaaatgccaaggtgatatcgacctcctggctggcattcttaaaggtgtgggcgtcgctttctatgaaaaaccggccgtaaagccccgtgacaggttcccggacaaaaatggaataccccgcccggatacggtcgtcgctgagggcttttgccgtggcggcctgctcaatttgggccagcatgtttccagcctcggcaaaggcgtccttcccatcagcttgctggcatatcttttgaatggtcccatatttctgcctggatgcggcgtcctctacaacccccacctgattgccgctgctgtcaacgactaccacgcggtttaccatttttgtcatggttgtcttatagttggcgtccaaaagattatggccgccgtccagtaggataccgcagggctttcccatctcgatgatgttgagtgccccaagttccattacagggatgtattttttcccattttgcctgctggcctgcgtatagggggccataatcgcttcatatgcggatttcctgatacatggataatagacggcgatccccgtttttgccgcgctgccgaaagggattcccaaatcgccgcaaactgtctctgcgatcttctccggggaatcttcaaacacccggctgatatctgattgaatcagataatacagcaggtcataggcgagatagctgaccgtgggcgaaccagcggtcacatcaatatcaaaaataacgccgcgaaacagttcttcgccaccatcggtccgcatcagaacagcgtcgccttcatttaatgccaccttgggaagataagggtcggaatgtttattggccagtgtgaaagataatgttctggaaacctgcttggtgtcgccgctccaggtaacggattctaccatatcgctcaagtcatagcctcctgccagcagaatcatgggatcagcatcctatccccgatttgcagaagctttgggtcctgattgttgttggcggcgcttatctttgtccattgggtgccgtccccataatatttgcaggccatataccacagcgtatccgcctgggattttaccgtatggtaccttggagcggtgctggtgtcaggccggtcgttcaggccgttatcttttggcacggtggatggcatttggacggccggaacatccagctgcctgtattcctttaattccagcgtataatacacatcccgatccccctctttataggtcgtggcaaggcgctcgattgacgcggcgaaattgatatccgtaccgccgatgataagccgcacagtctttttccggttcttccatttttgcagctgggagatatattcttccggctccctgtccgcataccgcgcgagcggggacggcgaggcgggaaacaggctggaaaatgaaaccgtaatcaacccgcgattacccagcaaattgacctcgcccatattcagcagggtgaccgtttgattcacctgcccctgcgatatttcaaaagagaggggattgaccggcagggtaatggcctggctgcggtttgtaccgctgatttcaatggcgcgcatttcttcattcccccttatggcctgacaggttccggcctcatattcctggcgacttcggccagttttttggatatggcggaagcgatcctgtcaatatccgcttcctcacggacaatgatttgatccgccagtttatcaacagtgatctgaatattcttctgcggcggttcttccatgctgcgatccggtacgcctgcccggaccggcgggatatcgccgccttcgccgtccggcggcgtatacggcaaaacggagccgtttccggctcccagcccctgtgacaacagatcagagattgcgccgagatgtttttcaatattgtcaagggctggcgcaaaattcccgccggccgcatacatgaccgttttttccgttttgttttgtatgatcccctgcactgcaggccgggccgcgtttttagctacctggacgctctccttattcggcagcaccctgctgccttttggaagctccaccagctccgggccgcgttcccccacccaggtagggccgccgcgccagttattcgtaccgcctgcgttggaaccgacctcaccgccgccgtcgcctccaaatccaaacaggccgccgatcttatcggcaatccagctcaggccgttcccgatgccttcaacaatgggcttcactttatcccacacgctgccgacaacattggcgattcctgtaaagaccgtttgtacgacgttgaaaagcactttaaacacactgacggcaatatccaaaacaggggagataacagaccaggccgtggtcaggatatctgccactacgggagccgctgtgccgatgatctcctgaatccaccccattttaccgccgacaaactccagcacggagccgaccttctgaccgatcccatcaaaaattgtctggaatacgggggccagattggaaataaccgtgccgatgccctgcaccaggccggaaatgaccggggccgccgcgctgatgacctggccgatggtgcttacaaccgtctggatcacagggagcaccgtagggatgactgcctgcacggtatgaataatgctggtgacggcgggcatgactgctacgcttacctgctgcagggtcgtcttgacagacgctccgaagctggcaaactgcggtcgcatggccgcaaagccactcttaaaatccccaatggcgctgaacaggtcgtccaccaggccgcccattccagagggcaggaagctgacgataccatcccgtaggctctgaacgatcgccgcccccaggctcttgattttgggggcggcgatctgaatcccggtctggatggcctctggcagggaggtgatgacgcgccccaccatggggatcgcattgtccatcaggaaggtggaagcggtggagaccaactccttcatggagctggtcacatccccgccaatggccatattccccatcaagttctgcgcggcggccttcatagccgagaaggaaccgctgaaggtttcgctggcttctttggccgttgtccctgtcacgcccaggttctcctggaccgcgtgtatggcgttgtagacgtcggccagattgtcgatatcatacttgattccggtgagcttctgcgcgtccgacaggagcctttgcatctcctccttggtaccgccataccccagcttcaggttatccagcatggtgtagttctgcttggcaaacccctggtaggcgctctggatggactccatgtcggtgccgaacttgttggcgttgtccgccatatcgatcagggccatgtctgcgactgtggccgcctttgcggtgtccccactcaggctgctgatcagcgaggcggagaagctggtcacctgctccatataggcgttggcggagaggcccgccgtccggaaggccgcatccgcgttggcctttaccacgccagcgtcttgtttgaacagggtttccacgccgccgatgctctgctccagcgccgccccctggctgatggccccgcccatgaccaccgtggcggccagcgtcaccgggatggcgactgttttcgccagacctgtaatctggctcttgattttggacaatcccgccgtcacgccgtccttgagcttgacaattggcgtagcgatcatcttgccgactgcctttaccttgtttcccaccgccctgattttgtcgctgaccatatccttgatggccgcagcgatgacaatttttttgcgcagcggctccagccgctgccggagctgctgcgcggcccggttggccggcgtggcgtccaggcgggcggtacgccgtctttcccaggtggcctgcaattccctgcgtgtacgctctacatcgcgccggaaggcggattgttcctgcctgacgctccggaggactgccgacatgttatccctgattgaaatcgcgcctctgacaac

SEQ ID NO: 1111 - DNA, 17638 bp, Unknown
  16S sequences of unknown bacteria
gagcatgcggctgttaaccgcagggtcgttggttcgagtccaacagggggagccaaagtcccaaaggcgtaagtctttgggactttaacttttacatcttcactcttcactaaaaaacgcctttgggatttggaagtaatatgtagtagtgaaaagtgaagaagtccggagtctgcttcaccgccgtttttatatgttcccgttttttcttctgatcggagatggtattcgttaggagtatctatatgaaacaaatatgaggtgtcatcttggtgatattaaacggtgtagtttttaatttgatacagtaataaatacatggttttattcctttaggaggatagaaatgaaggcacggataattttaataatcattttggtgataagtatgttgatgttgaactcctgtactgctctatataaagggttggggcgatttggacaatttatgggtatattgtattctaaaactacaggaggagatgatactactaaaaccacaaataaacttgaagatctgcttgaggcaatagaaaatcaggatagttcagctattatgtctcttttttcggagagttcaaaagagcatatagaggagtttgaagcttcaacagaagaattgattaactattattcgggtgttcatcagtcgactgattcattaatcggagcgtcaattacccacagcagagatgaaaaaaccggtgagcaaaggacacttgcaaacgcttttgaagtaactacttcggagtgtgtttatcgtatttggttagcttggaatgaaaaagatactgccaatagtgaaaatattggaataaattatttctatatcataaagaaggaagacgatatcaacctttttgcagggtattgtggagatggcaaagaaacaccgggtataaatataggcatacaaaatacatggccggaccacgtgacatattttgaagatgatgaagaatatgatgaataattttctttgaaatctcaaacacaattttatatcctcgtgtaggcttcactctattggcataatccacgaaagcgagctgaagaaaataaaagtgtttgacgttctgcctgcacatctgagtacaatttgtcatgtagtcattcttctgcgcggcgtttattcagtttggagcagagaagaggagcagcgtgaaagcataaaatacgaaaaggcagccgcttcgcatacgatactttcaaaacagccgttccgcaatgcatcaataaaaagccgagttgaaagacttggcttttttaatgaagcgaaaccgacggcgcgaaaaaacgaagtgccgcttcgtccgtgaaagcgcatgaagcgatcgctattttttcgctcgccgaaaaagcaatagatttattcacagttttgaggtataattgtcttaaattcatttcattttaccgacggcgcgagcggcgcagcgcggctgctctgtttcacgctgcagtgacgaacgcgggagcggagagaaaaaagaaaggagcgcaccgatgagatattttgatacggtccatccggcagcggcggcgttctgctttttgtcggtactgctcgtttccgctttttcgccgagcccggcgcttcagctttccgcgctccttggcggcattgctttctgcgccgtgctcaatcgcggcaggcggacatgccgcgacaccgttttcgacatcctcctgtttctgcttgtcgccgtcaccaatccgctttttgttcacagcggcgcgacgcctctgtttttcctgaacggaaacgccgtcacggcggaagcggtgctgtgcggcataggacttgcggtcacgctgctttcggcggtcgtttggtttcgctgcttcaatattattatgacatcggacaagcttttgttcctcttcggcaggctttccccgaagatcgcgcttctgctttcgtccgccctgcgtttcgttccgctgttcggggaacaggcgcggaagatacgcgccgcgcaaaggacgatggggctttatgcatccgacagcctgaccgatcggctgcgttcggcgctgcgggtctattccgcactgatcacatgggcgctcgaaaatgccgtcgataccggatcgtcgatgaaggggcgcggctacggcttgaaagggcgcacctcgttttcgcttttccgattcgggaaacgcgatctcgcgctgacgctcgccgtcgctgcggcggatgccgctgtgatcgcggcgagcgcgttcggcaggcttgatttctcgtattatccccgcattgcggcgggcgagacggatattttcactgcagcggcaattgcagcgttcgcgctgctttcgtttttgccgttcatttcggaggtaaaggaggaagtgcgatggagatattgcatatcgaagatttgacctttcgctacccggacgcgcctcgcccggcgctgcagaacgtctcgctctcggtttcggacggagaatttgccgtgatctgcggtgtgtccggatgcgggaaatccacgctgcttcgcctgatcaagcgtgagcttgcgccgttcggcgagaaaagcggggtgatcatgtacgacggtcagccgcaggaggcactcgatctgcgaacggagtgcaccgggatcggctttgtgcagcagcgcccggaaagtcagattgtgacggacaaggtttggcatgagcttgcgttcgggcttgaaagcctcggacttcctacggaggcgatacgccgccgcgtgtgcgaaaccgccgcttacttcggcattgaggcgtggttccggcagaatacggcggagctttccggcgggcagaagcagcttttgaatctggcgggcgtcacggttatgcagccgaagctgcttttgctcgacgagccgaccgctcagcttgacccgatagcggcggcggattttatcactacgattcaaaagctgaaccgcgagctcgggataaccgttctgcttgtcgagcatcggcttgaggaggtgctgcctatcgccgaccgcgttatactgatggaggacggggcgatcggtttcgacggctcgccgcgccgctttgccgacagcctcagccggaacggagaacatccgatggcatcggctcttcccgcatcggcgaagattttccgcgatctcggtgaaagcggggaatgcccgctaactgtgcgcgagggaagagactttatttcctcgacctttgaaaaccgcatccgcgccctgaccgaaaaaagcgctcccgaacggtcggagaaggccgtgagggtgcaggacatacggtttcgctatgcaagggagagcgcggacatcctgcgcgatgtttcgcttgacgtttgccgcggcgagcatctctgccttctcggcgggaacggtaccgggaaaaccacgcttctcgggattctgtcgggtgcgctgaagccgtatcacggcacggtgacgcttgacggaaaaaagctcggcgcgtacagtgccaaaaacctatatcacaaaaatatcgcggttctgccgcaggatccgcagaccgtttttctgaaaaagacggtctgcgaagaccttcgtgagacatgccgtgcgatggaatacgaccgtgcggaaagcgaagagcgtatcgcggagatcgcggaaaagctcgggatcggcactctgcttgaccgtcatccgtatgacctgagcggcggcgagcagcagaaagcggcgcttgccaagcttcttcttctgcagccgaagctgcttctgctcgatgagccgaccaagggtatcgatgcttacggcaaggagcgtcttgcggatatcctcggcgatctgaagagcggcggcatcacggtcgttaccgtgacgcatgacgcggagtttgccgccgcatacgcagaccgatgcgcgtttctgttcgacggcgagatcgtttcgaccgatacgccgaacgtgtttttcgcgggcaacaccttctacacgaccgctgcgcaccgcatatcgaaggacattttcgataacgccgttttgtgcggcgacgtggtcgaactgtgccgcatgaacggaagaaaaggggggcgccgtgagaagtaattttcgaaagatcgttttccggattgccctttggttcggcgtgattgccgtcgtgttcggcggagcgctgatgtttcgcgggaaacattatgcgtggatatccctctgcgtatcagtgcttgttctcgtgcccgtgttccgctctttcgaaaagcgcgacacctcgtcaaaggagcttgttgttctctgcgtcatgatcgccctttcggcagccgggcggttcattttcgcatggcttccgggattcaagccggtgaccgcaatcaccgtgatcacggcgatgtggctcggaagggacgcgggatttgcggtcggcgcgctgtccgcggcggtctcgaatttctatttcggacagggaccgtggactccgtttcagatgctcgcatgggggctgatcggcttttcggcgggcgtgcttgcgggaccgatgaggaaaagccgcgccgcgctgtgcgttttcggcgcggcggcgggggtgatgttttcgctgcttatggacatctggacggtgctgtgggcagacggtacgttcaacctcgcgcgttacgccgccgcggtcgtatcggcgctgccggtaactgcggaatatgcggtgtcaaacgtgatcttccttttgattctggcaaaccccatcggcgaaaagctcgagagaatgaagaaaaaatacggactgtttgtgtcggcttagcgcaggcaaggccgacatcgttcggcgacgtgatgccgggcgaacgcatcgacggataaaacggggagctttcggtccccgttttattttgcagaagaatcggaagctttcgccccgaagctgttgacaaaacggagaaacgggacaaattgcaaaacagacggcgcgagacattcggcggggatttcgtcggcgcacggaatcagcgccgaatcggattataatataattttacattgcgcatcttgacaaaaaatgatgcttttattataataataacgcacgatatgcaacgcgcagtgcgcattcgtgtccctgacgaaaacttcgtcgtgatccgttatttgttatgatacatacataattggtgaaagaggtgtaatatgaaaaaacttaacgggatcgtgtgggggatcgtgctcgtcgcggcgggcgttctcctcggacttaacgcattcgggataaccgatatagacatatttttcgacggatggtggacgctgttcatcatcgtgccgtgcgcggtggggcttgtaaccgaccgcgacaaattcggcagcctgatcgggatatgtgtcggcgtatttttgctgctctgctgccgcgacgtgctcgacttctccatggtgtggaagctgcttgtcccgataatcgtcgttctgatcggtctcaagctgatcatcggaggaatcgtcggggagagaagctcggaggtattcaaaagaatcagagaaagcggcggaacaccgaaaaacggaaccgcagtgttctcgggaagcgacatcggcttttccggcgaggtcttcgagggtgcgcgtcttaccgccgtgttcggaggggttgactgcgatcttcgcggcgccgtgatcgaaaaggactgcgtgatagacgctgccgcggtattcggaggcattacggtcacggtacccgaggggctgaacgtcataattcgcccgaccacgatgttcggaggggtttccgacgacagagcgaataaagtctcgtcgggcggaccgacgctctacataaacgcgaccggcattttcggcggcgtcggaatcgagtgagacgcaatataaataaacggaggaaaataaaatgcttcagatagaacatcttacaaaggcatacggtgataaaaaggcggtggacgatctgagtcttcatattcgtcccggcgagatatacggctttatcggtcacaacggcgcgggcaagaccacgactctcaaatccgctgtgggaatacttcggtttgattcgggagaaatacggataaacgggcgctcgatcaaggatgagcccgtcgcctgtaagcgggttctcgcgtatatccccgacaatcccgatctttacgatttcatgaccggaataaagtacctcaatttcgtggcggacattttcggcgtgccgtcggaggagcgccgcgcgaagatcgacgattatgccgcgcgctttgagcttacggacgatcttgcacagccgatcgccgcgtattcccacggaatgaagcagaagcttgccgttatcgcggcatggctccattcacctaagctgataatcatggatgagccgtttgtcggacttgatccgaaggcggcgcaccttctgaaaattatgatgcgcgagctctgcgaggaaggcggtgcgatattcttttccactcacgttcttgaggtcgccgagaagctctgcgacaaggtggcaatcatcaagggaggcaggctgatccgctccggaacgatggaggaggtcaagggcgatgattctctcgaagacgtgttcctcgaattggaggcggagtgatgctgaagctactgatacataaacagctttccgaaatattccgcgcttacctctacgacgcgaagaagaacaagacgcgctcaaagggcgcgaccgccgcgtatatcgttctgttcgtgcttattatggcaggcatgctcggcggcatgttcgcatacctgtcgctgtcgatatgcgagcctctttcggcggcgggcatggattggctttactttgctttgatgggactgattgcaattttgctcggatccttcggaagcgtgttcaatacctattcgggactttatcttgctaaggacaacgatctgctcctgtcaatgccgatccccgtcggtgttatcatgacggcgcggcttctcgttgtgtatattatgggacttctgtattcgggagttgtcataatccccgccgccgcggtttatctgataaaagtttccgcgactgtcgggtccgtgatcggctcgttcatgtccgtccttctgatctcggtgtttgttctaacgctgtcgtgcatcctcggatgggtagtggctaagatcagcctgaagctgaagaacaagagcgtcataacggtgtttgtttcgataatgttccttgcggcatattattttgtttacttcaaggcgcagtcgctgatctccgagctgattgcaaacgccgccgtctacggcgaaaagatcaagggctcggcgtatccgatctacctcgccggtaaagccggtaccggcgatcccgctgcgcttgccatagtcaccgctgtcgtgatcgcactttttgcactgatgtgggtgctcatctcacgcagctttctcaagaccgcgacctccgcgggaaagaatgcgaagaaaaaataccgctcgactgccgtcgccgagagaagacttccgttcgcactgcttgcaaaggaattcggacgctttgcctcaagtccgagctacatgctcaactgcggtctcggcgtgctctttctccccgtgctcggcgcggtattcctgataaagggcggatcgttcatatcaattctcggcgagatgttcggtccggaattgagcgccgactgcatcccggtgatcgtatgcaccgcgatatgcgccgccgcgtccatgaacgacatggcggcaccgtccgtatctcttgagggaaggagcctttggcttgcacagtcgctgcccgttgtgccgtggcagattctgcgcgcaaagctgtccgttcagctcattctgaccgtcttcccggcgatcttctgctttgcttgtgcggttatcgtatatccgttcgcacccgcgcagattttggttatgcttctcgtcttgatttcgtatactctgctttcagcgctgttcgaccttttcatcgggctcaaaatgccgaatctcacatggactaacgagatcacaccgatcaagcagagcctcggcgtaatgcttgcgctgttcggcggattcgtctacgccgtcgcaatcccgattgcgtttttcacgttcggatataagatcggctttgccgccttcgccggatgctatgccgcaatcacgcttatactgtgcgcaattctgtacatatggctgagaaagaggggaagcgagacgttcgcttcgctctgatgtgccgcctgcgcggtgattcgataaaaaaggagattctcgaaagcgaaaaagacatgcgttcttcccaaaaggggggatcggcggcacgatgatacgtttccttcatctttatgcgaagaaaacgaagcatttatcggacaccgtttgagcggtgaatacagagaccgaatgctgcgcgtcagtgccgtactcggtcatccgggagctgcgggggccgctcccgtactccgttttgggaggcggtgcatcttcgggcttgcgggggccgctcccggatctcaaaaagtccccgctcggcgaaaaaaatcggttcgggcggtgactgacgaaaggaagctttcgcccggcgaaagaggtaatgatatgaaaaaatcgagatattcccgtgcaaggcgggcgctcatcttttggacgctgtttatcggaatcggcgcggtgttcggcgcgctctgcatgcttatcgacccgagcgggaagaaattttacatggatgccatgctcccgtattttcaggtgctgccgtttgcggacgtgctctttaccgatcttaccttttcggggatcgcgctgcttgtcgtgaacggacttacaaatctgacggcagccgcgctgctcttcgcaaagaagaagtcgggcgtgatactcggcggcgtgttcggcattacgcttatgctgtggatatgcattcaattctatatgttcccgccgaacttcatgtcgagtatctacttcgttttcggcgcggcgcaggcggcgaccggatacgcggcgtgggtgttctgctgccaggagcatttttgcgtttcggagaaggaatatccgaatatcggaaaagcgcccgaccgtcttgtggtgtatttctcccgcatgggatatacgaaaaaggcggcgctcgaggaagcagagcgcacgggcgcgtgcgtatttgaggtccgctcgacagaacgtaccgaaggaacgctcggcttttggtggtgcggaagatacggtatgcacgcatgggatatgccgattgcgggtatcccgtccgaccttgaagcgtacagccgggtcacggtgtgcagcccgatctgggtgttcgggctgagcgcgccgatgagaaccttttgccgcgcggcgcggggcaaaataaaggaagcggattacatattggttcaccatcagaagaacagctattttggtgccgcggaggaaatggacagactgctcggacttgagaacagcccgacggtgagcatttgctgccgccgcgggaattacacaaagtcggtatcccgtgtgccgcgcacctgacgcgcggcggacgtacagtcaatcctgcgccgatcgcgtctatcaactgcggcagccgatcccggactgtatccgagccgggacgcgcagaataaggtgtcgcttcatcctgccgaaaagctcgggtatgggttttcgcatcaatatacatcatatgagataaaacacaaatgaaccggaaggagaacggcgtgaaaaaatacgatctgataaacggtgcggcggcgcgcgaagagacgcagaggcttctcacgcccgacgagcttgtcacgatgaatcttttcgagctcatattttcgtttccggaagcctccgcatggacggatcacgaaagctttatcatcggtcagtcgaacgaaaaaactccgatatggatgtggctttcggagcgctgcgggagcgaaagcgcggaatgtgccgcggatatcatcgcctcgcgccttgaattctccccgagtgttcatctgaatgcggtgtcacatagatgccgcgaaacgcttgaatatacggaaagaaagggctttcactcacatcgggtgatggacatgaatgcatatgtgtgcgcacgggtcatctctcccgaatgctcgggcgaggcggtgttttcctcggaggaagaccgcccagccatggcttcactgctgaggcagctctgcgaggacggagaacacaccgtgatttcgcaggaggatgcggataattttgccgccgcgtcggtcggacgttccgagcttcttttgtggaaggacggcggcagagtgtgcgcaatggcgatgatcgcccacaggagcgcgtcgagcgcgcggataaataccgtggtgaccgaccgcgccgtgcgcggcaggggatacgccgggatgctcgtttcgcatatgtgcgaaaagcttatcggagagggcgtgtctccgatgctctacgccgacgcggcgaatccgtcgtcgaacagggcgtaccgcaggatcggatttgaaaaggtcggcgagatcacggagttcggtttcaaaaagctttgaccttacactcggagtatgaggactttggacgggtgaccgtaaccttggagtgaccctaccctcggaggtgcgaccgtaccttcggatgggttaccgtgccttcggagagggcgcgctcacataggaaattttcacgaacggcgcggctttgccgcgtgaggctgtaccgcatcacatcgctttttaccgtaaagctcatgacccgtttcgtcaaagaccgggcgcgcggcggaaaatcggccgcaccgctcccggagaggattgactttttcgccgatttactgtatactgtcggtacggctccctcgcctgtgcaagtctcacgccgccgcgcttcatttcgacggcgaacgcgggaaaacggatgcatgatcggactcggcgcggcggacgcaaattcggtatgaggtataccatggagataaaagcaacgggaaagcttacccttgacgcgatcggcacgcttctgcatgcgacaatgttcaggggaaaaagccctaaaagagagatcgtgaaaatttccgcggtgattgcgctgctgattgcattttctctggtttggctgcttctgttcgagaacgccgagttctttgcgtatatgcttgccgtcgccgtgatgattatacttatgcttgtatacgggtggtttattcttccgagaatcagatataaagctctcggaaacatgaaggacttcgtaaacgagtacacctttggcgaggagtcgtttacggtcagcggagataacggcgagtactccgaaaatacggaaacacggtattcggcaatttcaaaggtcatcgaaacggaaaaatatatcttcattttccagactccgagctgcgcgcttgttttggaaaaatcaacggtcgtcggcgatatatctcagataaggtacagactgagatcggtgcagaacatgaaatatatcttctgcctgtgctgagaatcgccgccatataaacggaaaaacacgcccgatatcgctttcgaccgtccgaacggtctttgcgcggggcgaaaaacataaaaatcacaaagagataataaagaaaggaagctttcgcaaatcggaagctgcagtgaaaaaatgaatttggtttttgcatttatcggacttgccgtcgcagtcgtcggaatcatcgtcggactgaaaaagtcaaagcgcatcatgcccgcgtgcatcataatcggcgtcgcggtcttcgtcgtcggatgctgctttacgatcgtgcccacgggatatacgggagtgcgcaccaccttcggtcaggtctcgaaaaacatcgtaccgcagggctttaacctgaaggtaccgttcgttcagacgatcgagcttgtaaacaacaagcagcaggatacgaagatcgtggcgcaggtctggggcgaatcgtcggagaaaattccggtatacgctaccgagatcaccgttacgttccaggtggaatcgggaagatcggcgtggatcttcagcaacgtgacggatacgaaggatctcataacgcagagtctcgtttcctccgcgataaagtcggcgatggtcgagcttcccgcctccgaggtcacggtacgctccaagatcgagcctcttgtgaaggaggagcttgcggaatcgatcgatgagaagtacgggagcgataccatttccgtgctgaaggtcgtgatagatcagatggatttcgaggaaagctacaacaacgcgatctccgataagtccatcgcaatgcagcgtcaagctcagcaggaaatcgagaacaacaccgcgatagcgaaagccgaggcggataaaaaggtagctatcgccaatgcggaggcagaggcggaggcaacgcgcatcgcggcggaagccgaggctgcggcgaataagcttatcgccgagtctctcacggacgagattctgaaatcgaagttctacgagaagtgggacggcaaactcccgagcgtcatgggcgacaacgcggtcataagcaacatcggagagacgaaataagcttattcggataatttcgcgtgcggtgagaggaagcgctgctccgggaaaacgaccgagcgaagaggataaaagctctgcggatactgccgcagagctttttgcgctttacggcagatcgacggattcggaaaaatcgcggaaaatcgcgcaccgattcggatgaagcgccgattatccataaaccgaaggtgcgccgccgcgccgccgcgccgtgcaaaagcatgaatcaggggacagacaggcggcgagacggcggcggaggagcgcagacaccgtaaaatcccgccgggcgcggtgacagcggcgtgaccgtgagcgtctgcgcggcggattatccgcggagaggtccccgaagtgcttcgctttcaaaacatgtcccgccgcgcgaaaaaattcggaaaaggtattgacaaagccgaagatttatgatagaattttatagctgtgtaaaacagactgaatttattcttgaattctgctggtgtagctcagttggtagagcagctgatttgtaatcagcaggtcgggggttcaagtccgtccaccagctccaaataatatgggggaattcccgagcggccaaagggggcagactgtaaatctgttgtcagtgacttcggtggttcgaatccaccttcccccaccaaggtgttcttgatatgtattaagaacacctttattttttatccaaatgctttctcttttttaatatttcttggcctctttcaagaaattattgcgaatggtcaaaaaacatgctataattatcataatgattggttgaggtggttttatgtctgtttcttatgacaagctttggaaactaatgatggataaaaagatgaacgaaacccaattaaaagatgcggcgaggataagtactaacgcagttgcaaaacttagtaaaaatgagacagtctctttggacacactttataaaatatgttgtgctctaaattgtgatgtcggagatatattgcattttcaataaaaatgtaatttcagcttgtaactcttggagggtagtatgtcatgtgaatttttcgacggcactgacggagccgagataaatacagaagaacaaaagaaagaagaacaaagaaaaaaaacatttaatggcctttgcgccagcgagtgggcagagctaagcaagagtgtttggaatgatgtatcgtctacaagaaaaaagaaacatttgaatcatggtgctacatttccggagaaattatgtaagagattaattgctatgtacagcaatcggtcagatgttgttctcgatccttttttagggacaggaactaccgtaattgctgcaattaaatcgcaccgtaactcaataggcatcgagctgacagatagattctataatgtagctgttgaggcgatagaggaagagacagcttcacagcaattgtcattgttttcacatgaaaacgagctgggaaactataagctttttaaaggagattgctcagaggttttgaaagagatctcggacaataatgttcaattaacagtaacttcgcctccgtatgctgatttgattcataaagtggttgaagacagaactttgcgccataaaaattcggcttttgtatctgataataatgctactactaatctctactctgatgatgaaagagatttaggtaacatgccaatggatgtatatataaaaaaagttgagtttataatgagagagttgtatcgcgtaaccaaaccgggtggatataatgtttgggttgtaaaagatttcagagatacaaaaaacaaaatcccatatgtcgaccttcattcaaagattgtagacgccggtcaaaaggcagggttcaaatatcacgatttaataatctgggatcaaaatcaacatagaaaacttgttttgttaggctatccttctgttttttatgtgaatcaaaaccattcgtttatagtcgttttgaggaagatttaaaatgccgacagatatagatatactgagaaaaatcgatagaatacatccgtatccagctaaattcccggttgatttggctatgaattacatttccaaatacacaaatatcggtaatacggtttacgacccgtttgttggttcgggcacgaccttactagcttcacgagctttggaaaggaatgcttacggaacagatgtaaatcatattgccgttttaatttcacaatttaaattgttatcgctatcacaaaacgatataaaagaattgtgggactttatagcgaggtttgaaaattcgttttttgacattgttaaaaccgttccgagattttattataaatcaatagatcattggttttgtgccgatgcaattactgttcttagcgtaattaaaagcgaaatatcaaagctgggaaaaaacgaacaaaaaatattctgtaaccttgttttttcatccattattaacacggtctcaaatcaagaaagtgatacaagatacgctgcgattatcaagcctaacttgaatattcaacatatattcgatgttttcgtaaagaaattcaaaacgatcctttctctgtttgaaatttataacgaaaagtttatcatgaaaagcaattgtgaggtccttctcagtgattcacaatattgtaatcagatactaaaattaaacagtgtggatttaattttgacgtctccgccgtatcccaatacatatgattattatttatatcataagcacagaatgaattggttggaatgtgatgttaagtactcaatggaaaccgaaatcggttctcggagagaatattcaagcctaaaaaaaccgcaagaaaaattttcggaggatttatttattatattcaattcatgcaatgacgtcttaaaacaaaatggtcatgttgttatagtcatgggcgatggtaaaatacagggtaaaacatacgaagcgaaggaaaatatagaaagaatttgttataaattcaattggctgcttacagattattcttacacttatttagaccagacttctaaatcgtttcaacaatcatatcgtacaaaaggaaaaaaagaacatgtgctggtttttaaaaaggagaaatagaatgaaaatagaacaaataagagtctatgcagaagtattggagcagggaattgattttaaagaatatatagaaaattcaggaatcaaatgttcagtcattaacatttattcgcataaagcgcgcggtgaaataagtgaaaccgattcaattgtaaccagaatacgcaaatcaaaagatgtggatgttctcatcacggcaataagtgattgtaaagagtatccgttactaatggttgaatactctactgccgttcctgccgatgatcacatcatgcagcgttccgatgtgtattattggggtgcgatttatcgtgttccggttatgaaaatatatccgttaagcaagggtatgaatcaagatttcggcggcggggataaaatcaaaccggaggatgaaatgcttatttcaaaaaggtttggtgctatattttacccgattttttggaatacaattgaaaacaccgatgtattagaaacaaaaaaatacgcactgtcatgtatatataaaaacactgaaatacaagaaaaaataaatagtattgttctgtcgtttcaaacatctaagagccatgatgatttctatatatcattattttcaaaatacgatagaaaaattgcagcagctgcatggttagaattttgcaaaaaaagaacaccgaaagatttgatttccgactcaacaagatttctttggcaggaaaacaatttaaaagtaaaaataaatcgttttggtcatgccatggatcctgacagaggcgtgttattctttgcaaacatgcttcttggttcgaaaaaagtaacttcagaaatacaaattaatcgaagtgcatcatataacgcaaggggaggatataaatctttatttgatagtgctccgcaggaaaatcaaatgcgcaaatatgtagaacatataattaatttgcagaataatataatgacggaagaaaatgctctgcacataataacttctgtgtggggattgccgttagatctgatggaaaaaacaagcgatggaaattattttataagcaacaaaaaattatatgatcttttaattcatcattcaagcatgagtgttaaaagtatattctttctttccactgcgctgattttaagcaatcaagcaagagaacctatatgcacaattaaatggagcgataccgcgataagaaaatacataaaaaatctgagtgtttgcaattattcggttactgacatagaaaaactttctttgagttctgctaaagaagatgtagtaactttttgcagcgtggaattatataaaaaactaaaattcgatttgcttgcagtaagttatcccggagcgcagggggatcgttgcgttttaaccggcagcggtagaaatgtattaagaacttatatcgacatcattgcttgtggaacagacgacaacggtgtaaccgtttatttagaggagtgcaaggctaatattgccgattcacaaaacgatgcagaaaagcttaatgagttcataaccaatccggagaaaatgaaagggctggagaaactttaccataaagttacaaacgggaaagaaaagtttgatattagtataggaatcggtgcaaagacttcgcctgcggcgagggctttggatgttgattatatttttatgtttgatatagatgatacagctattgataaaacagtagtaaggtataatattgccataattgatactgcgctaattaacaaattttcgccattgataaatgaaaatggtaaacttgcaggggagctaagctatcctgaaatttatgtaattcagtaatttccacgggctttaaagcttttcggatacaattgctgttgccgaaaagaacggcagcaaaaatattaacaaagaggaattacaaaaagaactacggctcttatataatcttcggtgcagctttataaatttccataagaaacaaacgcggatcaaagttgatgcccaaaatccgaggaagacaaaatgagcttttaaaattaatcgactttgcaaaagacagactataagtttacaacagccgaagtcataagcggcggcttgatcaagttcgattctgcatggctcttcttcaaattatgtgtaaagtccaaaatacggtataaaaaagcaacgtg

SEQ ID NO: 1112 - DNA, 9940 bp, Unknown
  16S sequences of unknown bacteria
cagggatacgccccgtccgctgtacggcggggaggaggggccggcctatgaaggccggcgtgcccgccgggaggactatgacagcgaggaggaatacattccccgccgccgcagccgccgggaagaagagtacgaggacgatggctacgacgagtatgaagactacggcgattattatgaggatgacgaccggggcagcccctggtttaaggttgtcatggtgattctgatcgccattatcattgcctgcctgctttatctgggccgcggcgtcatcggttcgctggtcaaccatgatccggtggacccggcgccgtcatcgtccatgaacagcgacaacgcgccggaggatccggatcagccggatcagagcgatctgacagatcccaatgccggtacggagcctactgtggaggacaatcccgacgatacgcaggacgatgataccaatgcgccggacgacactacacagccggaagatgacacaaccgccgccggtccgctgacgctgtcgcatgaggatgtgtccctttccggcgacgagagctttacgctgtctgtccgcagcggcagcggtacggctacatataccagcaaggatccatccattgcctccgtcagcgcctccggcgtggttacgggtttgaaaaagggtaccacagaaatcaccgtgcagcgcggcagcgcgcgtgcggtctgcatcgtgcgtgtcaagagcgatggaaagaacgctgcgtcttcgtcgggcggcgctgcctccggcaagctcagcagtgaggatttcacgttaaaagtgggtgaaaattatacgctgaaggtgcagggcatcaccacagcggtcacctggtcggtggccgacagttcggtggccacggtgaacggcagcgggaaagtcactggtgtgaaatccggcaccaccaccgtcaccgcttcctgggacggccaaaaggcaacctgtattgtgcgcgtgaaaaattaaaaaaatcttttgaaaatcccgcccggctgggcgggatttcttgttgtttgcatacagaaagtgtgctatcatagtaccagaatacgccgcagccggtggaaatggggggcgaaaaagctatggaaaaagggcagcttttgcgtgctttgacggagaacggggacgaacgcttggcgttgagccgggtcctcgaccaatgggcgcgctgccgcagccgcaacatcccggccgtcacccgttttttgacgcctcaggaacaggcgctggccgaagaggccctgcggcgaatgggcgcagagggtgaagctgtgctggatggcggctatgaggatgccgagcgccgctgcgccctctttttgccggactatctttcctttgaagcgtttcgggaggatgaggagtacccggtctgtgccgtgcgctgcagcttccgtgccggagaacgcccgacccaccgggattttctcggcagcctcatgggcctgggcattcggcgggagatggtgggcgacatcctgccgggccaggacgcctgcgatattctgcttctgcgggagatcgcgccttttgtgctgcagaattataccagcgccgggcgcgtttcgctgaagactgcgccggtgcccctttcccatctgcatctgccggaaaagcgacggacggagattcgggacactgtggccacactgcggctggacagcgtggtgtcttctgcgttcggcatcagccgcagccgggcggcggacctgatccgtgccggcaaagtggaagtcaattggcgcgtttgtgaaaaggtagaccgcctgtgtgcccagggggatacgttcagcgcccggggctttggaaagtgcaggctgcgcgaagtgggcggcttgagcaaaaagggccgtgttaccatttgcctggagcgatatcagtaaagtgtgcggtgcgccgtttccgacggcgcggcgggaaacgaggacagcaatgatcgatgaagcaaagatccggcgcattaatgagttgagccggaaggcaaagtcgcccgaagggctgacagaggaagaaatcaaagagcgcacgctgctgcgccaggagtatgtggcggcggtgcggatgaatttgtgtgcccagctggatcatacctatattgtggacgagcagggcaacaagcagaaattgcagcggaaaaaaggaggaccaaagcagtgagcagctatgactacggacacaacacgccggacgatgccccaagtgggaaaaagcagacggaaagcgagattctttcctggctgctgattttcttctgttttgtggtgttctggccgctggggctgtttctgctgatccgaaaattgtccggcgataaaaagaaagcggcgcagcaaagtgcagcagcccgcggagctggtgtgccgccgggatggtctgcgcctgcgcagcaggggatggcgggaaccgcgcgggcggctcagccgatgcgcagtacaccctcggcaaagaaagggacccgctgggcattgaaactgggaggcggggtgctggcctttgtggggcttctctcgacatcagcggttttatccgctatgattggcgcacagatcttttggcaagccctgcctggactgctggctgtgttgtccctttttggggcgggtgtgctgatgcttggcaaggggattgccatggataaggcggccaggcgttatgccaggtatctggcggccatggccagcgtgcagtccatttcttttgtccagctttcaggcattacgggcttttcacaaaaacgggtggaagaagatctggatcatatgatcggacagggatattttggacccacagcgtatcttgatttgagcctgggttattttttccgcagccgtacggctgcggaggaagcagcggcccggaagcgcgcggaggccgctacgccgaaagaagcggaggaaggatatgccggcgtgctgcgttcgatccgccgggccaatgaccgcattgccgatgcggcgctttcggctaaaatcgaccggctggaggaagttaccgcccagattttccgggccattgaaaaagacgggaaaaaggcgtcccaggtgcgtacgttcctggaatattatctgcccacgacgcagaagctgctggattcttatgccgagttcgaagctgcgggcatcgagggggaaaatctgcacatggccaaggaaaagattgaggacaccatggacaacattgtgcggggctttgagcgccagctggatgcgctctatgctgccgaggcaatggacattcaaagtgatattgatgtaatgaacagtatgatgcagcgcgacagcgccatgcatacatcggatttccaggtgagcagttcctcttccgctgcggtgcaggaggaaaagcaatcctgaaggggaagaaaacggcgcctgtgcgctgcaggaacttctgcggcgcacaggcgctttttgtgcatttggaatggtgtcaggacaatgctgcttctgcggcttccagggatgcaaagccctgggcgcgaagctgatgcgtgcgcacttccatggccaggttttgtccccgcgcacggcaggtgtaaagaaaatcgtggtaaagggtcaaagtgcggcgggaataagtacgtaattcgccccgattgtaggtttccatagaggtttgttccggtgtgtcttgaacggtgcgcagcgggcggccgtggcgggccagggcgggataacgccgtgcgcattcttcggcccagacagcttccatggccacgcattcctctacttctgccaattgctccggtgggagcacaggcagcgcatggcgcacctgggcaaaggcgtccggaagactgtgctccatcatccaggcatatttttcgaacagcagattgcggccggacgcttccgcgtcgatcaggtcgccgagataactttcgagcatgacgttcgtccagacctgaaactggctggtacgcatgagggaaaaggcgtccgtctggctttggcagcttgccggaccaccgatattgttgatgcgaatcatcatatcatattcccgcgtcacgattttctggattatcgcttccacaatatgcactcctttgctgctttattgtcctgcgcggcgctcagataaattcggccagctgctccagcggcacgcggagatttttgtggcgttccggatcggcagcttcctgtgccgaataacccagagctaaaatattcaccggttccagttcatcggggatctgcagttcccggcgcagcttatccgggtcgaaataacagagccaaacagaacccaggcccagggcttccgcctgcagcatcatatggtcggtgacgatggctgcatcggtttcggcagcattgaagccgtcgtacgagcgtacccaggcttgagcgcgcgcagcgcacactacaatggctgctgtggcgccgtacagattggcggcgctgcacactttggccacagactcaggggtgtgggccaccagcagatgcaccggctggcggttgcaggccgtgggcgcgatgcgtccggcttccagaacctgttccagcacagcgcgttccacgctccgtttttgataggcgcgcaccgatgcgcgccgcttggccaaatccagaaattccatagtagtccatcctttcatcatttgagagtttgattctgcgtttgttcttttgttattattatagcagctgcagcaaaaaggacaagaggataccgctccggagaaaaccgttctgcggacggtttggaaaggaattctgaaaaatgcaggtatcccttttggggtacctgcatttttgcgtccttttgcatggttagttttccggatcccggctgtcccacacggttttcgccgaggccaccaggccggccagtccctggagttcgctggggatgataatcttcgtggcctttccgtcggcagcggcttcaaatgcttccagggccttgatttttaccacctgctcattgggattggcctcgttgagcatcttcagggcgtctgcggtggcctgctgcacctggcgaatggcttcggcttcgccctgcgctttcaaaatggcggcttgttttgcggcgtctgcctgcaaaatcagcgcttccttttcaccttcggctaccaggatctggctttgcttctggccctcagcccgcagcacggcttcgcgcttttcacgctcggctttcatctgcttttccatagcgctttggatgtccggaggaggctggatgttttttacctccacgcggttgaccttgatcccccagggatcggtggcttcatccagcagcaggcgcatctgggaattgatattgtcgcggctggtcagcgtctgttccagatccatatcgccgataatgttgcgcatggtggtgacggacaggttttcgatggcgctcatggggtgttccaccccgtaggaatacaatttgggatcggtgatctggaaatagagcaccgtgtcgatctgcatggtcacgttgtccttggtgatgacaggttggggagggaaatccactacctgctctttcagggacaccaccttggcgacccgctcgatgacgggaattttaaagtggatccctaccgtccaggtggcgctgtaggcgccaagacgctcgatgacataggctttggactgctgcacgattttgacgttcagcaccaaaacgaccagaacaacaagaatcagaatgatcaaaagaataacgccaatggatggcatgggcaagctcctcctcgaatttctgataatctctcaatgtgccggggtatttattgagcagccgggggttccggggtggctgggggagcgggcggaaccggcgcgggtgtaccagtttgattcagctgcacgtcgatggcgccgccgccgttgagtgttacatcacggcgggtcttggcgtcgatggtctgggcttccattaccttcgtcaggtcaaagcccacagtatccttcacagcttcggtgacggctttcagggaactgacggcggaacgggtcatggcatccacgccgctgccgctttcgccgccgccgatgaccgtaacgttgccgatcttgctcataggttcggctatggcctgggcaaaagcgggcagaatatccattaccatctgaagcttaccggcctcgttcatcttggccagggcttcggctttcttttccagtgcttcggcctcggcaaggcctttggcgcggatggcttcggcctcggcctggccgcgggcggcaatggcttcggcttcggcctggccgcgctgggagatcatagccgcttccgcttcggcgtccagttttttggcctcggcttcggcctgggcttctttgatggcctgaattttggcggcctctgcccgcagctcggtttcgcgctgggcggcttcggcgggcttcaccacggtttcctgcagctcggcggccttgcgctcggcgcgcttctgggccagctcgatgttcttctgctcagcggcgatctgcacttgaatctgggcctcggtcacttctttggcgcgctgctcgcgcagcacgctggcgtccatctcggtggaggtgacgtccttggaggtgatgttttcctggatctgataggctgcgtcggactcggcgcgcttggtctcctgctctttgcggaaggcctggagcttcagctctttgtccttttccgactcggcgatggcggtttcagcggccagacgggcctgttcccccagcttgcgggcctcggcggtttggatctgctgggttttattggcttcggcttcagcaatgctggcctcggctttcactttggcaatctgggcgcggcccagggagacgatgtagtcgtcgttgtcggtgatgtcgttgatggtgaaggatttcagttccaaaccgatttcactcagggctttgctggcaatttcggtgacgctggcgctgaatttctcgcggtcgtcataaatctcctccacagtcatggtggaaacgatctcgcgcagcttgccttcgcacaggctctgcacctgttcgacgatcttgtttttggtgcggttctcatcgttgcaataaaacatttgcatggcggtgagaatattggtttcatcggctttgaccttcaggatcacatagccgtcggcgttgatgggcacgcccagggaggttttgacgttttggatattcacatccaaagacagcgtctccagcgtgatcacgtccatgcgctgcagcaggggaatcaggaacacgccgccgcccgtgacaaccttgggcttgcccaggccgacaatcactgcggcgtgatcattggggacttttttccaggttttcaggaccacgaagacaatcacgatcagggcgacaatgagaatgagaagcgttttgataacggggccgttcaacaattcaatcatattgttctccttttctgatatggtatggttggtgtgtaggggaatggattaaaataatctgccgacaacgagcagattgttttcggtgtccagaaccttgaccacggtgcccgcctgaatggggccgcggggttcgaagtctgcaaactggtatttggcgagataggtaatccgactgcctgctgcgtcggtcagctccacctggccggtgccgccttcgggaattgtttcgattacgttcacatgctgaaacagggcgtcttcagcacgcatggccttggcgttgttgcgcttgagcggcaggattaaaaatttgcagatcaggatataggctgctgctccgcagatcagtcctgcgaccagactcactggccacaggtggaagctgctcaggcacagtttgccgatgcagcccaccaccaccagggagaaaagcagggcgttgaaattaaaagagaggaacccggcgtttccgtcgccgtccaaatccagatctacgccgccgagcagagcgtccacgccgccgaagagcaggctgagcagcggaagcacaatgccggctgcaatcagaatcgtataaatggtatcgagcattttgcggagcaccttcctttcatgcagggggatacatggtgaaacagttacgaagctgcggaaacaggagcaaccaataccttgacgccttcaatgcgcagtacgcggaccacgctgccggcggcaatcggttttgcgctgtcgctgcgggcagtccacaccgtacccccaatggacacggcgccggtgccggctacattgtcgatgggttctgtgaccatcgctttctggccgatgatgcggtcggcgttggtggcgaccttttttgccccgcccagacgcgttttggccagggggcgcaaggccagaacgcagatcaggctgacgacggcgaataccaggatctgcacccaaagcgccccgccgaacagtgccacagccatggcagccagcgcgcccacggcgaaccagatggacgtcagcgtaacggtgagggcttccaaaaagcccagaaggataaccagccccagccagatgatactgaacagattcattgtgcatctcctttttcgattgttttctgcttttagatgtattataacataaaaattgaccaaaattgattacaatgctattacaaattttagagaaaagaatcaaatttgcagcatgcgggtttgcgttcgatcgaccataaagagcgggggctgaagctggaacatccttccagtcccggcccccggtcaaacagcctattcgtttttcatacggaatagaacagcgctgctctcaggcgcggtgctttgccgtattctggctgtgccgttccagcgtctgacccgcacggccggagaaggtcagcagggaatcggcaatggtttcctcttgtgtcagaatcccttcgggtgcgtgcagttccgccgcggcaacctcggcggttccttttgcctgcagtgctttcaggcagcgcagacacgccgcgcagtttggcgctgcctgtcataataacccatcctcccaaagtgttatttgacatgttttgttccgtcaaaagtgcctcttcattgcaccatgctctgtccaaactgtaatgttatgctccggcggcgcaggccggcaggcgagggcgcatcttgttctgccggagcgaatatggtacaatagtatcgttctggcacagcctgtatcggagagcctttctccatttcgggcagcggacggcagaaaaccgttcgtggcaacgatcgaattttatgagagaggtggaatcgtgaaaggatttctcaacaaccgcagggtcagctgtaccctgtctgccctctgcttcattgcgctgggcgtttttctggtgttctggccggagctgagccgcatttggatttgccgtctgctgggcgcagccctgctggtaagcggcggcgtgtatgtggtatcccactttgcacgcgccaaaggagcggcagccgtgtttcaatacgatttgatcctgggggcggtgctggccgtcgtgggtgtgtggctgcttaccacgccggatttgattgtggcctttctgcagtatattctgggcctgatcctgatcgtccatggtgtgattgacctgcagggtgcgctgaatctgcgcgccggccatgcgcggcactggtggcctgcgttcctgattgccctcattacgctggcgctgggtgcgctgattctctggaatccctttgccagcatcaatgcccttttgatgctggtcggcatcgctttaatctatgatgggatctcggatctcctgatcctgttccagctgacgcgcaccttccggaaagtgcagcagggcgtggaggcctcggtagaagcggcagaggttatcgaaggtgagggaacggtggagcaatgagcggtgtggtgcgtattttcttgtaccgctacggcgctgccgctctgcttgaaaactatgtcaaggcactgactgccgccggtatggaaccggtggtatccaatactcttgcacccgctgccggttgtgccgggctgctgctccc

SEQ ID NO: 1113 - DNA, 32759 bp, Unknown
  16S sequences of unknown bacteria
aggcggcggcgctgtcggccatgcgcctttccgcggcgcgcagcgggagcctgggctcggcgctcgtgcgcgggcgggcggcgggggacccgctcgccggctgcgcgctgcgcacgcggcgggaaggggacgcctttgtgagcgactacgtgcccgtgcggccgctgccagcgggcgacgattggtttgagaccgtttggcacgaatacaattccattcaccgcattgcagaggaggagacagagcatggacgcagccattcgcctgacgcacgagggctttaagtggaggaggacgccggagggcgcggagaatgcggactgcgcgccggagatcgcggagctgttcgcgcacgaggagggcgcggcgtgcttccaggtcgtcctgcgcgcgccggagcgcttcgccctctcgacgggaaagaagcactggtactctccgtccgggcacagggaccgctaccgcctggacgtcgcggcgcagggcgcgcaggtgcaggcctggatcgaggacggcatcctggacgacggcggctgcctgcgcgccgacgtgctgctgagccaggaggagaaggaatacgaggccgggagcgcggccgtggtctttgtgcaggtgcgcgccccgcgcaccacgcaggtccgcgtgcgcgtctatcacgcctttggcacgcatccggaggagctcctgtgcgagcggacgctggccctttccgtctaccccgtgcgcctgcccgcgcccgaggactacgccttctacctggacctctggcagcacccgtcgaaccttgcgcgcaagcacgagaccccgctgtggagcgacgcgcactttgccgtgatcgagcgctatgcccgcaccatggccgcgctggggcagaagtccgtcacggtcctggccggggacgtgccctggcgcggccaggggtgcatggacaacgaccgcttccccgcggacctgttcgaatacgccatggtgcgctccgtgcgccatgcggacggcagcgtcgagccggacttctccgtcatggaccgctacatcgacacattcgagcgctgcggcgtgcgcggggacatcgagatcctcggcctgtgcaacatctggaagaaggacagctttgacgaccatccgctcgtgcccggcgacccggagccctacatcagcctgccctgcctggacgagcgcacgggcgcgctgtcctacctggacaagccggagcaggtcgacgcgttcatcgccgcgctggaggcgcacctggacgagacgggccgcctctcccgcgcgcgcctttccgcggacgagccggcggacatccctgcctaccgccgcagcgtggagcgcatccgccgcgtcgcgccgcgcctgcgcctgaagaccgcgatcaaccacgcggagttcatcccggccttctccgacgccatcgacgacttcatcccctcgctggcctcggtctgcgagcagtacgacgagctgcagcgcatccggcgggacctgccgggcaagcgcttcctctggtacgtctgctgtgcgccggcgcatcccaatacctatctgcacagcgatctgtgcgagacgcggctcatcggcgcgctgacgcgccacatgggctttgacgggttcctgcgctgggcctacaccacctggcccgcggacccgcggcgggatgcgcgctacggcgccttctccgcgggggatacgcacttcgtctacccggcggccaacggggagccgctgctctccctgcgctacatggccctgcgccgggccatcgaggactttgagatcctgcgcctgctggacgcgcagggcctcggggagcaggccgacgccctggccgcgtccgtgctgcgcgagccggacgtgcgcaagtggttccacggagaggaaccgatcccgctgcaggagatctgctccacggactacggcgattacgagcgcctccgccgcgaggccctggcgctgctgagccgctgacgcaggctgcggcggcccggggcgcaaaaaagggttgacgctccgggctccgcgtactatcctgaaaagcaagggtgggcgcccgcgcgggcgcgccgaaacaaagagaaacgacagaacggaggataccggtatgaaaatgggcctgggcttctacccaagcacctacagcgaggacacgctgtccttcgccaagcagatcggcgtcagtcacatcatgatccacatccccagcgcggagatgctcccctccgcccgggagggctattggtccgcggaggacctgcaggcgttggtccgccaggtcgagggccacggcctcaagctcgaagccatcgagaactttgagccccgccactgggcgcacatcctcacggccggccccaagcgcgaggagcagatggacaacgtcaagcgcaccatcgagaacctcggcaaggcgggcatccccatcatgggctataacttctcgctcgcggccgtggccggccgcaagatgctgccctatgcgcgcggcggcgcgatctcgcccgtctacgacaaggacgcggacgagaacttcgacaagcccctgcccaacggctttgtctggggccagcaggtcgaggaggcggagggcgacatgggcgacgtctccctggaggagatgtgggaccgctacgactggttcatggaccgcatcctgcccgttgcggaggcggccggcgtaaagatggccatccacccggacgacccgcccgtgcccgtcatgcgccacgtcaaccggctgatggtgaacgtggaccgctatgacgagaacttccggcggcatccctcgcccaacaacatggtggagttctgccagggcacgttcacggagatgccctacggcgacgactacgtctacgacgccatcgaccacttcaccaagatgcagaagatcgcctacgtccacttccgcaacgtgcgcggcaagctcccgcgctactacgaggagttcatcgacagcggcgacgtggacatgatgcgcgcgctgaccctctaccgcgacaacggctttgcgggcatgatcattccggaccacgtgcccaccatgcccgtcaaggagccgtggaccacgggcgtcgcctacacgatcggctacatgcgcgccctgtgccgcgccctgcacatcgatcttaaggactaaggggaggaagagaagcatgtatacggtgttggacgcctccatgctgggcatcccgcgctcccttgcggagctcgccccgctgtgcgccgcgcgcggcatcgcgggcctgagcgcgccggccgccattttggacgatccccgcgcgggggcggaggccgcggcgatgatgcgggacctcggcctgcagtgggggctgatgcccatgacggcggatttctacgcctgggacctgggggacgacgcgttcgaggcagcgctgcgagcgctggagacgcgggcctgcgcggcggagaagctgggcgtgcgctgggcctacaaccacgtctggtcctccagcccgcggccgtttgacgaaaacttcgactggcatgtgcgtcgcgtcgcccgcgtgagccgggtgctcgcggaccacggcatccgctacggcctggagttcctggggccgcacgagctgcagcggctgcagccccatccctttgtgcacacgcttgccggcgtgctggccatcgcggacgcggcgggcggcgtggccggattcgcctttgataccttccactggtactgtggaacgaacggcgaccgggacgacctgctctacgccgtgcagcacgcggaccgcctcgtcgccctgcacctcaacgatgcggtggcgggcgttgcccacgaccagcagcgcgacatggagcgccgcctgccgctggagaccggcgtcatcgacgccaaggcggtctgcgcccgcttccgggcggccggctatgcgggcccctgcatgatcgagccctttgaaccggcgcgcacccgctttgccgccatgtccgcggaggaagcggtggatgcggcaggcgcggtgttccgcaagctggacctgctgtaagccccccaaaacatgagcggcccgccttcccatcgggagggcgggccgcttgcgcgttatttcggcgtcaggacttctttccgcggcggccgaagagccgctgcaggagcgggcgcttggggagcagcgtctccgcgaggttcggcgggtttttcagccagcaggcggccggctatgcgggcccctgcatgatcgagccctttgagccggcgcacccgctttgccgccatgtccgcggaggaagcggtggatgcggcggccgcggtgttccgcaagctggacctgctgtaagcccccaaagcatgaacggcccgccttcccatcgggagggcgggccgctcgcgcgttatttcggcgtcaggacttctttccgcggcggccgaagagccgctgcaggagcgggcgcttggggagcaccgtctccgcgaggtccggcggctatgcgggcccctgcatgatcgagccctttgagccggcgcgcacccgctttgccgccatgtccgccaaagaagcggtggatgcggcgtccgcggtgttccgcaagctggacctgctgtaagcccccaaaaacatgagcggcccgccttcccatcgggagggcgggccgcttgcgcgttatttcggcgtcaggacttctttccgcggcggccgaagagccgctgcaggagcgggcgcctggggagcaccgtctccgcgaggtccggcgggtttttcagccagtaggcctgggaggagaggggggcggcgccctcggcgggcaggcggatgtagcccccgtccggctggaggcggcgcgccttgacgttgtcggccagcagcacgtccaggaagtgggagaaccactgcttgagctccgggctctccaccggggcggcgatctccacgcggcgcacctggttgcgggtcatcaggtccgcggaggagatgtagatctgccgcaagtcgccgtcgccaaaggcgtagacgcgggagtgctccaggaagcggcccacgatgctggtgacggtgatgttgtcggtcttgccgggaatgccgggcaccaggcagcagatgccgcgcacgatgaggtcgatgcgcacgccggcctgcgaggcctgcgccagcttgtcgatgaactcgcgctcggtgacggagttgaccttcatgacgatgtggccgcgcccgccgcgggcgatctcgccgtcgatgaggcgcaggagctggtccttcatggaaaagggcgcgaccaggagcttgctgtacgtcccgtgcaggtccccgatgagcatgttctggaagaaggccacggcgtccgcgccgatgaccgggtccgcggtcaggaggctgaagtccgtgtagagcgcggcagtcttttcgttgaagttgccggtgccgacatgcgtcacgtagctcaggccgttcttctcctggcgcgtgatgaggcagagcttggagtggcacttgtacttgtccgccccgtagaggatgcggcagccggcctcctccagcgcgcgcgcccattcgatgttgttcttttcgtcaaaacgggcgcgcagctccaccaggaccgtgacgttcttgccgttttccgccgccgcgcacaggtgcttgaccacggcggaattgcgcgccaagcggtagatggtgatctggatcgagaccactttcgggtccgcggcggattccttgagcaggtccaggaagggctgcatgctctgatagggatagaagagcagcacgtcgcgctggcgaacctggtcccacatgggcacgtcggggttgagataggcggggtattccggcttgtggggcggattgtagagctccggcacgccgcccaggtcgtaggcgtagccgagcgagagcggacaggagctcaggaaggtctgctcctcgcgcaggtggagcatctgctgcagcagctccttcaggtggtgggcctcgccctgcatctccaggcggaccggcgccaggtggtcgcgcttgcgcaggagcttgaccatgtgctcgcggaagtccggcgcgtcctcgtcaaacttctcctcgtcgtagctgatgtccgcgttgcgcgtgacggcgatgacggactgctcctcgacggtgtagatcttgaagatcttgcgaaggtgcgccagcagcacgctctccgtgcggacaaagcgcgtcttgctgccgggcaggaacaggatgggcggcacagagtccggcacgctcacgatgcccaggaacgtgcggtcgcggtcgcgcaggagcgcggcggcgtgcagggccttgttcttcaggtgcggaaagggatggttgcggtcgatgatctgcggggcgagcagggggcggatcttttgctggtaataggcctggatgtgcgtcttgtcctggccctgcagctcctcataggggatgtcccgcacgtcgtagaggctcagctccgacatgaccttggcaaagatcgcgtcgcgcaggcggatgagcgggcgcacggcctcgtagatcatgttcagctgctcggcgggggttttgccgctcttgttgtcctccgcgtgcggcgtcatgacggagaggtcgaacaggctccccacgcggaccatgaagaactcgtccaggttgctggtgaagatggagacaaagcgcagccgctccatcaggggcaccgtggggtcggtggcctcctccagcacgcgctggttgaacttcagccagctcagctcgcggttttgggtgtagctcaaatcgtagcgttgagcagtttgtgacaaaggtatccctccctgactccgtattgactgacgaagatgcggtcccggcacagcgcatggcccagcgcgttcatcatcagcgcgccggggatgatggtgtggatgcggtccgggcaggcgcgcaggatcagcttgcgcgcctggtcgttgcgcttgcagagcagttccgtgatctcctgcatctcctccggaaggatgacgcggttttcggcatccttgccgaagtaggcgttggagatcttgagcacggcccgcgccgtgccgccgatgccgcaggcgcgctcggcgcgctcctcgggcaggtcggcgctctccagggcctcctccacgcggcggacgatggccttgagctcttccttcttgggccagatcttggagacgcactcgttgaacaggttcagcgagccgacggccaggctctgcgcctgctcgatctcgccgtcgcggcactcgaggatctccgtgctgccgccgccgatgtcgaacatcgcgcccgtgcgcatgtcgtttttgagcatggcgccgtagtagccgagcttggcctccgtctcgcccgagatcacgtccaccgtaaggccggtgcgccggcggatcaggtgcacggcctcgtccgtgttgcggatgttgcgcagcgacgccgtggcaaagacgtgcatctcgctcatgccgaagtggccgagcagcgtgcggaatccggccagcaccgcgcaggccttgtcgatgccgtcgcgggagagcaggccctcctcgttgatgtagttgacaatgcccgccatctccttttcggaaaagagcaggtcaaagtcgccgttgtccagcacgttgtaggcggacaggcggatggtgttggaccccaggtcgaccactgcatacttcttggacatttcgtttcttgcctctttatgcgataatttggaaaaagcagacgagaaagccgcgccccctgcgggcggggagctcccttcattctgcaaacacatctctattctctattatagaccaaggatgtctacgtggctatacatttgcgtaaatccgccgtaaaatcccggattttggcagatgcccggaagattttacatttttttcagcggagatagaaggaacccttgcgcctatggtatactatggaggaaataggcgccggaggggccgatttcgcccggcgcaaagacggaggaggaagggacttggacaagatcaagctgacgggattggagaagcgatggattctatacgatgtggggaattcggcctttacgctcctgatctccaccatcattccgatctactttaacgacctggccgggcgcgccggcatcagcgaggtggactacctcgcctattggggctacgccgcctccctggccacggccatcgtcgccgtcatcggcccggtgctgggcaccatcgccgacacgcagaactacaagaagcccatcttcaccgcgagcatgatgctgggtgtcctgggctgtgcggcgctctccctgccgacgacctggatcgtgttcctggcggtgttcgtcctcgcccgcgtgggctacagcgcgagcctcatcttttatgattccatgctggtggacgtcaccgacaacgaccgcatggacgtcgtctcctcccacggatatgcctggggttatatcggcagctgcgtgccgttcgtgctctcgctggggatcgtgctgtttgccgatgccctggggctgaccctgcgcgcggccatggccattgccttctgcctcaacgccgcctggtgggcgctgatgtccctgcccttcctgcgcagctaccggcagacgcactttgccgcgcgcccggagcgccccgtccgcgagagcttccgccgcctgggccgcacgctgcgcgacatccgcgggcagaagcacatcttcctctacctcctggcgttcttcttcttcatcgacggcgtgtacaccatcatcgagatggcgacggcctacggcagcgccctgggcctggattcgcaggggctgctcctggcgctgctgctgacacagatcgtcgcctttccctgcgcgctgctgttcggcaagttctccaagcggtttgaggctgcgcgcctgatcaagatctgcatcgcggcctacacggccatcgcgctgttcgccatccagctcgaccggcagtgggagttctggttcctcgccgtgatggtgggcatgttccagggcgcgatccaggcgctctcccgctcctacttcgcccgcatcattccgccggagaagtccggggaatacttcggcatctacgacatctgcggaaagggcgcttccttcatgggcaccatgctggtcggcgccgtggcccagctgacgggcgtggccaacgcgggcgtgggcgccatcgcggtcctgttcgtcatcgggttcctgctgttctggaaggcggccaagctcaacgccgcgcgccgcgcctagcacagcccaaagctgcaaagcctgccgtccggcaggcttttttttgccgcatgccatgaataaaaattagccatgtgaataaaaattcacaaagagaaaatgtgggaaagcatcacaaatccatcatatttcgatcatacagccgtcaaatgatgaaaaagtgaagagttattgcacaaaaagtgagaaattcacgcagaatacacgcaaaatatgccggaaattatatattttttgtttcaaaagcgttccagagggtttacatatttatgcgcgtatgctatccttatcttgagctcagggaagagcgacatcatcagaaaggggaaaagaaccatgaagaaactgctagccagcgcactggctgcggcgctgctcctgacatcgtgcgtaaccgcgatggcggacagcaccgagacgatctctgggaagagctacaccgtcggcgcctatgagatcgaggacggcggacacgaaaacagcgatccgctcgcctatgacaaggacgtcaactccctgaccgtggagtacgactacgagaccatggacgaggtcaccaccggccgctactccgaagacgcgaagatgattatgatctacgtcgagggctttgacacgggcaagctcaccggcgacatctcgatcaccatcgacggcaaggactttgacgccgacgacctggtcggcgcggagtaccaggaccgcatgggctacgacgcggacgaaggcatcctccgcttcccggttgaggcgaccaagtccggctacagcgacacctacgtcatcgagatcgaatccgatgacggcgacggcaacaccgtgaccgagaccgcgcgcatcatcctgcgcctggaaaatgagtccgagtacaagaacgcggaaaccgcgaccatctcccgcatctccggcgacggcgtggacgcctacatcgtgggctcccgcatctacctggactacgcgtcctccagcacggacgacgatgcgctgctgacgatcaccttccgcgatgagaacggcgacctcttcgacgtggtgacctggtactacaacgcggcctccgacgggaacgagctggatgaacagggcctgttcaacgccagcgacgaggacggcgacgtggatcttaacggcctgaagctcgacagctctgtcggctacttcaaggtgtacgccggcacatacgattacttcgacgatgccgatgaggattacttcacgaacgtctacttcaccctggagacttcttcggacatctacgagaccaaggaatacgacgtggtcgtccgcacggacgtctacgagacggacccgcagggcatctactttgaggagtccagcatcaccctcgacatcggcgagagctacacccccaacgtcctgggcgtggccaccggccgcaccgttgacgcggtgatcgagcccggcacgggcaccagccgcaacgtcatcgacatcgaggacgacgacaccatcatcggcacccaggaaggcaccgcctacgtcacggcgacctatgagttcatcgccgaaggcggatatttggaagagtacacttcttcttccatgaaggtcaccgtcaccgacgaggtctatgacggcgagtcggaagaggataccgacgacgatgccaccagcacctacatggtcaccgccagcacgctgaacgtgcgcaccggcccctcaacctcctactccaaggcttcctaccagctcaccagcggcgaactggttgaggttgtggacatcgccaacggctgggcgcagctctcggacggcaactacgtctctgcgcagtacctgatggccgtcaccacctcggacgacggctccgcgaccacgatgtacgtcacctgccgcacgctgaacgtgcgcaccggcccctcgacctcctactccaaggtgggcacgctctcccgcggcacctcggttgaggttgtgggcacctacggcaactgggcgaagctgagcaacggctactacgtgtccatgagctacctgtccgcataacccccggatcattcgaatctttcggtgcaaaaaaaggggaccccgaagtgtgcgcggggtccccgatcttttttgcaaaaagaaacggccctcccgagaaagcgggagggccggcatttttttagaccttgcagctgcagcagcggcagcacttcagggagcggccggcagcggcgttgacgacctccttgccgcgcacggcaagggcgccgcccacaaggacgaagtcgatgccctcgggcgggtcgtcgggccgccccttgtcgacataggcggcgttgtcgtagatggtcttggggtcgaagaccgcgatgtccgcatccgcgcccacgcgcatgcggcccttgcgcgcaaagcccatcacctgcgccggcaggagcgtcgcgcggcggacggcctcgcagaggttgaggttggcctgctcgcggaccatgcggaagaacgcagcgaacgtgccggcgatctgcgggtggccctcgccggggttgtagggcgcggtgtcggaggagggcatgatgtagtcgcgcgtaaaggccagggcgatggagggctcggcgtccgtcttgcagatgacggtctcgttggggtgcagcgtgcgcatggtccgatagagcggctcgtccaggcgctggccggtgtattcgccggtggcgacgagcaggctgggcaggatgctctcgtgggcgaagacatagctctcccggaagcactccgagccgatggaggtcgcccagtccacgtacatgccgctgtcggcccagatgtccacgccctgggcgcgggccttgtcgagcatgtccagcgcctcgcgcatgacgaattcgccgtactggtagaccagatggctgatgacgatgcgcgcgcccgtccggcgggagacctcgatggcgtccgccagggaggagaggtcgtaatcgtcctccatgcgcgtgtcgatggagacgacgcggccgtactcccgcgcaaccgtggccagggcgaggatctcgtccagggaggtgccgggcgtgtagcccacgcccagggagatgccggctgcgccctggctgagcccctggcgcgccaggcagcacatgtggtcgatctgttcctttgtggccggggcgtagatgttgcaggcgccgaccatcttgcgcagggtggagccgcccagcagctccgcgtggttgagcggataccccttgtcgatgcggtcaaagaactcggtgacattgggaacggacaggccgcagtttccgctgaccagcgtggtcacgccctgcaggagggagagcttggcgcaggtctcgtgatccgggtaggtggtcacgttgtccacgtgggcgtgtacatcaataaacccggggcaaacgacgtgcccagcggcgtcaagctcggtgtctgcatggagaggggtatcggaaatctccgcaatgcggccgtcctttacgcccaccgaggccaagcgggcggtgcaggactcagggtcgatgaccagcccgttgttgatgcaaagcgtattcatcttgtctggttctccttacgattgtcaatgggaagaggaaaaaacggaggaaaggtgaaaggcgtgatgcccttcacctttctttttccggcgtggggaagaaattgcgcagcggagcgggattaggcctgcttaaaggcgttccagatctcgttcatctgctcggtcgcctcggcggagatgtcctgcatgaactcggtctcgcccagggtgtcggcggggatgttgaccgccttgttgtccaggaactcctggggcaggtactccgtcgcggcggagttgcagttgatgtactgcgtgaagacggaagccttggcgctgacctccgggtcgcacatgaagttcaggaactgatgcgcggcgtccgcgtgcggcgcgttcgcggggatgaagaaggcgtcgatgccgtagcccatgccctcctccgggtagcagacctcaaactccgggcgctcggagagcacggcggaaacctgggaggtgaagatgtagccgatggtgcactcgccggagatcagcttctcatgcggggtgtcgccgtccagggcgcggatgttgggcttgagctgcaggagcttctcgccggcctgggcgatgatctccgggtcctcggtgttgagggagtagcccatggacttcagcgtcatgccgatgacgttgcgcatgtcgtccatcacgacgagctgatccgcaaggctggggtcccacaggctgttgtagccggtgatctcgcaggtgaccttggcggggtcgtacacgatcagcggggtgcccgcgacgtagggcacggtgtacttggcctccgggtcgaagtagtggttgaggtaggcggggttgaggttggagaagttggggaccttttccttgtcgatctccatgatcagcccctcgttgcgggcgatgttgatgacaaagtcgctgccgatgacgatgtcgtaatcgccgccctcggccgcctccagcttggtgagcatttcctcgttggaggtgtagtagttatagttgatggcgatgccggtttcctccgtgaactgtgccagcagctcggggtcaatgtagtcggcccaggagaagatgaccagctcctgcgcaggggcggacgagcagcccacgctcatcagcatcagggcgaggatcagcaccaggctgaaggcacggatcagggtctttttcatctctttgtcgtttcctcctcaaaaatgatgatctataatacgccgtatgccggccgtattaccgggctttcctgcgcagggagctgagcaggtagaacacgccgatggcgccaaagaccaccagcagcatgagcgtgcacagggcgttgacctccggggtcacgcccatcttgagcatggagtagacctgcaggggcagggtgttggaagtcgtgcccgtgacgaagaaggagatgaccacgtcgtccatggacatggcgaaggccagcagcgcgcccgagatgatcgccggcgtgatcagcggcagcgtcacgtcgtagaaggcgcgcgtctgcgtcgcgcccaggtcccgcgccgcctcgacataggcggggtccaggccgaccaggcggctttggacgttgatgaagatgtagggaacgcagaacgtcgtgtgcgcgatgatgagcgtcaccatcccgaacggcacctgcaggatggagaagaacgaaaggtacgccatgcccaggatgatctccggcagcatcatcgggatcagggagacgttctccagcaggttctgcgcgcggaagcgggacttggccatgcccaccgcgccggccgtgccgatgaggatcgacagcgcgcacgaggagacggccaggaacagcgagttcttcagcgagcgcatgatctgcgtgttgcggaagagcttttcataccactccagggagaagccctcccagttgccgtacttggaggcgttgaaggagtagaccaccaccacgatgatgggcaggtagttgaacagcagcaccagcagcacgaagagcttggagcgccaggtattcgtccgcttcatcgcagaccacccagggttttcgcccctgtaaccttcttgtagagatagatgaagacggtggtgaagacgagcatggcgatggagagcgtggcgcccatcggccagttgcgcgcctgcatgaattcattcttgatcaggttgcccagcagcagggtcttgccgccgcccagcaggtccgagatgaagaacaggcccatcgacggcacgaacaccagcacgcaccccgccacaatgcccggcaccgtcagcggcaccgtcaccgtgaggaaggccttaaagggcgaagcgcccaggtcgcgcgaggcctccacaaccgtccagtccagcttctccacggagttgtagatggaggtgatcatgaaggggagcagggcgtacaccatgcccagcatcatcgcgccgttgttgtagaggatcttgagcggctcgtcgatgatccctacggcctgcagggcggtgttgaccacgccgtttgccttgagcaggatgatccagccgttgagccgcagcagggagttgatccagaagggcgccatgagcaggagcacgatgaggctgcgcaccttgggagagaacttcgccgtaaagtaggcgaagggatagccgatgagcagcgtcagcacggtggtggcgatggccaccaggaaggagtcgagaaagaccttgccgtagaccgcgctgaagaggttcttgtagttctccagcgtaaagacattggtgatgccccaaacgtcgtccttttccaggaacgtgatgccgatgacgtagagcagcggcagcgccacgaacaggaaggtccagatcgccaggatccacactgtgggggcgatgcggcgcttgggggcggaggaaagttcccgctccctcactcggccttccccctttccacaaccgcggcgaccgccgggtcccagaagacgaagacgcggcaccccgccgggtacttggagacggggtttgcgcccgtgatgagcagctcctgcccggtgggaagctcgatggtcgtgcgcagcacgccgccgatgtagctgtgcatcttgatgacgcccgcgagcgtaaagccgtactccgccttgtccgcgtagtcgatgcgctccgcgcgcacggacagggcgatgcgctcgcccgcctggaacgcgccggggacgaccatggcgttgcccggacagacctccaccagggcgctgccctggcctgcggaggcgacgacgccctcgatgatgttgctctggccgatgaactgcgcggcaaagcgcgtggtcgggtgctcgtagatctcctccggggcgccgatctgctcgaactgcccgccgttcatcacggcgatcaggtcggacatgttcagcgcctcttcctggtcgtgcgtgatgtagatgaaggtgatgcccagcttcttctgcagggccttgagctcgccctgcatctggcggcggagctgcaggtccagcgcgcccagcggctcgtccagcagcaggagctgcggatcgcaggccagggcgcgcgcgatggccacgcgctggcgctggccgcccgagagctgggagggcatgcgcttgccgaagccctcgagctgcacgacggagaggagctcctccacgcggcgggcggcgtcctccttcttgacgcggcgcagcttcatggggtaggcgatgttcttgagcacgttcatgtgcggaaagagcgcgtagttctgaaagaccgtgttgacggcgcgcttttccggcgggagcttggtcacctccgcgccgttgagcaggacgcggccctcgtccggcgtctccagccccgcgatgatgcgaagcgtcgtggtcttgccgcagccggaggggccaagaagcgtgaggaactgccccggcagaacgctgagcgaaatgccgtccaggaccttggtcccgtcaaaggacttgtggatgttttccagtgtcaggatgggctgagccatttgcatgtatcccctccctatatcgaataaagaagtcagctctagtatgaaagaaattttggaaaaatcaagttaaagttttgcatagagggaccagccaggttaaagcggtttgtaggcccgtttcacgcacttggggaggaacgcctggagcgcctccacgccgtcgcgcaggtcaagatcgcggtagtttccgcagctctcctctgaggcgccgggcacgctttccatggaaagcgagagggcgatggtctcctgcagcaggcggcagaccgcgtcttcgctcagcccgatcgtcacaaggtagaaccccgtccggcagcccatggggccgaagtagacgatgttgtccgcgcaggccgaggagcgcaggcaggtggccagcatgtgctcgacggtgtgcgcctcggtcgtggtgagataccggcccgcgttgggccggaaaaagcgcaggtccgccgtcaaaaccggcacgcccgcgcgcacgtcctcccgaaagtatacgcccggctccatgccgcgatgatcgacggaaaagctggcgatggttttcattcccgcattcgacctccctcaaatccgaccaaaatcctaggagaaaatttcatgaatattatagcagaaacggcctgcaatgcaagaagtttttttgacatcttcggcgggatttgctaaaatcgggaggaaacaggcaaaaatggaggaatgcgcatgaaaatcgggatcattggagccatggacgtggaggtggaggcgctccgcagccgcatggagggcgcaaagctggaaaccgtctccgggatgcagttcgcgcaggggcgcctggcgggatgcgacgcggtcgtcgcggtggcgggcgtgggcaaggtcagcgccgccatgtgcgcgcagaccctgattctgcgctaccagccggacgtcgtcatcaacacgggcgtcgccggcgggatcggcccggacctgaaggttctggacgtggtgctggcgaccgccgtggtgcagcacgacatggatacctcgcccctgggcgacccggtgggctatatctccggccttggctgcgtggagatgccctgcgacgcggcgctgtgcgcggcgctggcggacgcggcggcgcgcgcgggcatcgcggtccggcgcggccttgtggcctccggggaccagttcatcgcctcggcggagcagatcgcccgcatccgcgcgcactttgacgcccaggccgcggagatggagggcggcgccatcggccaggtctgcacggcgaacagcgtccccttcgccgtgctgcgcgccatctccgacggcggcaacgaggaggcgaagatgagctatccgcagtttgtgcagcgggcctcggagcgctccgtgcgcatcctgatggagtacctgcaggcgtgatgcacacgcaaaaaagcgggccgaaggcccgctttttttgcgtcaaaggaagctctccaccacgtagagcgtgcgcgtcgtttcgtcgaggaagagcagcagctcggagttgtcctcctggctgtcgtacgcggcgacgcagtccgcgtacgggatgcgccactgcgcgggcaggtcctccaattcgccgaggaagtcctccgcagccgcggtcacgccgctggcgtagatcgtgggcccgccggcctcgccccaggcggcgtccggcagagccgcgccctcctcgtattggaagacgtggtagcggacgccgtccccgtggaagctcgcgcccgtgtccgcggaatagacctcccggtagccgtccggcaggcgcagcccccagtttttctcgatcgtagaggcgtacgaggtgcagccggggacgaaaagcagggcaaggagcagcgcaaagaccgccgcgattcgtttcatcgcaatccctcctgaccgattagacgtccgcatacggcgcggtgagggcgaggaagcggtcgaactgctcctgcgtcatgcggaagtagaccgtgttcgacgagacgccgtcgccggtggcgtagtcctgcagcacgaagtaggtcaggcccacgatgggttcgtccagggagtcgatctgcgtggagcagtccccgagtaggtcgaggagggccaggaggtcctcccgcgccgcgggcccggaatcggccgcgccgtcgtagtccgcgggaacggcgtcggacaggcccatctgcatgtccagcgcgcggccggccgccccgggctcgtagatgcggaactccgcctcagcccagagctgcgcgcccggctccgcgctgcgcagccaggcggcggactcccgcagcgcatccagcgcaacggcgtcgtgcggctgcgcctcctcgcccggggacgctgcggcggcgctctcctcgttgacgcgctgcacagcctgcaggaacgtctgcggcgtcttttccgtgatcgcgtaggaggtgtagaagctctggccgtccgccacgccggagaggctgaaggccaggttgctgtcctgcaggtccgacgcgggcaccaggtccgagaggtacgtcggcagcgagagctgcaacaagagctggtccgcgtaggacagcgcggcgtattcctcccggtagagcgcgaagaagtcccggtcgtcctgctggctccagcccggaccgtcaacggcgaggatctcgtcctcggctggcaggcgcgtcaggacctcgcgataggcgtcctgctgcaagagcagggccgcaaggcgcgcaagatcgccgtcgcggaagttgacgcgccgggtgatctcctcgccggagcgcaggtggaaccgcacgcccatgggaaaatagctgctgccatagctggaatcggtgcggccgtcgtacagcgcgacggtcgaatccagcgcgcccgtcagcacggagaggagctcctcgtcctccgcgtccacctcggagatctgcagttcggcatagctctccatgccgccgaagggctccatgcccaggttcgcatacgcgacctcctcggcggcggggacggcgcgcagcatccgctcgcccaccgcgcggccgagcagcggcaggccgaaccccacgaccaccacgaccggcagcacgcacagggccggcaggaggttgcgcgccttccgggtcgtcacgagctcatagatgaagtagaccgcgagcgcgaacaggagcagcacccaaaagagcgcggcgtccgagaagagcaggcgccagtcctccgaggcgagcatcgccccgagcaccaggaacacgggcagcgagatcgcgcagcggtagacgtgctgcaggacgcagttgggcgcgctcttgcccgcggtctccgacgcgcggaagtggtggaagaagccggcgaggaccgtgtagcccagccccagcacgccggtgtagagaatgcccgcgctatagcgcatggattcctccagggagaggtcgccgatggcgccgaaggagaggagggtcgccacggccgaggccggaaggttcaggctgtagttgaacaccgggcccaggtcccaggtgtagaagatgggcgcgacggattcgagcatggcgccggccagcacgctgatgaagcgcggaaggaacagcacaatgcccgtgacgatgaacgcggaaaaccgcgtgcccgtggccgtgatgccgacgagcgcgcagcccatgaccagcgccgcacaggcggtgaagtacaggaactggtccggaacgtaggacaggttgatgggccggccgcagagcgcatagaccaggcaggcgccaaggagcgagaggacaatcgtcccaaccaggtacgtcagcaccgcgagcacccgggagacgtagaggcactcccgcgtcagcggcagcgagtgataaaagtcggaagcgtttcgccgcgtcaggaacccgaaggccgagtagaccagcgtcaccggcgcaacgtagacaaagaggaagaacggcggggagaagtcgctgatccccggctgcgtcagccggccggagagcgaatcgagcagggccgggacgatcgtgaacaccacgcacagcaccaggtagatgctccccatgagccggagctggcgcagcgtttccacatagagcccggggtgaaagagcatggagcggttgcgtttcatgcgcgcacctcctatcggatttcgtcgtcaaaggcatagcccagggattccatctcgtagaggaagacctcctccagcgagagggggagcacctccagcagcacgggcgacttcgtgcgcagagactgcgtcaccgcctcgcggtccccgcgcacgatcaggttggagacggagccgtgctttgtgaagttcagcacgtcaaagcccgaaaagaccgtgtggtcgtaggcatggtcaaaggcgatctgcaccttgaagagcgtggtcttgagcttctgcacgtcgctctccagcacgaggccgcccttgtgcagcagcgcgagctggtcgcaggtatcctccagctcccgcaggctgtgcgaggtcagcaccgccgtgcacccgcgctcggccacgtccgcgtagagcagcttcttgaccaggttgcgcaggatcgggtcgagcccgtcgaacgtctcgtccagaaacaggaagtccgcccggcaggagagggccaggaccatggccgcctggcggcgcatgcccttggagaaggtgttgaggttcgcattctcctccagatggaagacctgcaagagctccgcatagcgcgcggggtcaaagcgcggatagaccgccgcgtacgccttcttcatgcgggccaggctcgactgcggcaggaagtagagctcgtccgggacaaaggcgaggcgggacttcagctccgggttttcatagatgttcttcccgtccagggtcacgtttcccttgtccggccggtagatgccgcagatcaggcgcagcagcgtggacttgcccgcgccgttggcgcccaccaggccgtagacgcagccctcggggatcgtgcagtccagaccggagatcgccggaaaatcgccaaatcgcttggtaagaccgttgacctgtatcatgttgcccctccttgtttcgcttcgttgtaggcgcgcgttacggtggagacgatgtcggaaagcggaatccccgcctgggcgagctggccggtcttctccgcaatgtcccggagcagcgcctgccggctggcgcgcagcgcttccggcgcgcccggggagatgaagcggccgttgcccgggacgctgtagcagagcccccggcgctccagctcggcataggccttttgcagcgtgttggggttcacggacagctccaccgagaggctgcgcacggagggcagcaggctctcgggcgcaaggtcccccagggcgatgtgcatctccacctgctcgatgatctgctcgtagatgggcacgcgcgagtacttgtcgatggtgaacatggcctccctccttttgtgtgtactatgccatatagtacagttagagcatagcgggaaacgccgcatttgtcaagaagaaacgccgcgcgccgggaaggttttttcccaaggagcgttgcggcgcggcattctgcgatgtaaaatagaacccagcaagatgcgaaacgggggacgaaggattggacaacaaggcgattctctgcgtcatcgcgttttttttcgccgttggcggaatagaccatctgatcgggaaccggctcgggctcgggagcgtcttcctggagacgctgcagaagatgggcatgatcctgctgggggtgatgggcatctattcgctggccccggtcgcggccgagtacgtcggcgcggcggtgacgccgcttgcggacgccctgcacatggacccctcggtctttccggcaatgctctttccggtggacatggggggattccagctcgcggtcgagacggcgaaggacccccggatgggcctggtctcgggcgcgctcatcgcgtccctgtgcggcgcgacggtggggtacaccatcaccgtcgcctcgaccgtgatggacaagcgcttctttccgcagctggcgcggggaatcctctcgggcatggcgggcatcccggtggggtgcgtcgtcggcgcggtgctggcgggggtgccgctccccgcggcgctgtacaactgcctgcccctctgggtgctggcggggctgctgatgtgggggctcctgtgcgcgccggagaagatgaccaagggctttacggtctttggccgcatcctgtcggccattgcggtggtgggcctgatcctgcaggcggtgcagatgctcaccgggtggacgatcctgcccggcatggcccccgcgcaggaggggctgcgccttgtgggcacgatcatcttcatcatgaccggggccatgtgcctgctgacggtgctcagccgggtcctgcgccgcccgctccggttcgtcgcgcggaagatgggcgtcggcggggaggcggtcacgggcatcctgagcgccgcggtctcggtcaccctcacctttacgcaggtcgaaaagatggacgagcgggggctgatcgtggtctgcgccttctgcgcgacgggcgcgcacgtcatcggcgggcagctcggggtcgtcgcggaccttgcgccggagatggtggggccgttcctcgcggccaaggccgtcgccggcgcggtcgggatcgcgctggcgctggtcctgacccggaacaggcaaaacgccgcgcaggcgtaaggggcggcgcccacactgtgggctttggcgcccgcactgtgggctttggcgcccgcactgtgggttttgggcgcccacactgtgggttttggcgccggatttgcgcggtttggacagaaccttgttgtaatctcaaaggacgtgtgctacaatcagtccaaactcaagaaggaggcaggcgcagatgaagaagtggaggacgggcgtgctggccgccgccgctgccgtgctggtcccgcagacggcgagcgcgcaggagggaattcttcccgtgcggcaggttctgatgggcgcggaacgcgtgcaggcctactgggtgctgggcgcgtgctcggcgctgttcgtggtgctgattttcgtctggagcgtccggctcaagcgcgcgtcccagcaggcgacccccatgccgcgcctgccgcaccgcgtgcggaaataggaggaacaaacgggcagccatcgccaagcgatggctgcccgtttgctttgccgggggccggtcagggcgcgtccggcggcgcgaccaggtcggcaatttgcaggcagaggtccaggtattgccggctgcgcgcatcgcccatgccctcggcgcgggcggcgatgcggcgcgtcagcgcctcggccggcgccaggcgcaacgaggcgtcccgcggcagggagcgcgcgcgctggaacgggtccgcgcaggggagcccttcgctgcgcagctcctccaatacgctccgcacgcggtccggatgggacttgagcagcgcgcggtacttgttttgcaggcgcagggccgcgctgcggtccccgccgcccatggcggtcacgcaggcgcgcacggagacgcccttgccctgcgccatgagcacctcgcgcaggagcaggtcgatctcctccggggaaaagggctgaaagggcagcgcgcggccggtggggacgtcctccggggcctggcccgccttgaccgcggcgtaataatagttgcggatgctattggccttgcgccccgtgcgcgcagccaggcggtcaaaggccgcgcgcaagggctggccctgggcgcagcaggcgcggacctcctgccagagcagggcggtttcctcctcgctccaaccgttgtgtgtgggcagttgcaggacctgactcatgaaatggcctccttgcgaaatggtttcttgcacatcctgtattccataaagagtatgcgcacaaaccgcgcgccttatgccatttctgcaaaaaacttcttcccattccggccgcggatggggtatactgaacgcaaaaaagagcggagggaaatcccacatgcagatgccctggatcttgcagagcgccgtggagcgcgaactggagggctgcccggcgcaggccgtgcgcgccgcggcgctcgacctctcccgcaggtatcgggagagcgggcgggcgccggacggcgcgcgccttgcgcgcagcgaggaggaggtgcgcgcctatgcggccttccgcatgccggcgacctatgcggcggtatcgcgcgcgctggagatcgcgcgggaggccggcctgcccggcgcgcagacgctcaccgacgtcggcagcggcagcggcagcgccttctgggccgtgcgccaggccttcccggcgcttgcgcaggcgcgcctgctggagcgggaggccgggatgatcgccctggccaagcgccttgccgcggagcaggagggctgccgcgtggagtggatcgcgggggacatgcgccagacgcccatcccgccggcggaccttgtcacggcctcctactgcctgggcgagcttcggccggaggacgcagagacggtggcgctgcggctctgggaggccgcgggccgcgcgctgctcctggtggaaccgggcacgccggagggccacgcgcgcatccggcgctatgcgggcctgctcgcgcagcggggcgcgcagatcctcgcgccctgcccccggggaacggaggcctgcccgctcggggacgcggacttctgcgccttcacggtgcgcgtggagcgcacgcgcctgcaccgcttcctcaaggacggcgagctgccctacgaggacgagagcttctccttcctgctggccgcgcgggaggcgggcgggccgccggcggcgcgcgtgctgcggcggccccgcgtccactccgggttcgtggagctctccctctgccgggcgggcggcgcggcctgggagaaggcgacccggaagagccccgacttcaagcgcgcgcgcaaggccgagcccggcgacggctggggggaggggacctagagcccgagcgactcctcggcaaagcgcgcaaagtcctgctggacgaggcggagcgcgccgccgcgcaggtcgagcacgctcgtgcagagcctgcgcagcaggtagaggtcgtgcgaggcgaccaggagcgtgccgttgtagctggccagcgtctcctccagctgctcgcgcgcgggcaggtccaggtggttcgtcggctcgtccagcagcaggaagtcctcctggcgcaggatggccatggcgagcttgcacttcatttgctcgccaaaggagagggcgcgcgcgggctgcgcgagctggcgggacgtgagccccaggttgttgagcagcctgcgctccgcgccgccgaccgtccccagctccgcctggagcagggcgagcacggtctgctccgtatcggtgaaggcgaagtcctgccggatcaggcagggccgcgcgctgggcgagacccagagctcgccctcgaagggctcctcgccggcgatcatgcgcagcagcgtggtctttcccgcgccgttttcgccaaagagcgccacgcggtccccgccgcgcagggcaaaggacgcgccggtgaacagcgcgtgcgcgccaaagcgcttgccaaggtccttcgcctcgaggatgcggcggctgtgcgcgctctggccctcgatttcgaagcgcacgcggcgctcggccttgggacgctcgggcgcggcctcgcgcatccgctccaggcggcggatgtcgtttttgacctttttgtccatctttttggcgctggcgcgccgcttttccttttcgcccatcttcaggccgctggagggcgcctccgtggacttgcggtgcgcggtctgggcgcgctggcgcagggcggcgatgtcctcctcgagcgcgcgctgacgccgctgcccgacctcgtactggtggagctgttccgcgtagcgctgcgccttctgcgcgcggtagtcggagtagccgcccgcgtattccgtgaggcggccgtccgcaagctccaggatgcggtccgcgacggcgtccaggaaatagcggtcgtgggagacgacgagcgtcgcggcgcgcagcgcttgcaggcgctgcaggaggtaggcgatgttgcgcgcgtccaggtgattggtcggctcgtccaggaggagcaggcccggctgctgggcgaggaccgcgtccagcgccgcgcgggtgcgctcgccgccggagagcgcgtccgcggcccgctgctcctggcgcaggaagcccagcgcgcaggtcgtgcgcacaaggccggagtccgggaggagttcgccggcgatcaggcgcaagagcgtggtcttgcccgcgccgttcgggcccacaaggcccacgcattcgccggtttccagggaaaaggagagattgtccagcagggttctgtcgcccagcgacagggtgaggctgcgaacgagaagcagcggcatgtgcattcccccaaaatacaaaacgtccccgcgcaggcggggacggagaattcagccgcaaagggcgcagaggcgcgcaaaaaacaggcgggcaaaatccttccgcacaccccgttctgcgcgcaggcaaagcaggccccttttcgcgaaaaaagggaatgcttcccccaggttcagaaatgagcgtgtcggttagatcttcctcatgcctgtcctatgccctcctcacttgggaatcttccgcctcaggatacaatgcgcggcgcgcgttgtcaagaggcaatttcgcagcccgcggcctccagcgcgcgccagccatcctcgcgcgccagggcgtccgcgggcgccttcgcgctctcgcacacgagggagagctcctcgtccgtccgggagaggaaggtcaggcggccggattcgtccacgccggaggcagaagcgatgcggcagacggaatacgcctccggaaagacgcgcaggcgcagcgcggcaggggaagaagccatggaatccctcctgttttcaggcgttttgcgcaaacgaaaaggcggcgcagcgcgccgcctgtcggtcggtgaaaaatcagatttcctcgtcgggatcgtcgccgacttcttcgccgtcgaagcggcgctgcacgatggcgatgagcttttccatcaggctgtcgtcctcgatgggcacaaactcttccatgtcgtcgtccatctggacgatcttcatgatgtagacttcctgatctgcgcagccctcgcaagcctcgtcgtcgcaggtctcctcgtcgtgggcgcactcctcgcagccgcactccgcgtcctccgcatcggacaacacggcgtattcctggccgttgtagaagaagtagtccatgacctccagttcaaagtcgttgccttcgtcgtcggtgaagacgacaatatcgcgctcgtcctgcatgggtttgcacctcgcttccgtatttgcacgcctattgtaccccaaatgcagaaaaggtgcaagcggaatcttggaaacggagcgagaagcttttattttttttgagcaaagtccagggcctggcatacccaggaaaagagctctgcgtccaggtcctcccggcgggagaggacgatgtgatgcgtccaccttccgggataggcctcggtcctcgccgcgacgcggggggagaggagcggcgcgggcagccccagggtcagcacgaaggaagcgggcggcagcttggccttgggcaggacgcgcagaaaggacgcgcaggcaaagacgcgcccgcacaagagcgagatctgcgtcttgcagaccttttcctggaccgcggggcaaaggctgcgcacgccgcagagaaactccgcgtagagcggcagcgcctccaggtgggagtcgaaaaagagcgcggttcgggggtcgagttccggcatgtgcatccctcctccaagaagagtatagagcgcggggcggactttgggaagggtccttcgctttctttttgcgcgaaaatcgtgtataatggacgaaaatgcatttgggggagaggaagccatggtaacgggaaagttcatacgcggaaacgacgacctgcgcgaggtggaggacgtgcgcatgcgcgtctttgtggaggagcagggcttccgcgcggcggaggaaatggacgcctacgacgcgcgcgcgatccactgcctgctctacgacggcgaggggaagcccgcggcgaccggacgcctctacatcgacgacgacggctattggcgcatcggccgcgtggcggtcgtgcgggagcgcaggggccagcagatgggcgaccttgtgatgcgcatgctgctggacaaggccctgggcgcgggggcaaagcgcttccgcctgctggcgcagcggcaggcggaggggttctacagccgctacggcttcaccccctacggcgaggaggtcctggaccagggcgtgccccacatcgagatggaggccacggacgtctccatcctgcgggcggtcttttccgggtgccgcggcgaggagatgctccgccgcgaacaggaaggcaagaaagaggagtaaaccggcatgggtgtcatcggcattgcggggcgcgaaggctccggcaagacgcgcgcgtgcgtggaggagatccgcgccctgctgcgccggggcgagcgtgcgctctatctggttcccgagcaggacacggtggaggcggagctcttcctttcgcgggagctgaacctggacgtgctctggaacctggaggtgctctcgcccacgcgccttgcgcagcgcatccgcggcgaggcgggcggcagcgcgcgcgtcctgctcacggacgcgggccgcgccatggccctcaagggcgcgctgctctcgctgcgcgggagcctgcgctacttttcccagggcagccagggcgcggccgaccagatcggcgatctgctggccgagctcaagagcggggagaacgaccccaccctcctgcgcgtggccgcggaccgcatgcccgcgggcagcgcgctggcgcagaaggtctacgacctggtcgccctgtacgaggcgtatgaggaccggctcgccgggcggtacctggacggcgaggacgccctgcgccgcagcgcggagctcgccggcgcgtgcgggagccttgcggacctgacggtctttgcagacgggttcgacgtgctgccgcggaccacgctgcggctgctggccgcgctgggcggaaagtgccgcgcggtgtacgtgacaagcgccctcagcgcgcccgaggcgccggacagcgcgctctttgcgcccgcaagggacgcgatgcacacgctcgcccgcatgtgcgaggaggcgggcgtgcgcttttccctgcggacgctgccggaccgcgcgctgccgaacccggagatcgagcacctggcaaagaacctgtacgcggaccggccccgccgctttgcgggcgcgccccggcgcgtgcaggccgtgcaggcgcgcgatccctacatggaggccgagcgcgccgcgggctatctgtttgaaaagtgccgcctggagggctggcgctaccgggacatggccatcgtctgcgcggacatgggcgtctacggccagcgggtccgccaggcgctcgagcggcgggggatgcgtgcctatatcgaccagcagcccgcggccgcggaccatccggcggcgcagtacctgctggcggcgctggcgggcgcggcgcgctactaccggcaggaggacatgctgcgcgcgctcaagagcgggtacgcgggcgtgaccgcgcgcgaggcggaccgcctggagctctacgccatggagcgcggcctggaggggcgcctgtgggaagtgcccatcgaggaaaacgacgcccaggcgcgcgaggcggacggcgcgcccctgcgctccctggaggagatccgcgcgcgctttgtcgggccgatccgcgccttccgggaggggggcttgacgcggagcgtgcgcggcttctgcgagggcgtggtgcggctgatggaggaggacgacatcgccggccagctcgccaaggaccacgcccgctgcgcgcaggagggggacgtgacgcgcatgcaggtcgtgcggcaggcgcagtccgccatcaaccgcgtgctcgaccaggcggtggagctctgcggcgaggagcagatgcgcctggaggactttgcgcgcctgctgcgcgcggggcttgcggcgatctccatcgggtccatccccatgtccccggacgcggtctacgtcggcgagatcgcgcgcttttcccggcgggaggtgaagatcctctacgtcctggggacgaacgcggacagcatccccgcccggcggcaggacggcggaaccctgcaggaggacgagcgcgcggagctgctgcgcgccgcgcgggaggcgggcgtgcagatccgcctcagccgcctgagcgaccgcgcggccatcgagcgcatggcgctctaccgcgccttcctcgcgccgaaggaggagctcgtcctctcctatgcggcggtggacgcgcgcggcgcggccctgcgcaagagcccgctgctgctgcggctggaggggcgcgtctttccgcagatgcgggaggcgtgcggcctgctgggcgaccgctacgtctacgccggggcgcgccagtccatgcgggaggcgctcctggcggggctgcgcgcgtacctgggcggcgcgcgcctgacgccggagctgctgggcctggccggcgccctgcgcgagagcgcgcccgcagagtacgagcagacgctgcgcagcgcgatcgagggccggcgggagccggcgctggacgccgaaaccgcgcacgacctctacctgcgcgcgcagaagaatgtgcgctacggcgtggaggggatgatcgcgagcatctcgcagctggaatcctttgcgctctgcccgtttgcgcactttgtgggctacggcctgcgcccgcgcgagctgaaggagccgcgcatggacgcccgcgagcgcgggaccctcgagcaccgcgcgatcgaggactttgccgggcggctctacgcccgccaggacgaggtcggggacgaggaggccgagcgcctcatgcgcgaggtgctcgagcccctcttcgaggaggagagcgcgcaccggcgcgagggcggcctgagccgggccaaccaccaggagatccgccgggccatgggccgcatgagccgcctgatggcgctgcaaaagcggctgagccgcttccgcgtcagcgcggaggagctggccttcaccccggcggacaccgcgcccctgtcgctgcccagcggggagcgcgtctacctggagggcaagatcgaccgcgtggacgtgctgaacctgcacagcgacctctatgcccgggtcatcgactacaagacgggaaacaccgccctggggctggacgacgtctacttcggcctgcggctgcagctcttcctgtacctggacgcggtgctcgccctgcgcggcgccaagcccgcgggcgtgttctaccagaagctctccgaggcgccgatgcgcctggccggcgggcgcatcgacgaaaagctcgccgcgcgccagcggaagaagctgcgcctgactggcttcatcctcgaggacccggacgtcatcgggcagatgtgcgcagacccggagatcatggaccaggtgctgcccgtggagcccaggaccaagggcggccgcgccctgcccggggagttcaccgagcgcagccgcagccggatgctctcggaggaggcgttcggcctgctgcgccggcacacgcgcaggaagctggcggagctggccggcgacgcgctcgcggggaaggcggcggtctccccggcgctgacgcaggacctggacgcctgcaagtactgccggttccggagcatctgcggctttgacgagagcctgcccggctgcgagcgccgcaatttgcagatggacagcgaagaggtgctgcaacgaatgcgcaaggaggacgaaaatgcctgagtttacgccggagcaagcgcgcgtcatcgcgcatgagaggggaaacctgctcgtcagcgccgccgcggggtcgggcaagaccgcggtgctcgtcgagcgcatcctgcacctggtgcgcggcggggcggacatcgcctcgttcctggtggtgacgttcacgcgcgcggccgcggacgagctgcgcgagcgcctgctcctccgcctggaaaaggaggcggaggagaacccggacctgcgcgcccagctcgaccgcgtgcccctggcctccatctccacgatccacgccttctgccgcacgctgctcgcccgctacagcgaaaaggcggg

SEQ ID NO: 1114 - DNA, 5393 bp, Unknown
  16S sequences of unknown bacteria
aaatacgccgaaaatacgccgttttgggcggattcggattattctcgtttgcctacgatcataggacatatttcctcagaaacgacgctgaacatatatacccatatcaccgctaatatgcagcgttccgccgccgacaaaattgaacggggtttcggcagaaatgagggcactttgggcgaggacggacaaacacccgacagagcaccggaaacgcccgtaagagcgaaacttgtgccgaaacagccgaagatacgccgccacagcacgggatacatatttagaatcagcaaaaagaaacgggaaggcagctattcgccgaaattgccaaacggcaaacgcaaaaagtttaatatctacaccgacacaagagaagaatgcgaagaaaagctggcggtgatgattgcagaaaagaatgcggaaatcaaggcgggcgagaaagcgacaaataagggctgaccgtggcggtcagccctcaaaatttgcgtcgaagtaagcaaataacatatgctaatttagttttttggtaaagcgacagtgaggatagttagaacatcccataaaatctccattccttccatgccgcacgacaagagcgctcccacagcgcggacaaatggtattctctatattttccttcatctttttgatattttctatatgttcagaattacttatcatattacttttattgtgattaacaagtatatcgtatgttgaactcatttcatcaaacgaaagcaatctttcggtaggagtctttaacttacgaatgattcctcccacggtatatacactttgtgattgaatgaagtttatattacctttgacaaataccacaatgggaaaaatgggagtgtcttgcggtaacaattctttaatcgcaaacttatgcgtgagattttgttttacgggactgtaaaaatgatttttcactttaccataattcaaaacctgagtccagttttgctgagaatcatttccatatatgcgcccggagtaattcttcgtttctatcacgaaaacgccattcggatttatcactacatggtcaatttgtgatgttcttccaggagcagtctctaatacaaggttgttgatgacgaattttggattattcaaatcagcagaatttcttccaattacaattttaataatcgtttctccaattagccctttaataactgacgactttaaagcaaaaacgattacaagaacaacaatcaagaaataaatcatgttcaccctccaaaaaatcagccgcagagtttcccctgcggcttcaactgcggtcaaaaccgcgatttttggtactcaaatgccttatgaataccggaattggtcggagtgacagggttcgaacctgcggcatcgacatcccaaatgtcgcgcgctaccaactgcgctacaccccgatagttattaaattgtggtcgtgtaggtggtcaaatctgtggtcaaacacagttttgactgccttttttcatttgccaaaccgcccaaaatccgcacggttgaagggctttcggcggttttcgctttcgtgcggtgcgaacaccgtctatgctcccaaagcaggcgccctaccagtcgggcgacacctcggtctaaactattatatataataccacggtctttgtcaactgttaaattgaaaaattgaagctgccgcgtttgcggcagcttcaaacattattacattattattcgccgaacgggaaatcgaatgttccgccggagctcgacgaattaccgctttccgaattgctgcttgaaggtgccttggtgctgtagctggattcgccggtattcgccttaagcactgcatcaaaggtcttctctgccccgcccttcgtaagcaccgttacggaaatagtatctcccgcggagcattcctcgattatatcgagtacaatatcgtcgcttgtgacctcaatattattaatacgggttataacatcaccctctgcaaccttgccgtgcaggtcactatcctccgagacggaagcgacatacagaccgaccgagctgtaaccgttgatttcggcggtcacggagtttatggcggtataagtaatgccgagtcttgcgcggctgacgaccttgcccttgcttataagctcgctcacgatacgcttaaccgttcttgtgggtattgcgtaccctacggcatcatattccgttcccgcaagctttgaagaggttatgccaaccacctgcgaatacatattcacaagcgcgccgcctgagctgccggggtttattgcactgtcggtttggataagcttagccgaataatttgaggtggtgcgcacgcgtctgccaaccgatgaaattatgcccttggtgatactcgaatcatccgtggcatcgctcggtctgccgatagccaccacgctttcgccgaaattaagctgtgcggaatctccgaactgcgccgccttaaagccgctgccctcaatcttaagcaccgccaaatcgctaacctgatcgcccgcgacgtactgtgcgtcatactccttattatccgaagtataaatcttaaatttggcggaaggcacttcggcgtaaatatgatcgttcgttacgatatatccgtcgctgctgtagaaaacgccgcttgcctgtgagccctgccccgcggtattgtaaaccattattccgacaaccgacgccttaacatcttcataaacctcggcagcggtcttttcatcggtttttgccggctttgccgcaagctcgatctttgcgtttccgcctgataccgaacgcacgctgcttctgccgagaaaatatcctcctgcagatgccgcagtcaaaaggattacttccgcaagcaccgccgcaaagtatttgagtccgcggcttaccggcttgtaatccttaacagcagtgatcggagtataatttattgtgcagggcggagtgttaaagccgtcgttatatattcccgagaaattcggttgtacatccgtattcggctgttcctgctgcgaagtgccgtcagcctgagcatccacgctcattacaggctctgccgtatcggcggaattttgctgccgagcatcaaagcttacaggctcgtcctccttcgctttttccgaaaacccgggctcggaattgcccgcgtctgcagagtttttgttttcaaacatatcgtccataatgattctccttaattattgagcggcagcacaacgctgaatgcagtaaactgattttcacggctcgccgcggctatgctcccaccgtgcgccttgactattgtttttacgatataaagcccgagacccgtgctgtttttattcgcggagcgggatttatcaaccttatagaagcgctcaaaaacatacggcagctcactttcggggattcccttccccgtatttgttatcgtaaatgtgagctttttgccgtctgccttcgccttaaaatctattgtacccgattcgtttgtgaatttaacggcattatctaccaaattatatattacctgatggattaaatccttatcggcgtttacagagatactctgaatctcatcaagcccggttatattaagcttcgcagcttcaattcgctgttcctggcttacgactatggtgcataacagctccctgaaatcgaaaagctccggctttaaaacaaactcgcccgattcaagcttcgccatgctgagcattgattgaacaaggcgtgaaagccttttcacctcgtcggacactatctggagataatacttttgcttgtccggctctatggtgccgtccaaaatgccgtctataaagccgcctatcgtagtcatcggagttttaagctcgtgagatacattggcgacaaagcttttacgcattccctcaagctgcaccagtgaattggtcatttgattaaatgaaaccgcgagctctcctatctcgtcatcgctcgttacgggtatgcgctttgaaaaatcaccctttgccatcgcccttgccgcttcggacatttgcttgagcggcttcgtaagcctgtaggtcatggcataaagcgcaaaaaacgttattacaagcggaatggcagccgaaaacaaataaagctttgtcacggtagacattagccgccgtattgaagaaagcggcgcggcgctgaacacggtgaccgcagttccaccgctgcttgttatccgctttgaaaccacataatgcggatttttatatacatccagggttttaagcctgaacggttcattttcatcagccgcaagctccgattccggaattaaatgctccgaatgagtgcactcgctgtttttcccccattcctcgcagctgcaaagcactaccgcaccggtcttgttggctaaaaatatatcgacatccgaaaccgccgagatagcgttcagggttttataaagctcctgcatattcatatcgcccgaggacgcctcggctatataatccgcagcctcatccgtgcatttgccgagtgtttcgtattttgaacgcgccaggtaattattgagcacaaatgaaagtatcatcatcataaccgtaagactgaaaataataatcagcgcggttgtgaaaaaatattttttaaaaagcttaagcttcataaagctattttacctcgaatttatagcctactccccaaacggttttaagcgaccattcatcggaaacattttccagcttttcgcgcagacgctttacatgaacatcaaccgtgcgggaatcaccgtaataatcaaagccccagacctcatcaagcagctgatccctcgtataaacacggttggggttgcttgccaaatggtaaataagttcaagctctttaggcggcgtgtcaattttaacaccgttaacctcaagctcgtaattagtaagattaatgcgaagcttgtcatatcttacctcgcttatctgggtgcccttgtcactgtcgttcgttctgcgaagcactgcttttatgcgggcgattacctccttggtgttaaacggcttgcttacataatcgtccgcacccagttcaagaccgagaatcttatcaaaggtttcgccctttgcggtcaacattataatgggagtttcgctcgtcttgcggatttccctgcagacctgccagccgtccagcttcggaagcattatatcaagtaaaataaggtcgggcgaatactttgaggcgtattccaccgcctgttcgccgtcgtttgccacaacggtatcaaagccgtccttttcaagatacaaacgcaaaagctcgcagatgttcgcgtcatcatcgacaataagtattttatattgcattgcattcccctcacttaactcttgtggcgcgcccgacagcaatccttttcgggtactacacttatttaaagataataatataatatttatattacgaaaatatgaata

SEQ ID NO: 1115 - DNA, 32759 bp, Unknown
  16S sequences of unknown bacteria
ttctgctttttttaccagcatctttatcacccctcactattataccgcattctttccctcaattcgagaatctccaatgagaaaaaaggccaccttccggtgacctttttcgacaggctgaagcgccccggcgggggcgcttttttatgccggtatgggctgcggcgcgtgcggcggcagggcggagccggccagcagcacggcgtagatcacaaacgcaaagtagagcaccagcgccagcagcaccgtgcacaggctgatcttgaccaggatgggcagcgcgaaccagcgcgcgatcaggacaaccgccacgccaacaaagagcacggccgccagcgcgaaggtgacatagtttaataaaaagtccacgggacctccctccttttgcttgacaaaagtctcctccattctagccgatccgcgcgcactttgcaagcggaccaaaaccccggaatcttccggattcctccccagcgccccgggcccgaacacggggttttgtgcaaattctctgaaaaaccaacgaaaaactgtgaaaatcattccgcgctcgcctgtgaaggaatttaaaattgtgttaatcgtttttgtacgatatatttaactatgagattgaaaccttaccaaaggaggaggaaacatcatgaaattgcgcaagctgctttgcctgctcctggccctgctcatgatcgcggcgctgaccgcgtgctcgggcggggtgacgggcggcgcgccggcggaagacccggctccggccgcggacggcggcgaggaagcgcccgcggcggacgagggcgccgagaccccggccgagggcacgagcgtcgatgtgctgacctggtccaacgcggccacggtgcagtacctcaaggacatttccgcggccttccacgaggccaatccggaccactacctgaccatcagcgaagtcccctccgccgagatcgaccaggtcatccagacccgcatctccgcggcgaacgtggacatcgtctccttccagaccttctccaagccccaggaggactggaacgccgactccatcgacaagcccgcctggcagcagtacatcgatgagggcctgctgctggacctgacggaccagcccttcatcgacaactacaacctggacatcctgatgggcaattcctacaaggaccgcctctactccctgaacatgggcaccgtcgcctacacgggcctgttctacaacaaggcgatcttctccgagctgggcctggagatccccaagacctgggatgagttcatcgcggtctgcgaggccgtcaaggccgacgggcgctacaccgtgctctccgcgggcgcggcggaccagtggccgctgaacatgtactccaacgcgatcctgtccgccaactacggcgacggcgcggaggaaatcggccagaagctgctcacgggcgagatgaagcacaccgaccccgaggtcatgctggtctacgactgcatggagcagttcgccacctacctggagccgggcgtcaccggcatcgcctactcggatgcgccgggccgctttgccgcgggcaacatggccatgtacgcagatggttcctggtccgcgccggacatcctgcgcgccaacccggacatcgagttcggctacttcccgctgccgggcattgagccccgcgaggacggcctggacccgcagtacggcatcaagtacgacctgtccttcgccgttccgaccaacgcgcccaaccaggaaggcgccctggcgttcctgacctacatctcggacaaggaagtctacaccgcgttcctgaacgccgtggcgggcttctccccgacgcagaacgacatcacgctggacaacgagttcctcaactccctgaacgagggcctgcagtccccgtgcctgaacgcggagatgtacatctacgcgcccaagggcgtcggcgagtacggcaacggccagttctccttcctgtacctgcagacgctgggcggcccgctgacgggcgcagagctggcgcagaaggcggacgaggactttgagaccgcgcgcgccgcgctggagagcctgaacaactgaccgcaatgaaccgcaggggcgacgcgccgcaaccgtcgccccttttttgcaaggagggattgctttggagggcaaggcgatacgcaacgcttcccccgtcaacagccccaagcgccggcacaaacacatccgcgcgtttcccgtatgggtggtgtttctgtgcatgctgccgggcatcctgcactacacgatcttccgcctcttcccctcgacgatgacggcggtgctttcctttacggacatctcgggcattccgggctcggcctggcagtggatcggctgggacaactaccgggaattcttcatcctgcaaaacatccgcgacctcaaggcgtcgctggggcgcacggcgatctacgcgctgtccgtcaccctcatccagaacgcgctggcgctgctgatggccgtcatcctcaacggcaagttcctcaagggccgcaacttcgcaagggccgtgtacttcatgcccgtgatcctgggcgcggcggtcgtctccacgatctggaagctggtcttctccacgcccacgggcccgatctatctgttcatgcagaacgtgctgggcatcgagaacccgccggcgatcctttcgagctacagttacgccttccccgcggtcattgcggcgcagatctggcagaacatgggctactccatggtcatcttcctggcggcgctgcagaacatctccgcggacctgtacgaggcggcctacatcgacggcgccagcgagtggcaggtcttctggaagatcacgctgcccctgatctggtcctcggtcacggtcaacacgctgctggccatcatcggctcgctgcagtcgtttgagctcatcatgaccatcacccgcggccagttcaacacctcgacgctcggcatgatggtctttgccacggcctttggcggcggcggcgcgacggccagcggcggcacggtcgccggcatgcgccagggctacgccgcggcggagtccatggtgctgttcgtgggcgtgctgattgtcacggtcatctcccaggccatcatgaagaaaatggaggcggatcagtaatgggcaagatcaaaaacatcccctttcgcgtgttctgctatgtgctgatgatcgtcttcctcttcatctacctgttcccgctgttctttgtggcgaacacgtcgctgaagacctcgcaggactacatgctgcacccgacgtcgctgacgacgacctgggcctttgacaactacatcaccgcctggaacaaggcgaacttcggcgcctacatcggcaactccgtgctctacacggcggtgtgcacgatcgcctcgctgatcctctcgctgctgatcgccttccccatctcgagaaagtacatccccgcctcgggctttctgtacatcctcttcctctgcggtctgttcctgccctcgggcctgatcccgacgttccagatggtgctgaacatggggctttacgacacgaagctcggctacatgctggtcatgacgggcgtaaacgcgacctccgtgttcttcttcacgggctactttaagtccatcccccgcgaactggacgaggcggcctccatcgacggctgcggctacctgcgctacgtcctgacgtgcatcatcccgctggcgcagccggccatggtttccatgggcatgctctcgatgatcggcgtgtggaacgacatcgtctcctccacgatctacctgacgagcgagacgaactacaacatcacccgcggcctgttcgtctttacgggccagtattccaacgactggacgctgacggcggcgggcctgctgatcgtggccgcgcccctgatcgcggtctacgtcttcggccagcgctacatcgtcgacggcgtcatggccggcggcctcaagggctgagaccaacgccgtacacaaaaaaacgacccccgcgggggtcgttttttttcggttgcgctttaggcaaaggcgcagtccgcgtcgtggtcgttgaccacgcccacgctctgcaaaaaggagtagacgatcaccgggcccacgaacttcatgccgcggcgccgcaggtcccgggagatctcctgggagaggggcgtctgcgccggcacgggcgcacccggcgcgcggcggaagggcgcgcccggcgcaaagccccagaggtaggcgtcaaagctgccgaactcctcctggatgcgcaggaaggcgcgggcgttgtccgccgcggcgcgcagcttccgctcgctgcggatgatcgcggggtttgcaaggaggcgctggatctccgcctcgccgtaggcggcgacctttgcgggatcaaagccgtccagcgcctcgcggaaggcctcgcgcttccggagcacgatggcccaggagagccccgcctggaacccctccagcagaagcatctcaaagagccggccgtcgtcgtggcagggccgcccccactcctcgtcgtggtagcgctgcatctcttccccgcgcgcccaggcgcatcgccgcatctctgccatgcctcagccctcgaacatctccacagccttcttgagctcctcgatgatctcgatgtgctgcgggcaggcggcctcgcactggccgcaggcgatgcagtcgctggccttgccgcccgtgcgcgtggcgaagctgtagttgcccacggccccggcgcggttgccgtagatcagctggttgttcatggctttgaagatgccggggatgttgatcgactgcggacatcccttggtgcagtaggagcaggccgtgcagggaatctgcgggaccttgtccagcgcggcgcggaccttgtcgacgacggcgcgctcggcgccggtcaggggctggaagttctccatgaaggagaggttgtcctccatctgcgccagggtggacatgccgctcaggaccgtgacgaggccgtcgagcgaggccgcaaagcggatggcccaggaggacagggaggccttggggtcggcgtcggtaaagatcttggcgatgtccgcggggagcgccgccagggacccgcccttgacgggctccatgatgatgacgggcttgccgtgcttgcgcgcgacctcgtagcaggcgcgggactggatggaggcggactcccagtccgcgtagttgatctgcagctgcacgaactccatgtccgggttgcgggtcagcaggtcgtccagcacgtccgccttgtcgtggaaggagaagcccaggtgcttgatgacgccctcgtcgcgcttgcggcgcaggaagtcccagatgccgaagcggtcgaaggcctcggtgcggttgtcgcccaggttgtgcaggaggtagaagtcgaaataccccgcgcccgtgcgggcaagggaggtggccagcatgccctgggcctcctccgcggtcttggcgccggcccaggcgggcagctttgtcgccagctggtaggactccctggggtagcggtccaccagcgcggtcttgatggccatttcgctcttgccgccgaggtagccgtacgccgtgtcaaagtaggtgaagcccttggagaggaagaggtcgaccatcttcttggtctgctcgatgtcgacgtcctcgccgatcatgggcaggcgcatcaggccgaagccgagctttttgatgtcttgtccgagagaacccatctgtgcaacccccttgtgttttgttaagaatagtttacacctaaaggtgggtcgaatgtcaagccctgcgcctggaaaacccgccgcgatgcgaaacttttccaatcttttacacgtctaatgggcagcagatggcaaggagagggggaatttcacttgaagggtcgttccgcgcgcctgatcgcctacagtgcggcgcacttctttgtggattttgcctgcgcgctgctgctctttagcagcggccgcgccggcgggctgggggtgttcctcctctataactactgcgcctttgtgctgcagctgcccctgggcatcctcgcggaccgcctggacaagaacgcgggccttgcggcgctgggctgcggcctggtcgcctcggcgttcgccctgtccgccgcgccggcggcgctggccatcgtcgccggggtgggcaacgcgctcttccacgtgggcggcggcgtggacgtgctcggcgacagcggccggaaagcctcggcgctggggatcttcgtctccccgggggcgctgggcctgttcgccgggtcggcgctcgcgggagtgttccccgggatctgcgcggtcctgctgctcgcgctgtgcgcgggcgcgatcctctttgtcgcgcgcctttacggccgcctgcgccgctcggggaacgcggcgctgtgcctgcggggcgtgctcggcccgcggcgcaggccggccgcgccgctcgcggtcgcgggtttggttctggtggtcgtgctgcgctcctatgtcggcctggcggtgcagatgccctggcaggcggcggacggctggtcctttgccgcggtgcttgcggtggtgctgggcaagtgcgcgggcggccttgcggcggaccgcttcggcgcgcgccgggccgggcccgcgtcgctgctcgccgcgggcgcgctcttcctcctgggggagaacccgctcgcgggcacggcggcgctcttcctcttcaacatgaccatgcccatgacgctcagcgccctggcgcgccttctgccgggggccaagggcctggcctttgggctgacgacgtttgcgctgttcctggggttcctgccggtggggctggatcttgcgcccgcggcgggcctctggaccgcggccgcgctgtgcgcggtttccgcggcgctgctgctgcccagccttcccgcgccggagcgcgcgccgtcgcgcctgctgcccctgcgcaagtgggtgcagatccgtgctcgctgacctgccgcgccgcctgctcctgtccctggcgctgacgctgctcctggagggcgcgttcgcccggctctgccgcgtgcgcgggcggcgcaacgcgtgcctggtcctgctggtcaacctgctgacgaacccgccggttgcgctcgtggggaacctcttccccttctggcccgtgcaccttgcgctggaggccgccgccgtgctcgtcgagggcgcgatctacgcgcgcctggccgagggcctgcgccgtcccctgctcttttccctgggcgcgaacgccttttcctacctgacgggcgcggcgctttctgcgctgctgtccgcactctcttgacggaggcgaaattccctatgaaaattcgacacattgccgcgatcctcgcgcttctggtcctggcgctccttccccttccggcgcgcgcggacgtcatctgggagccggaggacggcttctacgccgcgcacgcggacgagtgcacctatgtcaacgaccgttacctctccccgggcggggtcgaaggcgtggtcagcccggaggatgggcgcgcgctgtgcacctttcccgagggttgggaactgcgcatttccttcgtctacgaagatgcggatggcgccgcctggggcgtctacgaggagggcgaggagagctgctgggtgcgcctggacgcgctgcaaaaggtctacgacggggacgacttctttacggaccatgcggaggcgatcacgccctatgcggacgagcttgcggactttgtgccgcagggcaccgtctacctatgggagtacccgggctccggcgagctctacggcaagctctcgccagaggacctgacgcaggccgactttcttccctatgacgcggtctatgtggatgagcaggggcagacctgggtctacatcccctacctctacggccgcgagggctggatctgctgcgcggacccggaaaacgccagcctgcccgcgaccgcgccgcaggccgccgcggcggcgaagtccccggccgcgacggacgccgtcgggcccctggccgcggcgggccggacccgcctgtacctcgccatcggcgcggtggcggtcgtcgccctgggcagcgccgcgctgctcgtcgtgctcgcccgccgcaagcagtaaaaaggaggcactgtcccatgttcctggacgtcatcgtgtttccctgggagttcttcgcgccgggccttgccgggctggcgttcgccctggtcgccgtggtcgtggccgtgacgctcctgctcctgcgccggaagtagcgcgaacggatttaacatccctgcgctagaatggagaaaaacctttttcgggaggacctgcatgaaggacgccattgtctttgacctggatggaacgctgtgggacacggtctctgccgtcgtgcgctcgtggaacgaggtgctggaccggcgcccggaggcgcgcgcccacctgacagaggacgccatgcgcgcctacatgggcaagaccacggagcagatcgcggcattgatgctgccggcgctgcccctggaggaagcgctggccctcatggccgagtgcacgcagagcgaatacgcctacctgcgcgcccacggcggcggccggctcttcgacggcctgcgccccgcgctggaggcgctctgcaccccatacgacctgttcatcgtcagcaactgcgacagcggctacatcgagatcttcctcgaggtgcacgacatggcgcgctgcttccgcgggcacgcctgccccggggacacgggcctggacaaggccggcaacatccgcagggtgctggcggaggcggggaatccgcgcgccttctacctcggcgacacggacggcgacgagcgcgccgcgcgcctggccggcattcccttcgtccacgcggcctacggctttggccgtgcggagcgcccggacgccgtgctcgagcgcgtttcggacctgccggcgctcgcggcagagctgttttcctccccgctcttcggataaacctgcgccgctctgcacaggataggggcgaagaggtgatgatttatgcgcccagcccggtccgtttggcgctcgctcctgctgtgcgcgctgccggtggcggcggcggccgtcccggcggccctgctcgtggaggcggacagcgcctggtatctctccctgcaaaagccggccttcaacccgccgccgtgggcctattccgcggcgtggtccctcgtctacctgtgcgcggcggcggcgctctatccgctcctgcgcgggggcatccggccgggcgcggggacggtcgccgcgctcgcggccgcgggcgcgctgaacgtggtctggacgggcgtcttcttccgcctgcacgccataggcgctgcggcggcggttcttgcgctgctgttgctcgcgcttatatctgcgctatgcgggctgtggcgcgcgcaccgggcgagttttgcgctcctcctgccgcacctgctctgggggctctttgccttcgcgctcaatttggcctttctcctgcaaaatcccgcgtgaacttttggcgaagcgcgccggccgtcttgtttcggccggcgttttgtcgtataatggattgcagtttgaagaccacggcaaaggagcaggggaaagatgaagataaccgctgtccatctgtacacgatgaagataccgcttctcacgccctttaagaccgcgctgcgcacggtggaaaacatggaaaacgtcgtcgtgacgctggagacggacgaaggcgccctcggctttggcgaggcgccgcccacggccgtcatcacgggcgacacgattccctccatcgcgggcgccatccgcgacttcctcgcgcccaagatcctcggccgcgaggtgacgaacgcggacgagatgcacgacgccatcgagggcgcgatggtccacaacacctcggccaaggccgcggtggagatggcggtctacgacctgatcggcaagaagtggggcatcccgctctacaagctgctcggcggcgcgcgggagagcctggagacggacatcaccatcagcgtcaacgacgtggacaccatggtcgccgactccctggccgcctgcggccgcggcttccgcatcctcaaggtcaaggtcggaaccgacgcggagctggaccttgcgcgcctttcggcgatccgctcggccgtgcccgcggacaccgtgctgcgcgtggacgccaaccagggctggacgccccgccaggcggtgcgcatcatcggccggctggaggacgcggggctgaacgccgagctcgtcgagcagccggtcaaggcgcacgacgtggacggcctgcgctacgtgaccgagcgcgtgcacacgccgatcctggcagacgagagcgtcttctccgccgcggacgccgtccatatcctgcagacgcacgcggcggaccttgtcaacatcaagctgatgaagaccggcggcctctacaacgccatgaccatcgcctccatcgccaagacctttggcgcggagtgcatgatgggctgcatgctcgagggcaacatcgccgtcaccgccgcggcgcacgcggccctggcccgcggcgtcatcacccgcatcgacctggacggccccgcgctctgccgcgaaaacccggtggtgggcggcgcggtctttgccgacagcaagatcaccgtacccgacgcgccgggccttggcatcgagcgcgtggaagggctcatccccttaaatatctaggaaaacgaaggagaatccccgatcatgatgaagaaattcgctgccattcttgcgctcgcgcttgcgggtgcgctgctgctcacgggctgcgttgcggccgcccccgcgctggacgagtcgcagatcgaccgcccgacggtcgtggtcacgctgaacggtgaggccctggaggccacggtcgagcccgaggagacggcggaggcttccgccgcgcccaccgcggaggccaccgcggagccggacgagaatgccgtccccgaatacgccgtcctcaacaccgtgcccgcgggcgcgacgctgaccctctccggcacgcactccagcggcatcacgagcgtctgctaccgctttgacggcggccagaccacgaccgtgcagggcgagtccgtggaggtggaagtccccgccggcgcgcagctgctcgagctctacgtcatcggcggcaacggcatcgcctcgcagtgggcggcctactacctgacggtggaataaaacaaagcgccccgcgcgcatcccccatgcggagaacaggaccgaatttcgtcctgttctcctttttgtttctcaaaaatttcgcattaatacgtcgcgctccttcccgcggaggacccgctctatgactaccacgccgcgcgccagtggtacgaggcgggctatgtggccaaggacgtcatgaacatcaccgaccaccagggcatgttctgcaacgggaaggcggccgccttcacccgcggcatcgacacctattccggcatcgcggcgcagctggcggcgggcgttccggacccggagatcgccgcgcacctgcgccacctgtgcgcgctcaaccgcaagatcgcgcacgcgaagcccgagacgtttgaggaggcgtgccagttcctcctctggtaccagatggcctgccgctcctacaacggcagcggctccctgggccggctggacgcgctgctctacccctactacgcgcgggagacggccgccggaaccctggacgacgagcgcgccgtcttcctcatcgcgtgcctgctgctgcgggacaccgcctatgtgcacctgggcggctacaaccgcgacggcagcgacgccactacccccgtctcctacctggtgctcgaggctgtgcaccggctcaagctcccttccaacgtgggcgtctgcgtgggcaagggcctggaccgcaacctgctgcgcaagtccgtggagtaccagttcgcggacaagaacgggaacccgcgctttgtgggcatggagacgctcgtgcgcggcctggtccggaacgagggcgtgtccatcgaggacgcgcgcatgcgcacgaattccggctgccactggctggccatccccgggcgcgaatactccatgatggactgcgtcaagatcaacttctccgttgtgctggacatcgcattgcgcgaggccgtggagaaatacggcgagccgagcatcgaccagatcctcgacctgtacaccgagcacctgcgcatcgcgatccagacgctggccaagggctttgacttccactacgacaaccagatccgcaacgtgcccgagctcccgctggacctgatgtgccacgggaccatcgaaaagggcctggacgcctcgggcggcggcgtggaacactatctgtggtgcatcgacggctcggccctggccgttgcggcggacagcctggccaccatccgccagcgcgtcctgcgcgagcaccgcttcacctacgcccagctcctgcactacctggacaccaactgggaggggccggagggcgagcgcgcgcgcctcttcctgcaaaacgtggaccgctacggcaagggtggcagcgacgcggacgacctggccgtgcgcctttcccagatcttcacgcgggaggtcaaggcgcagcgcacgcccgtgcacggcttccagatggttcccggcctgttctcctgggcgaacacgctgaccatgggcgcgacgctcggcgccacccccaacggccgccgcgccggggagcccatctcccacggcgcaaatcccaaccccggcttccgcaaggacggtgccgccaccgccatgagcgcggccatcgcctccgtgcagccgggctacggcaacaccgcgcccatgcagatcgagctcgagccctccgtgaccacggaggaggagggaatcgagctggtcatggccctgatcgaggaccacttcgcgcagggcggcacgctcatcaacctcaacgtcatcgacgccgagcgcgtgcgcgccgcgcacgaggacccctcgctctaccccgacctggtggtgcgcgtgacgggcttcagcgcctacttcgccagcctgtcgcccaagttccgccagctcgtcgtcgaccgcatcctggacaaacaggtctcctgacctcatcccatacagagcgggagcggaaggtgtttgcccttccgctcccgctctgcgtcagtcgccctttgcccacctgcggcaggtctccaggcgcgcccccgtgccgtcgccgtgctccgcgtcgtaggcgaagctgtgcagcagcttgcagacgaagtcgccgcacacgccgcagtggtcgtggccgcgcgcctcgcagcagccccggaccgggcacgcgccccagaacggctgctggttccggcagcccgtgcagcccgtcttctcccggtaggtacacgcgctgcaaaggattccgcatcgggattccatggtcttcccctccttccgccgcaagtatagcaaagggaacatgacagcgtaatgtcatgttccctttgagcggcgcagaagagtttccgcgcggcgcgcgatctcctgccggagcgattcgggttccgtcacctcgaggtcgtcgccgaagcgcagcgcccagcgcaggcgcgcctcggggtttgcaaagtccaggcggacgcgcagccagccgtccggcccctcctcgacctgcgcaccctcctccagggcgtagtggcggcactgggggttcaggcgccccgcgagcgggtacaggggcgcgtttgggtccggcaggagcatggcctccggcacgggccggcgcacaaagcgctcctgcgtcccctccagggcgcggatgcggcccagccggaagagccgccagtccccgcgcagccggcaaaacgccgcaaggtaccagccgccccaccggtagaccaggcggtgcggctccacgcgccggacgctgtccccgtttgcatagaggtagcggatctcgagcacgcgccgctcccggatcgccgcgcggatctgcgcaaagcgccgcgccagcgcctcgtccccgcaggcgcccaggtcgatggagatccagtcctcctccggcggcgcgagcttgtcccgcagcgacggggcgtgcgcggcctgcgccacgctgtccagcccctgcacgccggcaaagatcgcctccatctcctccgccgtgagcaggttttccggcaggcggtagccctcgcggatggagaagccgccgccgtaccccgcgcgggactccaccgggattcccgcctggcagagccggtcgatgtcccgattgatcgtgcggcgcgagacctcaaagcgcgcggcgagctccggcgcggtcgcgcggccctgccgcagcaggatggtgaggatgccgagcagccggtcgctggtcatgcctcgggcgcgtcccccgcaaggccgatggcgggcgcgcattcgcgcatgccgaggatgcactgggtgatgagctcgtccaccgtggtgcccagccgctgcgcgccctgctcgatgaccgcgcggttgacccccgcggcaaaggacggcgtcttgtacttcttcttgacggacttgagctccaggtccatcacgctcttgctcgggcgcatgatggccgcggccgtgatgaggccggtcagctcgtcgatggcgtagagcgtcttctccatcctgctctcgggctcgatgtcgctgcaaatgccaaagccgtggctcgccaccgcgcggatgatcgcgggatcgacgtccttttcccgcaggatctcctgcaccttcttgcagtgctcgtcgggatactgttcatagtccaggtcgtgcagaaggcccacgacgccccagagctccgcgtcctcgcccgcaagcgccgcaaagtggcgcatgcagccctccaccgtcagggcgtggcggcgcagcgcctcgctcttggtgtattccttcagccattcccaagcctgttctctcgtcggttgcattttctctcgcctcgatttctctctttttctatctgcctgcaacgcaacggcacactgccgcgtcatataaacgtgagaaagcgcataaatgtttccatatggatccacataggaggaggaacggacatgaacgtgcgcacgaggcgccgcgtcgcggcgctgctgctcctgctcgcgctcctgctgccgcaggcggtgcaggcggactccgccagcatcacctgctacggcgaggacctgacgagcgagcaatacaccctggttctggacctgctggaggcggacccggcgacggatacgctcatccccgtgacgcacgaggacgaggtctcgctgctcggggacatcgtcccggccgagaagatcggctcgcgctcgctctcctcggcgcgggtgacgctcgcgcaggagggtgcgggcatcgcggtgacggtctacaacatcgactgggtcacgccgcagatgtacgcctcggccctgtccaccgccggcgtgcaggacgcggtcattgtcgttgccgcgccggtctcggtttcgggcacggcggcgctggcgggcatcctcaaggcctacgagagcgcggcgggcacggagctgagcgcagcggccaaggccgccgccggcagcgagatggtcctgaccggcgaccttgccgacatcatcggctccgaccaggcggtggagctcatcgccatggtcaagcaggccatcgcggactacaacctgacggactttgactccctgcgcccgtacgtggtcgagggcgcgcgccagctcggcgtggacctcacggacgagcagatcgaccagatcacaaacctcggcgtgcgcatcgcgcagctcgatctggacccggagcagctcgcgagccagctgcagggcctggtgaacaacttccagcgcctgcagaacctctccgagcaggcgagcggcctctggtcgcgcatcgagagcgcgttccagggcttctggtcctggctgacgggcctcttccgctaaagcagcgcgccgaatcccaaaacccgcagcggccgaagggaaaatcccttcggccgctgcgggtttcctgcgcttttgcaggtcttagagcgcgtacttctcgcgcaggacctgggcggcgcggtcggcgtccgcgcaggacacggccacgccgatcttcgtctccgacgtggagatgagccggggcgagatgcccgcgccctccagcgcctcgaacacgcctgccgcgacgccgggctggcgctccatgcccacgccctcgatcacgatcttgcagacctggccgtcctcttccggggcgaggcccagggcgccgagcacctccttggcgcgcggcaggtccgcgcgcgcgatggtgaaggagaggtccaccttgcccccggcgggcgcggcctgggagatcatgtccacgttgacctccgatgcagcaaggctggagaagacgcgggccgtctcccggccaaagccgaggccgcgcagcgtcagcagcgtctggccatcgtccgtgtagaggttcgtcacgccggacttctccagcagcacgtcccgcatgtcgtagaggccgggctttttgccctgcaggaaggccgccgcctgcagcgcgcccagggcgaagatccggcgcgaggccgcggcgtgcttgatctcgatcgtctcgtcgttgccgaagaagtagacctcgtgctcgcccgtgaccgtgccgccgcgcacggcgtggatgccgatctcctcgcgctggcggcgctgggtcttggtgtgccggccgaagacataggtcttgtccgcaaggcaggcctccttcatcgcgtcggcgatgagtagcgccgtgccggagggcgcgtccaccttggcgttgtggtgcttttccacgatctcgatgtcgaactccggcagggccttggccgccttttgcacaaggtccagcatcacgttgatgcccagcgacatgttcgcggtcttaaagaccgggatcacctgcgaggcgcgctcgatggcctccagctcctcggcggagtagccggtcgtggccagcacgaggcccatgccccgctgcgtgcagtaggggatcaggtcgtgcagcgcgtccggccgggagaagtccacgaccacgtccgccgcgagcttgcagtcgttgatgttctcgtacaggggataataggcggtggcgccggccgcgtagcggtccacgcccgcgacgacggaaacgccctgcgccgcggcggcctcggccagcgcgcggcccatcttgccgcacgcgccgttgatgagaatcgaaaccatggtcaaacctccttcttcgtaaaaacgcgctcctagagcaggcccattttgtgcatctcctcgcgcaggcgggcatgggtggcctcctgcatctcgatcaggggcaggcgcaggggcccgcagtcaaagcccatgtcgcacagcgcggtcttgaccgggatggggttgacctcgctgaacagcgccttgatgagcgggaacagttcaaactgcagcgcgcggctgccggcgatgtcgccctccatccacaggcgcaccatgtcgtgcgtcttgcccggaaggaggttggccaccaccgagatcacgccctttccgcccagggcgagcaggggcaggacctggtcgtcgtttccggagtagagcgcgagctccgggcaggtgcaggcgatctccgcgatctgctcgatgttgcccgaggcctccttgacgccgacgatgttctcgtgcttggccagctccttgagcgttgcgggcagaaggttcagccccgtgcggctgggcacgttgtagaggaggatgggcaggtccgtcgcgtccgcgatggtcaaaaagtgccggatcaggccctgctgcgaggtcttgttgtaatagggcgtgaccagcagcagcgcgtccgcccccaggttcttggcctgcttgacggactgcacggcaaaggcggtgtcgttgctgcccgcgcccgcgatgacgggcacgcgcccgcccacgcgctcgacggtccggctgatgaccacggcctcctccgagatgtccatggtggagggttcgcccgtcgtgccgcagacgacgagcgcgtccgtgcccccgtcgagctgatagtccaccagttggtccaaggtctttaggttcaggccatcgccggtaaagggcgtcaccatggccgttgcgctgccggtaaagaccacgcgcttttccttcattgtcgtttgctcccctttcttctttcccacgtctcagcttgcgctgcttttcctcccttcatccatacgagggagggatggcaaatgatacaaaaaaagacgctctttcgagcgccgcggcaagagcctccacgcggaatggcggaagaaacggttcttgccctgtgccagcgccccaccggccctctcttcggccggtgacagtcgcacagacgtgctctgcgcgcccaagcggtccgcccggcgcgggccggccgctttcggcgggagcctccttccccttccgctttctgtggatgcgccatccgctgcggcagggtacgcgggcttccgcaacctctgcaaggtcatggtttcattatgcggcagggcggccgaattgtcaagcctttccggccgcgcagccgccctttccgcggtcttttccgggaaaaggggccgcgcccgcgatttgtcaagggtttgtttgacttgaccgcggttttcctatataatggatgaaaagaggatcgctgcacaccatacttttgtattgcgtgcgctgatggccgggcgcgcgcttttggcgcgcccggcgatccgccttttgaaacttttttacaagggagtgaatgtatggcaaaaaccggactgttcgggttcggttacatcaacgagggcattttttacggcaagctcggcgatcttctgggtcgtgatgtaaccgcccaggacaagcagcacgtccaccattttgtgcaacaggagttggatcggggctgcatcgagtactacacctgcgacaagcagggcggcatcgccgtttccaaggcggcgccgcagtccacgcgcgagatcgtcgccaaggcggtcagcatcggcctgacggacaccaagggccaggagatcttggcctatgtctgccagcatccggggcagaagtggtccgcggtctacgtgggcgcgcggcccacggtgtacggcatcctttcggcctaccacatcggctacctcaacttcaagaacttccgcgaggcgaacgatttcatctgcggcatccacgaggttctccttcccggcgagcagtggggctttccccgcagcgaggaaaatcccgcgctcatccgccgctgcacgcggtaccagatcctcgagtcctaccttcggcacaccttttccaagctgatgctggaatacaacgacaaaaacagcgacaactatggaaaaatcgtcttctcgcaggacaagaagtactgctatttcaacacggggctgctgaccaagtacgcccaggacctgtacctcaccggcgaggtgcacgccctgcgcgaggacggcatcttcacctgcaacaacccgcgctttgtcgacagcaagattgagctggtcaagcactacggcttcgcccagcgcgacatcgaccccggcccgggcatggcctcgttctaccgctcggtctccgagatcgtctacgacccctccatcaccatcgactttaccgagagcaagctcgagcacatcatcgacgacggcatccgccgcaaccgcttccccaagaagtacaccgtcagccagaccggcaagcccattccgccctggtccctggcgcagatgctcaacaacgccatcaagatttcctgcatgatggcccagcgcaactacaagtacgtcatcccccagtaccggcccgcgggcgtggagtacgtgggcggcaagcgcgtccgctacgaggggcagatccagttcctgatgccgatctacctttcggcggactacttctctcccccggacttcgccctggtcctgtcccggcgcgacgggttctacgttccggagacgatacttctccttccctgggcgtacaacaacgcgcgcatcctgtgcaagccggacaacagctggctgaaccccagctccatcaaccccgacgacctgctcctggacgaggaggacgaggacggcgaggacgagggcgaggagcgcgccgccgaggaggccgcgccggaagcccccgccgcgcaaacgccagaagcgcccgcagcgctcgcagcgcccgcggcgcccgcggcgtccgtggcgcccgtgcagccggcaaagccgcaggtcgcgccggagcaggcggagccgaccatcggccagacctacaccttcatccccagcgggcgcacggccaaccagggcatccgcggccgcatcgtcagcacgggcgcgctggggaccatctcgcgccgccgcctgggcgcgcggaccctggaggagctgctcggcaagcccatcgccgtgcgcgtcgagggccgaaaccagttgggcaacacctaccagctctcctttgccgagccggacgccgaatctcccgccgcagcgcccgcggaagcgcctgccgcagcccccgccgaagcgcccgcgcagccttcccagaccccgcaggtctcgcaggccgcacaggccgtgcaggaagccgcccccgcgccgggcgcggaagaggcggcgaacgatccctgggtcggcaagacgctggagatgcgcttcaccggcacgaccgcggccaaggccctgaaggccgagtcggacgagatcaagggaacgatctcgctcaagcggctctccggccacaaggcgcaggagttccacggcctgcgcgcgcaggtgcgcgtgctctcgcccaacacctgcggcggctcctaccagtgcgagctggccgaaccggcagaggcgatcctcgcccggcgcgaggaggccaagcccgccgcgcaggcggccgacgcgccctcccgcgcggaaaagccggcaaagcccgagaagccggagcgcccggagaaggcggcgaagccggaaaaaccggcccgcgcgccgcgcgccgcgcgctcgagttgggcttgggcggacccggcgaacatcttcacgcagcgcccgacggtggtggagaacttccgcgacctggcggtcggccagcgctacaatgcgacggtccgcgacctggtcccctacggcgcgttcgtggacatcggctatgccgagggcaacgtgttgctgcacaagtcgcagatcccggagggcacgacgctctccagcggcgacgttttgacggtttggattcacgctctggatgtgcagaacaagaaggtccaggtgacgatgcaccgccccgactgattggacgaggcaagaggcccccgcgctttgcatggaagcgcgggggccctttcgctttcggggtcactcgccggatttttcgcggaacgcatcgacgatgtgggacacgcccaggccgatgcagcgcacagcgtcctccggcggcgacgttttgacggtttggattcacgccctggacgcgcagaacaagaaggtccaggtgacgatgcaccgccccgactgattggacgaggcaagaggcccccgcgctttgcatggaagcgcgggggccctttcgctttcggggtcactcgccggatttttcgcggaacgcatcgacgatgtgggacacgcccaggccgatgcagcgcacagcgtcctccggcggcgacgttttgacggtttggattcacgccctggacgcgcagaacaagaaggtccaggtgacgatgcaccgccccgactgattggacgaggcaagaggcccccgcgcttcccatggaagcgcgggggacgtttgcttttggggttattcgccgtacttttcgcggaaggcgtcgacgatgcgcacgctcgcggtcgagccgatgcgggacacgcccaggtcgatgtagcgcagggcgtcctccagcgtgcggatgccgccggccgccttgacgcggacgcctgggccgacctcgcgcaccatgagctccacgtccgcaaacgtggcgccgccggttccaaagcccgtggaggtcttgacaaagtccggaccgacctcgcgggcgatggcgcagaggctgcgcttctccgcgtcggtgaggtagcagttctcaaagatgaccttggagagaacgcccttttcccggcagagggcggcgatggaggccatctcccgctgcacgtagtccaggtttccggccttgagctccgtcaggttcacgacgtagtcgatctcgtccgcgccgtcctcgatggccaggcgcgtctccaggagcttgacgtcgatgcgcgtctgcccgagcgggaagccgatggccgcgccgacgtgcacgggcgagccgcgcaggagctccttgacccggcgcacaggcgcggaattgatggccgccatggcgaacccatagcgtcggcaatccgcgcaaaaggctgcaaagtccgcgggcgtggcgtccgcgcgcaggagcgtgtggtcaaagtactgggccagctgcgatgcattcatggcgaaatccttcctttcttccgcctcagcggaacaattcgacggtgaagatattgcggtcgccgcggtagcgcgcgatggagtgctccacgggctggttcttggcataggccagggtatagacgcggcagacggcgcgcccggcatccatgcccaggagcgcggcgtcctccggggcgacgcccgccgcctcgaactgccgcgtggcgcggtccacgcgcaggttgtacttctgctccagcagggcatacaggctcttgacctcaaagtcctcctccatgagcccgcggaagcgcgcgtagggcagccaggtgtccaccaccaccagcggctggccgtccgcgctgcgcagccggctcaggtggatgaggcgcttgtcctccgcaaggcgcagggtggcggcgatgtcctcccggttggagaccatctccagcgccagcacgcgcgtggagggcgcaaggcccttttgcagcatctcttcattgaagctctgcaggccctggaagaagcgcgcgtccaccggccgcaccgacggcgcggagacgaacgtgcccttgcccttgcagcgggtcaggtggccttcggcgaccagttcgcccatggcctggcgcaccgtgggccggctgatgcccatctccttgcacagctcgcactcgggcggcagcatgtcgcccacgtgcaggcgcccctccttgatgtcggccaggatctgcagcttgagttggtagtacagcggaaccggtatgtccttgtgcagcgtatagttcagcatcgttcccgtccctccgccctagatgattttccatttgtcatgcccggtcctccgccatgcgggcaaagaccgggcgcagcgcctcataggcctcgtcgaaccgcgcgaaggcgcgctcgtaggccggggcgttttggggattgggccgcacggtctcctccccggggttgagcgattcggccacggaatagtccgggtacaggcgcagccccacgccggcgcagatggcggcgcccatgctcgtggcctcctcgcggtagcggggcagcgtcagctcctgctcccagatgtccgcaaggatctgcagccaggtccggcccttggccccgccgccgatgacggtcaggctgtccatgggcgcgctgcgccgcaggatgtcgcggatgatctttaggttatagcccacgccctccagcaccgcgcgcacgaggtcgccctttgtcgtccccaccccgaggcccaggaacgcgccgcgcgcgtcgtggtcccaccggggcgagcgctcgcccagcaggtacggcaggtagagcacgccccgcgcccccggcgcggagccctccgccaggcggttgagcagatcgtaggcgcttacgccctgctcggcggccaggcgcttttcctccccgcccagcgcgtcgcggaaccagctgtaggaatagcccgcggcctgcatggttccgcagggcgtgtagagcttctcgtccaggtgcacccaggtaaaggtgcgcatctcctcgtcaaacagcggcttttccgccgcgagcgagatccacgacgaggagcccaggacgttgtaggcgcggccgggccgcacgacgcccgcgcccacgcacgcgcaggagccgtcgcccccgcccaggaccacgggcgtgcccgcgagcaggccggtcgcccgcgcagcctcctccgtcacgccgccgatgacgtcgctggagcggtgcagcggcggcagcaggcgcgcggggatgtccagcacgcgcagcatctcgtccgaccagaccttcttctcgatgtccagcaggttcgtgcccgaggcgtcgctgtagtccgtcgcaaactctccggtgagccggaagacgatgtagtccttggcgttgagcatcttaccggtcttctcgtagacctccggctcgttgtcccgcacccagagcagctttgccgccgagtaggaggcgctgagccggtgcccggtgatgcggtagccgcgcgccatccccgcgcgcgcgatcatctcccgctcctgccggtcggcgcgcgtgtccgcccagaggatcatgggccgcagggccttgcccgccccgtccacgggcaggcagcccatcatcatgccgctgaagctgacgccgagcacggcctccgggccgatccccgccttttccatcaggtcgcgcgtgctcttgcagaccgcgcgccaccaatcctccgggtcctgctccacaaagcggtcgcgcgggtagcgcgtttcgtacccgcagaccgcgctgcaccgcaggttccccgcctcgtcgtagagcgtggccttgttgccgctcgtgcccaggtcgtgcgccaggatgtagcgttcccccgtccgcatgtctctccctccctcggatgtccgattgtcattacaaacagtatagccgctccccttccgttttgcaagaaaaatcaaaggaatccgggcgatctttcgaaagaaattcgtccggattccattttttctcttttcgctcgtttatggctgcaattccccgccaaatccgcgcgccctttcccgccgcaggacgaggtatccggccgcggccgtgagggcctcggtgaccggcacggccagccacacgcccacgagcccccacagcgccgcaaacgcaaaggcggcgggcaccagcagcaccagtccccgcaggagcgagagggcgtgcgcgggcagcgcgcgctccaccgagggaaagagcgtggccagcagcaggttgtaggccgcaaagggcgaggagaggaagtagagccgcaggccctgctccgcgatgccctgcagcaccgcgtcgccctcgccgttgaacagcgcggcgatgggcccggggaaggccagaatcaccgccagggtcacaagggagagcgcgagcacgctccaggtcgaccagcgggtgaggcgcttgagcccctccccgtcgcgctggccccaggcgcggctgagcagcggctgcgcgccctgcgcgacgcccgtgtacaggcccaccgcgatcagggccaggttcgccaccacgccgtaggccgcgacgcccacgttccccgccaggccgaggatcaggaagttaaaggtgatcatcaccaccgccgaggagagctgcgtcaccagcgaggggaatcccagggctgcctcctggccggccaggcgcggatgcaggcccctgcgcgtcaggcggaagccgcgctcccgccgcagcaggtgcggcagcaggatgcacacaccgatcaccggcgcaaggcctgtggcgaacaccgccccaaagatccccatcccgcaggggaagatgaagaggtagtccagcaccacgttggacaggctcgcccccaccgtggccagcatggccaggcgcggattcccgtcgttgcgcacaaagctgaccagcaccgcgttgaggaaaaacgccggcgcgaacagcagcagcacctgcagatacgtccgcgtcatgtcgaagacctcttcgtccgcgcccagcaggcgcgcgagctccgccgggaacagcagccccgccgcgacgaaggcgaccgcggcgatccccgccagcagcagcgccatggcataggcgcggttgcccgcctcccgctcgccctggcttgcgctgacggcgaacttcgtcgcgccgcccatgcccagcatcagccccacgccgtagatcaggttgtagacggggatggccaggttcagcgcggcgagccccgcggtccccaatcccttggcgacaaagaacgtatccgccaaaatgtagcacgaggtgcccagcgtgcccagcgcgctcaaggacgcgtagcgcacgaattccccgcgcagttcccgaaatttctgcatgtcctctcctccttgacaaaaaaagcgccgggtccgcatcttcatggcctaccgatgcggatcgcggcgcacgggtctacccggcggcagaatcccgatttgctatgcaatttcctccgtgtatcttagcacactgcccgcaggctgtcaaccgcctgcgcccgccccgagaaaaaaagagcgtattcaacaaaattttcggtgacattccctcgcagatatgctataatttataaggtaagaattttttgcatatgcagaaaatgcaaaagagaattccaacaaatttttcgaccgaatccacagaacgcaaaaggaggaaccaacgccatgaagctcggtcttgcctacttcggcggttacgaccaacaaaaggtggacctggaaaaggagatgggcctgcaatacgttatctccggccccacccaactggacccctccctgcccgcgcagagcctggagagcctctcgctcctgaagaaggcgtatgcggaccaggggctgaccctttccatcatcgagggcccgacgcccctggacaaggtcaagctcggcctgcccggcgccgaggaggagctggaggtcttcaaggacctgctgcgcaactgcgccaagctggacatccgcaccatctgctacaactggatgccggttctgggctggttccgcacgcgcacggacatccccacccgcggcggcgcgaccgtcacgggctttgcccagcgcgacatggagggcgttgcggatacctgggccggcaaggtcccgcaggagcggctgtggcagacgctggagtccttcctgcgcgaaatcgtcccgctctgcgaggagctcggcgtgcgcctggccctgcacccggacgatccgcccgtcccctccctgcgcggcatcggccggattctgaccagcgcggcggcctttgaccgcgtcttctccctctacgacagccccatgaacggcatgaccttctgccagggctgcttcgccaccatgggcgaggacattcccgcggccatccgccacttcggcaagatgggcaagatctacttcgtccacttccgcgacgtgcagggcgaccgcacgaacttccacgagaccttccacgacgacggcaagaccgacatgtacgaggccatgcgctgctactacgaggtcggctttgacggcatcgcgcggccggaccacgtcccgaccatggtcggcgaggacgacgccatgcccagctacggcctgcagggcaacctgttcgccgtgggctacatcaagggcctgatggaggccgtggaaaaggagatgggcctgcgctgaaagaagcgcccggccccgggggatcggctcgccgccggtccctttttttaacgcccgccgcctgcaaagagaggggcagcgcaacgcttgcgccgcccctttcccgccggagggcggggatcactgcagggtggaagccacctgctggccgatggtcatgacgtaggtgcagccttcctccacggacatttcgcccaggatgatcgcttcacccgtggcgttgaactcggaaacccagctcgtgtacgccgaaggcgtgtcggcccagtagggcgtgccggtgaccacgtcgttgttgatggcctggtacatctccataccgaggcgctcgccctcggtcaggttcggctcgatggcctcatagacctcgtcgctgacgggcaggccgcgcacggccttgttgcgcatcatcgagacaaacagcgcaaagatcagcttcagcggcacggccatgaccacgaacttcagcgccgtcaggagcgagcgcttaaacaaaaagtccactgtgaagatgttgatgtagttctgcagcccgacccagttcggtcctgaaagaggccgtagtccgtaaaggaccggtagatggaagcggcatatttaataagttacttaacgtaacaacaatctttgattataccaattggattttcactggatgttcgcacgatttccttcacaaatcctctgcaattccgcaaaaaatccagcggaggcggggggctcccctgcctccgcttcgccttcccccgcggcgcttttcctccgcgcgtcctctgcgcgcgcggatggtcccgcgcgcgccgcacattgggttaagaattcaagaagaaccgccctcattttctctccgccttctcccgaaaatttacacaaaaagttcttgcaaattcccgccatccgtggtatagtaatatgcgtcatccggaatggatggcgatggaaaaagcgaatatggggcattagcacagttggtagcgcgcaacgttcgcaatgttgaggtcaggggttcgaatcccctatgctccaccagaagacctgagaactccttctcaggtcttttcttttgtccattggccgctgcgctttcctctggcgcaatcgggcgaaaaaaagttcgcggcgggtgtaggatttgccgcggaaaccgtaggatataggtgacgccggagaggaggtcctgaagtggttaccgacgaagaaatcctcgacttgttttttgcgcggtccgagcagggcattcgggcgctggacgacaagtacgggcgcatctgccgcaggctctcgtgcagcatcgtaggcagcgagcaggatgcggaggagtgcgtcaacgacgcctacctgggcgcgtggaacgccattcccccatcgcgcccgagccccctgctgccctacatcgccaagatcgtccgaaacgtctccctgaacgcctattggaaaaaggccgctgccaagcggaacagccgatacaccgtcgccctggaggagctggaggcctgctttgcggattccaagaccgtggaaaccgaaatcgaggccagggaattcgcccgcatcctcggagcgtttctggacacgctgtccctcgaaaaccgcgtgatctttctgcggcgctactggtttgccgacggctatcgggagatcgccgcgctcgtcggcctctcggagaaggccgtctccgtccggctgacccgcatccgcgggaagatgcggcgatacctgcaggaaagggaggtatttctatgaacgcgaagagagtttccgacgccttgagcgagctggacacccaatatgtacaggaggccctccagtacaaaggccggtcgaaggccccccgctggcggaaatggggcgcggccgccgcctgtctggtggtggttgtggcgctggtcctcgggggcacctcgatgtttgcgcgggagtccctcccgcagctggagctggcagccccggcggccccggcggcggacgcgcccgacgggatgcgcaagatgatgaactacaacgggaatcgctacgtgtttctggagaacggcgccgcctacagcctttccgcccagcagctgaaggcagcgctgggcacgctggactacgacatccaggcggacccgcaggcgaacgggaaaaaggagttctccacgacctttgcgctcggcgggacggtgtacgagctggcggactacgaccccgcgttccgcctggccgtggaatgggagggcaactactatctctgccaaaggacgggccagacggacaactcccccatggacgcggcggaatactttgcggcggcgcgcttcccggagcgcatcgagcgcgtctccatcgccgaccacgcgggcgcagaggtgctggccgagtttccgggcggggaaatctccgccctgatcggcgagctcgcgcaggcgcagcccgcggcgctggtcgaggaagactatctggcgatcgccagagcgcagaccgacggggagtcctaccaactccttctggacctgaacgacggcacgacggtttcgctctacgtcctcccctccctgcaaatcgcgatgatcggggactgccgatacaccctgcccgactccttctccgaaaagtttggggatctgttcgacggactgacgcaggacccgctgccggcgcaatagattgcaggcgtgcaaaaacccccgaggagccaaaacatcggttcctcgggggttttttgcgcgcctttacgccagctcccgcaccgcggcctcgagcagggcctccgccgcccgcgcgccgaggcgcggatagcggtcccgcagcagcgcctgcgcatacgcccgcttctgcgcgccgctgccgccgcgctgttccgcggcctgcacggcgatgcaggcgatcttccagaggttcttgagccgctcggcccggacccgctcccacgccaggggcgcgaggagcgcgagcagcatcagcagcgcaccccctgcgattgcgcacgccatggacatcgacctcccttccctgcggagatcgtagcacggcgcccgccgcgcagcgcgcgccaggaaagcgcccgcgcttacgcgtcccgctgctcctcgggcgcggtcaggacgatccgcccgtcctgcatctccaggcgcacctggttgcccgtgacgcccgccgcctcgagcatctcgcgggggatctgcaagcggcccgcgcggtcgaggatcgcgtactcgtcgtgcgtttcctcggcaaagccggaaacctcctgcaggcgcgcgcggacgtctccccgcgcgatgcgctcggcgctggtcttgccgtcgcggatggcgacgacgcggttgaccttgcgcgccaggctctggtcgtgggtgacgagcacgatggtgagccccatctcctcgttgagctggcggaagacgtccaggatgtggtccgctgtgcgcgcgtccaccgcgccggtcggctcgtccgcaaggaggatcttcggccggttcgccagggcgatggcgatggccacgcgctgctgctccccgccggagagctgctgcagccggctgcccgcccggtggccgatgcccacgcgctcgagcagctcctgcgcgcgggcgcggcgcttgcccgcgcgccgctcaaaggccatgggcagctccacgttctcctgcgccgtcagatacggcaggaggttgcgcgcgctgttctgccagacaaatcccacggtgctgcgcttgtagcgcaccagttcccggtcgctcaggcggaagaggtcctgcccgtccacgatcaggcggccggcgctgggccggtccaggccgccgaccatgttgaggaaggtggacttcccgctgccggagttgccgatgatggccatgagctccccgcgggcgacctccagctccaggccctgcagggccaggacctccgtctcctgcgtcttgtagatcttgaccaggttctcgcagcgaatgatcgcgtcatccatgcaccaactcaccatcctccagctcgtagaccgcgtcgccgatttccatcaggttggggtcgtgggtggtcatgaccacggtcacgccctcctgcgcacacaggtcgcggaagatcttgaccacctgcaggcccgtattcgtgtccagcgcgccggtcggctcgtccgcaaagagcaccttgggccggtgcgcaaaggcccgcgccacggccacgcgctgctgctccccgccggagagctcctgcggcaggtggccggcgcgctgcgcaaggcccacgagcttcaggcactccagcgcgcggtcccgccgcgcccttgcgggccagcgcgtcagccgcagggcgaactcgacgttctccagcgccgtcatcatggggatcagcgccacggactggaacacataccccacctgcgtgcggcgcagggccgtgcgctcccggtcggacagggccgtgatctcccgcccgtccaggatcacctcgcccgcggtcggcgggtcgagcgcggagaggatgttgagcagcgtggtctttcccgatccggaccggcccttgagaatggtcagcttccccgcgggcgcgctcagatcgatcccgcgcagcacccagaactcgcccccgcccggcgcggggaacgcgcgggaaaccccttttgcctggagcatctcctgcatcatcacgcatcctcccccagcttcagcgcccgcgcgatcttgagccgcgccacaagcgcgcccagtacgcacaggcagattcccatcaccgcgcccacgacgccgaagagccgcgcgcagtcccccgcctccagaacaaggcgcaggggcaccatctgctgctccgccgcgtaggcgatctggatcagcggcacaaagagcgccgcagccgccgcgccgatgcccgccccggccgcaaccgacaggagcgagacgaagatctgctcgttgaccagcatggtcacgatctcccgcatggacatgcccatcgcgcggaagatgcccatctgcagcgcgcgctggcggatggagagcacccagtagagcaggaaccccaccgtgcacagcagcagcgccacgatgaaccccaccgtcaggatgccgtttgtgccctggtagacggggtcgttcttgcgctcgatgcgctcggcctgcgcgtcgcggaaggagcgcagggtcttccctgtctgctcgatgtagtcgtagacgaactgcgtggagtcgccctgcaccttcatccagatctcatagggcgtgaccccgaaggccgcctgcacctggctcaggtgcgcgacgatgaggtagctctgctccgtgcggatctgcccgtccgcgcccacggtcgtcacctcctggctataggtggggaagta

SEQ ID NO: 1116 - DNA, 9921 bp, Unknown
  16S sequences of unknown bacteria
aattccgacataaaaatcggctccgagagctttgacaagggttttgcggtctatcctcagcacgacggaaattccggctatgtctccgagctttattttgacatcggcggaataaatgtaaggaccttttcggcaaaaatcggccttaacaacgccgcaaacaccggcggagtgattttccgcctttatgccgacgggcagaaggtgtatgaaagcgatgttatggacggaaaaactcccgcaaaggacatttcggccgacatttcgggagcaagccttctcaccctgaccgtttatgacaacggcgacaatgcgggcgacaatgccgtttgggcaaatccccgcctttccctcgacgccgagggcgccacccaccttcagaatttcagaaccatgagccttaccgagctcgattggaaatctgccgtttccgagtccaaaaatccgcagatcaacaagccctatcaggacggcgcggattataaaataaacgtgggcggaatcgagtataactacggtatttcggctcacccctacaataacagcaccccctcctccataagctatgaccttacgggatataacttcaactatttcacggtcaaggtgggcaaaaccaaggagtccaaaataagcaccaccgaccagacctttaaggaaaaatttcttatctacggcgacggcaagctgctttgcgaaagcgagcccataaccatgggtcactacaccgagctttcggccgacgttaccggagtgaaaattctcacaatatccattgacgcctgcggaaactacggctggggcgcctgcgcatggtgcgagcccaccctttactacggcgtcgaggagggcgagatcagaattacctctcccttaaaggaaatcgagcgcaccgtagccggcaatcagaatcttgacgtcaccggctttgttctcggagtggaaaaggtcaagggacttgtcaacggcaagtttatcggcaccgccgaggttcagagcgacggaacctttacgctgaccgtaaaggccagaaatcttgagctcggccgcaacaccctgacaatatcccccctgaacgccgagggcaaatccgccgaaacggtcattgtcaaggaaaacaagataaatgtcgtgaacgttccctgggacagcacggcgggcgacatcatcacaaagggcggttcgctgacctcccgctgcgataagctgtcgatcggctctcaggttcatcagaccaacaacggcttttgcgtaaagcccggcgagaccgaagaagattatgccgacgtggttatcgaccttaccactctcggaagcaaggtggaatatttccacgcgcttgtgggtcttgacgactttgcacccctcgattattacaccggcggaagcgttaagtatcaggtgctcgacggcgaaaaggtgcttgccgagaccgaggtgctttccgccaaccagaccgctcccattttctgcgacattccctccaccaccaagaaactgaccctcagggtctcaaacggcggagacggaaactatgtggactatgccgactggctttatgcctctctctattttaaaaagaccgattacggtatgaccgacaaggacctttattccgacaacaatctcggcggaaacaccgaaatctccgccgtctctcaagtcggcgtgcgtttctcggtcgaaaagcccttcagcgccgtgaccctcagccccgaatcggctgccgacacggttaccggttcgctttataagtttgtatattcctacaaacgctctctccagggcgaggctctttcctcggtcaccgcaacaaagggtgccgacggcaaatatgttttcgagcttaacaaggaatatgacgcaggcgaatatgtctttgcggccgacggcgtgacctccataaaggccaacggctctcagtacggatattattacaccgacggcgttgctcacagaggccttatcaatatgagccttcgcttcggaggaaagtatgacagctatctttcggccgtcactcccgagcccgagacggtgaatgccggcaccaatcatgccaccgccgccgaaaaggaacgcgccgagagaacctataaagagatgataacaaatctcgaaaacttcccctccaaaatgaccataggggacgactcctatgtcggtttcggcagctccgacttcacccttaagtccaccgacgttaccgaggacaaggtcacaaagagtgtcaacaccaccttcacccttgaacataagagcgggcttgaattcgagctccgctgcgtctactatcccgattatgccgccttcgactgggttatctatttcaccaataacggcgaagaaaattcccccatcgtttccgacataagccccgccgagctcacctttgtgggcgacaatcccacgatcctctccaacttcagcgacggcggtcagtatgctcccttcctgccccagcggcttgagcttaaagaaggggagaaaaagacctttgccccctccaccggccgttccaccgaggacgccttcccctattacaattttgaatacggcaacaagggtgcttttgtggtgaccagctggtcgggtcaatggcaggccgattttgagtataacaacggagtgaccgccttctcgggccgtcagcagaccttcagctcctacctcaaacccggcgagaccgcaagaactcctctcaccgcaatggttctctatgacggacgcgacaccgaccgcgccaccaacctttggagaaattggttcatcgactgcaatatgtataagaacgacggagaaaatcccaccgaaccctttgttgcgggcgttacttcggcggtctataacgaaatggaaaatgccaccgaggcaaatcagattgcctgtatcgaaaaatatctccaaaacaacgttcaaatcaacgtttggtggatggacgcaggctggtacatcggcgttaacgacggaaataaccgcagctcttgggctcatgtgggcaactgggcgcccgatgaaaaccgttttcccaccaaattcaaggccataagcgactatgccaacgagcgcaatgttgacacgctgctttggttcgagcccgaacgaattgccatttccgacgccgaatatgcaaaccagcccgacagcgaataccgcgtcaagcccgagtggcttatcggctacggcgacgcacagggccagcttgcctacggcggaaacggttcggcctatcagctcgacctcggaaacaaagaggctcttgactggctgtgcaagcgcgtgctcacgatccttgaggaaggcggactttccatctaccgcgaggaccttaacatcgttatcatggccgacaactggagacagaccaacgaggctcaccccgaccgtgcgggtatgagcgaaaacggctgcgtacagggtcattacgaatattgggacgccattctttcgctgccgcagatcaagattatcgactcctgcgcttcgggcggacaccgtctcgaccttgagaccatgcgccgcgccgtggctctccaccccaccgattacagctacaacgacctttctgccaagcagataggaacctacggtcttgcgtcctggttcccctttgccggcgcaaacaccggcgtgggcggttatgttacctccacaagcaagtatataatccgttcggcctaccgtcaggcactcattctgcagtatgacgttaacgttctctccaaggaatatttcgaaattgccgagaactgcgtcaacgagtggaacggcataaagaaatatttctatgacgacctttatcagctgacaaagagcaccaccggatttaccgattggtattcctatgaatatttgagcgaggaaaatcaggagggctttgctctcgtgttccgacgctccgacaaggccgaaaggacccaaagcataaagctcaagggacttcatgccgaggacacctatgaaatcaccttcgccgacagcgaggccgtcgtgaccgcaacgggcgccgagcttatgtcggcgggcgttaccctcactcttgacgaggacgagggcggcgttgactccgaagtcatctacatccgccgcacaaattccgtcgcaggcgacaagggtgcgcttgaatcggcaatttccgccgcaagggctcttgtggaaaaaggccttgtgaacgagggatacaccggaattcccgcattcgagcttatatgcacttatgaaaaagctctcgccgtttatgaaaacgaaggcgaatccgagcagaacataaacgccgccgcaaaggctctttcggccgcaatcgacggcctcgaaaagggcgccgtcggctcaaaagaggaaatcgagaacataatcggctcgataggcgagataaacgagcaaaactatctctaccgcaaggatatgatagattttgtcaaggctcttgtcgaaaaatcgggagttactcccgccaacgccgacctgcttaaaacggccgaagagcagtataattctttggcaaacgcaggaaagccgggcgacaccgacggcgacggcgagataaccgtcaccgacgcgctgcttgcccttcagggctcggtaggaaaaattaccctttctcctgaggcgcagagccgcgccgacgtggacggagacggtaaaatcaccgttaccgactcgctgctcatactgcaaagagcggtcgtgaagatcgacaaattccccgtggaaaagtaagctaaaccaaaaaatcaaacagggcgttcgtgctcggagctttctccggacgaacgtcctgttgtttttatttgcccgaagttttgtttcggtttgctcggatactgatttttgctttgttaaataattaacaatcttttgtgcttgtccgaatttaacgccttaaatattgttaaaaaagtgttcaaatcacttgacaaaatgataattcggtgtataatgataaacaaacacaccgatattgtctttcggccgaccggtcggggggcgctcggggtgaaacttaaaaatttcgggttttcccaaaaataaatcaaggagtgacttttatgtcaagagtttataatttttccgccggcccttccatgctggccgaaagcgtgcttaaaaccgccgccgatgagatgcttgattatcacggctgcggccagtcggtcatggaaatgtcccaccgctccaaaatatataagaccataatcgagggtgccgaggccctgcttcgcgaggtcatgaacattcccgacaattataaggtcctgtttttgcagggcggcgcctccacccagtttgccgccattcctctgaaccttatgaacggttcgggcaaggccgattatgtcattaccggtcagtgggccaacaaggcctttaaggaggctgcccgctacggcgaggcaaaggccgtcgcgtcttcggccgacaagacctattcctacattccgaagctcgaccccgcgaccttcaccaaggacgccgattatttctacatctgcatgaacaacaccatttacggcaccaaatttcacgagctgcccgacaccggcgacgtgccgctcattgccgacatttcttcctgcattctgtccgagcccatcgacgtttccaaattcggtatgctttatgccggagcgcagaaaaacgttgcccccgcgggtcttaccattgtcataatccgtgaggatcttctcggtcacgcaagagacataacccccaccatgctcaactacgtcacccatgccgaggccggctccatgttcaacactcccccctgctataacatatacatctgcaagctggttctcgagtggctcaagaacgacatcggcggtcttgaaaacatgaagaagataaacgaggaaaaatccggcatgatctatgatttcctcgacaacagcaagatgttccgcggaaccgtcgttcccgaggaccgctccatgatgaacattccttttgtcaccgacagcgacgagctcaacgccaaattcatcaaggaggccgaggaggcgggctttgtcaatctcaagggtcaccgttcggtcggcggcatgagagcttcggtctacaatgccatgcctgttgagggctgcagaaagcttgtggaattcatgaagaaattcgaggaggaaaacagctgatgtttaacattaaaaccttaaataaaatttcgccctcggggctttcccgctttgacggcgcaaaatatacctacggggacgacatcgaaaatcccgacgcgataatggttcgttcggccaaaatgcacgacatggcgtttgaggacggtctgcttgcaatcggccgcgcgggagcgggcgtcaacaacattccccttgaccgctgcagcgagtcgggaatcgtggttttcaacacccccggcgcaaacgcaaacgccgttaaggagcttgtcattgccggaatgctgatatgctcgagaagagttattcccgccatcgaatgggaaaagacccttaagggcaacggcgccgaggtggccaaaatggtggaaaagggcaaaagcgccttcaccggccccgagcttatgggcaaaactctcggtgttatcggcctcggagccatcggaatcggcgtggccaacacggccaagtcgctgggcatggaggtatacggctatgacccctatctgtcggtcgacgccgcatggcacctctcccgttccattaagcattcgtcaaatctcgacgagattttcgccaactgcgattacataaccgttcatgttcccctcaccgacgagacaagggacatgataagcgcaaagaccattgccggcatgaaggacggggtcagaattctcaatttcgcccgcggagaccttgtcaacaccgccgacataatcgccgccctgtccaccggtaaggttgcggcctatgtgaccgactttgccaacgacgagctgctgggcgttgagggcgtcatcgccattccccatctcggcgcctccacccccgaggccgaggacaactgcgcatccatggcggccggcgaactcatcgactatctcgaaaacggaaatattgtcaattcggtcaatatgcccgccgtttcctgccaccgtaccgagggtgccagaatctgcgttattcacaagaacaatcccggcatgatcaacaagctttcggcgctgttctcctccaagaacatcaatatcgaaaatatgctcaacaagtccaaaaaggactatgcatacacccttattgacgttgccgaaaaggaaatcgacgaatcgattgtcgacggcattaaaaatgtcgaaggaacaattcgcgtccgcgtgattaagtaaagtgataaaggcaaactgtgaattgtttcgctttttgcctttttttgttgacaggcaaatttatgtgttgtaatataaattcaggaaagcgaggtaaaaattatgttttgtagaaattgcggaacccaaatggaggacggcgcgtccttctgcccttcttgcggagccaaggtcgaggccgaaaacgcaaatcaaaccccaaacggcggacagcaggctcagtataacggtcagcccggagcacagcctccatacggccagcctccatacggccagcctccctacggcggtcagcccaacggaaatcagccgccctacggtcagcagccctttgcccccgcacctcaaggacaaaatgaccgtaacattgccattgcgatattgctcagctttgtgacctgcggcatatacgcaatatattggttcataaccctgaccgacgaggtcaatgcaaagtacggcgaccccaacgccacaagcggcgcaatggccttcctgttcaccctcatcacctgcggaatctacggatatttctgggcttacaagctcggcgaaaaggtggacgccataaagggcaatcccggcggcagctcgaatgttctctttgttgtgcttgaagttttcgggctcaacatagtcaatcttgcgctggcacaggatgcggtaaacaaatattgatgaaaagcaaaaggctttcggccgccgttaaatttgcggcggctcttttcgttcttgcggcggtgagctttacggttggctgccccttttatcgggtgaccgggcttaaatgccccggctgcggcgtttcaagaatgattttaagcgtctttcgcggcgagttttcggcggcttttttctataaccccgtgattttttgcctgctgcccctttgggcggtgtgccttttgctgcattatttctcaaaaaggccccgtaaagggttcgaaaacgccgtcctttacggctcgattgccgccctcgcggttttcggcgttttgaggaatattttcccgatgggatttccgtccgtataaaaatataaaaaacaacccccgacgcggcattttggctgcatcgggggtttttgttcaagcatctgctgcttattcggcggggaatacgtcgattttgtttaccgccttttggagtatgagcagcgaatcggttaccgtgatttttccgtcgccgtccacgtcggcgcgcttttgtgcgtcatcgtcaagagcgattttgttgaccgacgattgaagggcgagcagcgcgtcggtaacggtgatttcgccgtcgccgtcggtgtcgccgaattttactgccgaggagacgcgtctgatataaattatgtcggagtctccgccgccgttgtgctcgttttcgtcaagggtcatttccacaccgacgctcatgagctcggcgccgcttgcggttaccgtgccgtcaaaatcggcaaaggtcagctcataggtatcgtcgggattaagccctttaagacgaatgtttttgctgcttggagaaaactttccgccgtggttgaacacaagggcaaagccgtcctgtttgtcgggatttatatagctgtaggcataccactcgttccctgagacattgctgtctgtcagctcgtaaatgtcgtcgtagaaatagccgttaatgctcttccattcgcttatgcagtcgcgaagcagctgttttctctgttcgctgaagccctcgatgttgacctggcaggctatcgattggcgaaaggaggaacgcatgatatatttgtcggtgaaggtgtgatagttgtcaaagccggtgtttgcgccggtaaaggggaaccagcaggcaagaccatagcttgctctgtggcgggcggtcagatcgttatagttgtaatcggtgggatgaagtgccacggctcggcgcatggtctcaagctcgagacggtggccgccggaggcgcaggagtcgatcatctcgatgttgtcaagggagagaatgttgtcccaaagccggagatgtccctgaactccgccgttttcaatcattcccgctcggtcgggctcggcggcgttaatctgattccaaatgcgcagcgtccagccgttgttgaagtcctcacggtaaattgagatgtttccttcggtcagcacggttttgattttgtcggtcatccagaaaagagcctcattgttccccaaatcgaagatgtgatagtcgtcggggccgaccgcggtgtttttggcgccgttataaccgactatccattcctttttggctccgtaaaggtcaaactcgttgtctttaagggaaaaggcgtttcgttcgggctcgaaccaaagtatcacgccgcccttcatgccggcatttttgcaggcctcgctgaccgaaagcagcttgttcgggaaacggtcggtgtccatggtccagttgccgacgtgaatccaggtttttgtgttgccgtcgatataccaaccggcgtctatccaaaaatagtcgatgtcgacattctgttcgttgtaataatttatacgtctgaccatgttctgctcggtttcccgcatgacctcgccgggaagtccggcgataaagggctcgaggttggtcttgccgtcctttttatacatattgcagtcgat

SEQ ID NO: 1117 - DNA, 15460 bp, Unknown
  16S sequences of unknown bacteria
gccggggactcttgcacttgttgcggcgattgtttcggttgccgtcaaggaggctatgtattggtacacgagagcctatgcaaaaaagcttgattcgggagcgcttatggccgacgcgtggcaccatcgctccgacgcactttcctcggtgggaagcttcgtgggtattttcggcgcaaggctgggctttcccgttctcgaccccgtcgcgtcggtggtgatatgcgttttcatagtcaaggcggcaatcggaattttccgttcgtcggttgacaaaatgaccgaccgcgcctgcgacagggaaaccgaaaaggagatctccgagcttgccctcggcgttgacggagttctcggtatcgacagtcttatgacaagggttttcggagacaggatttatgttgatatggaaatatcggcaaacggtgaggacaccctgaacgccacccatgccgtggctcaaaaagttcacgacaaaatcgaggcggcctttcccaaagtcaagcattgcatggttcatgtcaatccctttaaaaaataaactgtataaaaattcctccttcggtcaacactatgagtgaccaaggaggttttttatatggctgatcattccaaaaggatattcgacaacaaaagatttttttacattgctttggctgtatgtatgctggcgcttgggtctgcttcggcctcggcgctcaaaagttaccgtgacgtgcaaaaggaggaaacctcacttgccgcgtctgttcccgactccgctcccgacgccaaaaaggccaacgaaccgctgaccgacgtgccctattccgaggccgagtcggccgtgtcggaggcggaaaacacctccgagcctacttctcaggttcaaagcgagcaatgctttattttgccggtgggcgggaagatattaaaggatttcgacgaccgaaatcttcagtattccgaaacctataaggattggcggcttcatcttgccctcgacatagccgccgacaagggcacagcggttttttcggcgtcaaggggaacggttgaggatatttatgaggacagtctgctcggcacggttgtgaaaattgaccaccaaaacggccttgttgcctactactgcggattaaattcctcgccttccgtcaaaaaggggcaggaggtcgagccgggctatcagcttggagcaattgccgaaattccctgcgaatcggtggaacagactcatcttcattttgtaatggagcaggacggaacgcccgtttctccccttaaggttatgcaaatgaaggaataagtaaacagtaagaaacccgccgtcattttttaataacagcgggtttgtttttttgatttacaggcttctgatttcctcgtcggtcatcatttcgacgccgtttgacgtgagaatgtcggaggccttttgattgtcgtcaactcgcataattatgaatgcggtgccctttttggggtttaaaaaggcatagacatattcaatgctgatgttttccttcgaaaggcacataattgccttgttaagcccgcccggctcgtcgggaacggctgcggcaatgacctcggtcaccgaataggtaaagccgttttccttaagcgccttttcggcctcggcggttttgttgacaatgacccttaaaatgccgtaatcggtggtgtcggcaatgctcagcgccctgatgtcgataccggcgtttttgaagagctcggtaatgtcgcaaagacggccggatttgttttccacgaaaatcgaaagctgtttaacaatcatggttttacctcctaatgcaaattgcggttgtcgataactctttttgccttgccctcgctgcgctcaatggatttgggcggaacgagatgaaccttgggtcctatgccgagcatggtgcgcattgcggcctcaagagaacgctctctcttctgagtttcggccacgatgtcggaaaactgctcgggggaaagctcgacataaacgtcaagtgtgtcgttgttgcgctctctgcccacaacgatttgatagttgggggtatatccctcgttgagcagaacggtttcaatctgagagggaaatacgtttacgccgcgaatgataagcatgtcgtcgcttctgcccatgggcttgcacattttgatgagtgtgcggccgcaggagcactttttgcgggaaaggatacaaatgtcgcgcgtgcggtagcggagcagggggaaggcttccttgtcgagagaggtgaacaccagctcgcccttttcgccctcgggaagaacctcgccggtttcggggtcgattatttcggcatagaaatggtcctcgtttatgtgcattccggtctgctcttcacattcaaaagcaacaccggggccgcttgtctcggtcaggccgtagatgtcataggccttaatcccgaggctcttttcgatgcttactctcatttcctcagtccagggctcggcaccgaaaatacccgccttaagcttgttgtcctcgggcttatagcctttttcggcaaggatctcgcctatgtatgcggcataagagggggtgcagcagagaatggtggcgttaaggtccatcataaactgaatttggcgctcggtgttgcccgacgacatgggcagggtgaggcaaccgaccttgtgggagccgccgttaagacctgggccgccggtgaaaaggccgtagccgtatgcaacctggcaaacatcctcgtctgtgccgccagcggcgacgatggcgcgggcgcagcagtcctcccaaaggtcaacgtccttttgggtgtagaacgcgacgactcttttacccgtggtacccgatgtggactgaattctcacgcagtttttaaggtcggttgcaagcagtccgtaaggatatgcgtcacgaagatcggctttggtgagaaagggcagctttttgatgtcgtcaacgcccttaatgtcctccggtttaacaccggccttgtccatgagatcgcggtagtatttcacgttttcatagacatgctttacctgcttgacgattttttcgtcctggattttgcggagagagtcgagagcggcggtctcgatctccggctgataataatgtcccattggcttagctcctattcgtgattatagcccaaatcaaaggctttgagattgacctgaaggaatttttcgggaacggtggtctcgatggcctttgtccagacatccttttctatatcggtgtttttggcgcacactccgagaagcaccaaatttaccgccttggcggttcctgcctgctcggcgagggaaagcgcgtcgagagcggtaattttaactcccttgctttcaatgtcggaaatgataccttcgggatattccgcattacccgttatgacgggcatggggtcgattttttgggtgttggtgataaccgtgccgccctttttgagatagggcagccatctcccggcctcaagctgttcaaaggaaatgatcatgtcggcctctccgagctcgataacgggggaataaaccttgtcgccgtatttgacataggtcacaaccgaaccgccgcgctggctcatgccgtgaacctccgacaccttgacgtcgaagcccttgtcgcaaagcaccttaccgagcagacggcttgaaagcagggttccctgaccgcccacgccgacaatcataatacttttaactgacattagttttctcctccttgcttttcaatggcgccgaatttgcaaagctgggagcaaacgtcgcagccgacgcagagagtttcgtcgatgtgagccttgccgtttttcatgctcacagaaggacagccgattcccatacaggccttgcagcccttgcacttgtcctcgttgaccttaaggggcgggaagtgcttgacatatttaagcagagcgcagggacggcggcttattatgagggagggctcttccttttcaagctcctcggcaatgaccttgcggctgttttcaaggtcgttggggtcgatgaccctgacgttttcaatgccgccggccttggccagcgcctcgaggtttacggcaacggtggggtcgcccttaagggtctttcctgtggtggggttctgctgatggcccgtcatgccggtaatgctgttgtcgagaatgatgacggtggaaatacctttgttgtatgctatgtttataaggccggtgacgcccgagtgaataaaggtggagtcaccgatgacggccaccgagttctttgcggttttgtcgtcgtttgccttgttgaatccgtgaagtgaggaaacacttgcacccatgcagacgcaggtgtcgacctgcccgaggggattgagggcgccgagggtgtagcagccgatgtcgccgctgacatataccttaagctttttaagggcatagtaaagccctctgtggggacatccggggcagagcacgggaggacggacgggaatgtcggaggacagcgaaaggctttcgttcttttgaccgagtattgcctctttgacaatgctttgggaatattcgccgcaaagcgagaaaatgtccttgcccgtgacctcgaggccgagcatcttacatttttcctcaatgacaggctcgagctcctcgaccacataaagctttttaaccttttttgcaaagtcgagaatgagactgtcgggcaggggattggtaagaccgagctttaaaacgcttgccttttccccgagagcctctttaacatactgataggaaattcccgaggtgataacgccgatgtcggtgctcgccatttccacgcggttaaacgggcagtcgctgccgtattccgacagctccttcatgcgcttttccacaaaaacatgacgtccctttgccatggcgggcatcatgacgtttttctgaatgtttttaacatagggcttttgctcgggaacgctgcgttcgcaaagctcaacgcggcttctcgagtgggccacccttgtggtcagacggagaattaccggagtgtcgaatttttccgaaagctcaaaggcatattttacgaaatcgcggcactcctccgaatcggaaggctcaaccaccggaaccttggcggcaatggcgtggcggcgggtgtcctgctcgttttgggagctgaacataccggggtcgtcggccacacccacaacaagaccgccgttaacgcctatgtatgaggcggtgtagagagggtcggcggcaacgttgagacccacgtgcttcatggcgcaaaaggcacgctgccccgcaaaggaggcgccgatggccacctcgcaggcaaccttttcgttgggcgcccattcggtgtatatttcgccatattttgccgcttcctcggtgatttcggtgctgggagtgccgggatagcttgaaacaagcttacatcccgcctcgaaaaggccgcgggccaccgcaccgtttccgatgagaagttctttcatagtatcaatccttttaaagagaatttttcgactttattttactcttttttgccccgcaagtcaaccacgcggacggcttttccctgaaatctttctatggttttgggctggacaagggaaacctttgcgtcaagtccgagcaccgattttaaattgctcttgattttgttgtgaagcttttcaagacccgaatagctttcgagaattctgccgtcggtgagctcaactctgacctccagcgtgtcggcaaagccctcgcgcctgacgacaagctgatagtgggggctgacctcttccatgcccacaagcacgctttcgacctgagaggggaatacgtttacgccgcggattttaagcatatcgtcgcttctgcctttgaccttggccattcgcgcggtggttcggccgcatttgcagggctcgtatgtaatttccgaaatatccttggtgcggtagcgcagcagcggaattccctcctttatgagggtggtgacgacgatttcgcccgtttgtccctcgccgatgggctcaagagtgtcgcggtcgatgacctcgaaaaggaacatatcctcgttgatgtgctggccgacacgctcgcggcattcgcccgaaagaccgggacccataagctccgacattccgtagttgtcggtgacgaacattccccagttcttttcgatttgatcccgcatttcgggagtgcagccctcgctgcccaaaagaccgagggaaaggtgatagtcgctcatggggaattcaagctcctttgccgattccgaaagatagagcgcataggagggggtggccacaagtgcggtggtgccgaaatcccgcatgaacatgagctgcttttgggtgttgcccgacgatgtgggaacaaccgaggcgccgattttttcaaggccgtagtgcagtccgagggcgcctgtgaacattccgtagccgaagcatatctgtacaatgtcgtcggatgttgctcctgcggcggtgactattcttgcaatggcctcggcccagtttgcaatgtcgtttttggtatatccgacgacggtgggcttgccggtggtgccggaggaggcgtgaattcgcacaatatccctctgcggcacggcaaaaagaccgaagggatagttgtccctaaggtcggttttggtggtgtatggaatatagcgtatgtcgtcaagacatttgattttgtctcccgttatgccaagcggggtcaaacggtcgtgataaaatttaacattgtttatgcaatagtcaaccgtccatttaagccgctcaagctgcagagcctcaatatcggctcttttcatggtttcgatttttttgttccagattgctgacatttgtcttacctccgaatttatgcgggaatttcgttgtcgtgagagcggtcgacctttccgttatagaaatagtcggcgttgcatttttcaagatttttcggcgtcgcaaagctgactgcgaggcacacgattattgacaccgccatggcgatgcaggcgaaaagcgggcctttcgaggcgagatcggacacggttttaagcgccccctcggccgatttgggatttcccgcggcgagcattacgcatttcgaaaatgcgggaacaattgcgatgaaaaagcccgacagaattgccgcccatgcgcccttgcggttgatttttttacagtagagggcgagaatgtagggagctataaatgagccggaaattatgccccaggaatagctcatcatatcgagaatgggagtgtcggtgtttgccaccacaaaggagcagaccacaaacaaaaagcagaccgctttaatgagcattttaagatttttgtcggacatatcttttttgaatttttccttgactatgtccatggagagtatggagccggctgtgagggaaatggaggaaagtgtggaaaccgacgccgaaatcagcagcacaagtatgacgccgagaagcaccgagggaagcgaggcgattttaagcatgttggggacgatatagtcctgaccgccctcgggcatggccgaaaagaatctgtgtgcaaggctgccgataaaatatccgccgcccgaaacgagcagggcgaaaaatgtggaaattacgatgccttttttagcctgggagtcgtcctttattccgaaatatttctgcaccatctgcggcagtccccaggttccgaagcttgtcatgagcacggtggccatgagagacacccattgagaggccgaaagagagggcagaccgccgttttgcgcatattcggcaatgccctttacgccgcccaccgtgtcgcagcgaataacaaagaaaatcatgagcgccacgccgaacatcattatgataccctgaacaaaatcggctctcacctgtgccatgtatccgccgaaaacgagaagcagggcggcaactacggctattattatcatacaggtcatttcgggaatgtcaagcaccaccttgcatacgcttgcaagccctttgtaaaccgaggccgaatagggaatgaggaatataaacataacgaccgacgcaaaggttctcatggccttggaattgtatctcagctcaaaaaactgaggcatcgattttattttaagccgataggaaacgtctcttgttctgcgggcaagcagcttccatgcgaggtaggaaccgaacacggcgttgccgagtcccgcaagcacgccgtaaagcccgaagttccaacccgttgcgccggcatagcccacaaacatgacggccgaaaaatatgccgtgccgtagctcagcgccgaaagccacgcgcctgcgtttcgcccgccgactgtgaggtcggaggcgcgggttatcttttttgaagagaccaccgacaccgccgccataagaattatgtaggcgataattgtgatgattattacggtatgttcgttcattgacttcaccttttcggtttattactttgacagctaaaagctttaaagcttttgcacgttaaagcaataaacatcatacaccaaccgcaaatttaagtcaagaatttttgtgaaaacggacgagaaaaattttggaataaaagaaggaccgctgccgataacgacagcggtccgattgttgaaaattcagagtttttcttccatggggaatttttcgattttctgaacactcttctgaagaacgagaagcgcgtcggtgaccgaaatttcaccgtctccgttaacgtcggccgcaagtctctgattgtcgtcaaaggtgaccttgccgacgcttgcctgaagaacctgaagtgcgtcggtgaccgtgacggttccgtcgccgtcaatgtcgccgtaaacaaccgtaacttcctttttgtcggcgtggagcataacggctccgtcgggcatgacaaaggaataatttccgttgccgtcggaggtgaattccacatccttgccgtaggaggttatcttgacggtgtcgggctcggcattttcgggaagggtgaaggtgacgattttgccgggctcggcatagctttcggagggaacaatgttaacctcgtccacggtggggtcggtgtagacctcgcgaacggcggaattccatccggtgacctctttgatttttgcgattatctgctgtgcggcatcatagtggattttgttgtagggatgtcccgagcttgagaaggtaccggcaacgggagcaacgaaataaacatgggtgtcgccctgggctctgatgttgttgacggcagcctcctgaacgggacgccagtcataatagccgcttatcgagaaggaaacgattatttctgccttgggattgacggcgcgaacctgctttatgaatttctccatatagcttgtgaagaattcggtgttgctgccctgagcaccgttgcgtccgtcatggtcattgtcgccgatgtgaattacgaccacgtcgttgtcccacgactcgaaatcataaagcttatcctcggtgacatagttgaatcggccggggtcctcctgatttatgttgcttcccggtccgttccatgcgcccgagggggaggcgtcgccgttgttccaatagtcggtgtagagatatgtgttatacataaatccttcggtgcaattgtcggcgatgccgggggtgagggtgataccgctgcgtgcggtgagggcatagtcggcgccgagaccgtttgcgatgtatcccgcaaatgttacggtgccgtcctgggtggtgtaggaatatccgcctcctgcaaggttggcaaagccggtcatgttggagtcgccgatgacctcgattttacgggtggatcttgcgggagggtcgagaagctgtccgtcggtggaaagggaggtgagaacggcgcggcttgtataggaaacctctccgcgcttgagtacggttacggtgtgaattccttcttcaagtccctctgcaagaacatactcgccgggagcctcggagggctgaatgtgggggcagatgttgttataatcctcgagagcctttcttgcgccggcctcggtggtgacggtgtggtcatactcataggtggtggtgtcgcggtcgacatagatgttgagaatggcgctgtctccgcccgcggttctcatttgagccttaagctcggtgccgtagaatctcaccgaaaagccggtggaggagtaggacatatagagctcgtctccgacatagtaggctctgccgtgggtggtgatgacgtcgtcaagagcgcccttttccacaatgccgtttatgtcggcggcgatcgcgtcggcgtcacgctgggtgacgggggcctcggcacgggaaagaaggtcggcaagatgagttttctgagcctcgctcaaatatctttggtcggcagcctttgcggcggcgacggcagcctcgagctcggcggtgttttcaaccttggttacgggtgtgaaggcaatgtcgtctatcataaatttctgcgcctttccgtcggtgacaagatttatttccatggtgtctattccgtcaaatttggaagaaacaaaggaaagggaaatagtgaccttgttccagccgttttcaagctttgcaacggggagcttgagagtgctgttggagccgttgcgtgtgagcacgacggtgctgtcggcggagagagccgaaacgtcctcgcagtagagccacatttcaaggttctttttgcccttaacgccgccctcgacggcgagattaacgttttccgaaacgagctttacatctgctccggaaacctcaaggcaggcgctgccttgctttttgtcggttgtgttgatgcttttttcggcgtttgaagtccaaacatcgaagtccatgctgtcgattgtctgagacgcctcttcattttcctgagcggcgaatcccggaaccgtaaacaggcttaggataagagccgcggtgagaaaaaatgacaacagttttttcataaatttgcctctttcttgtggaatgatacaattatacaacaacgccaaaaaaaagtaaatagaaaaatgcaatttagtgcttgattatatgtaaagttattgtataattaaagtgataggaaggaactgatttatgcgcagaatattcgacatacattgtcatgtctatcccgaaaagattgcgagcaaggcctctgcggctatcgggaagttttatgacatcgacatgaactttgacggcagctttaaaagccttaaaaatgatttggcaaagaccgaaaccgccgtcgccgcaattcactcggccgccacgactccgagtcaggtctcggccataaacaaatttatttcggagtgcgtcaaatccgagccggacaggtttatcgggttcggaactcttcaccccctgtgcgacgacatagagagtcatgttgaggaaatgctctcgctcggacttcgcggcattaaaatccaccccgattttcagaaattcaatctcgattcccccgaggccttcgccatgtttgaaacggtgggggacaggctgccctttctcatccacatgggggacagcagatacactttttccgcccccgcaaggctcaaggccgttatgaagcgttttccgaatgtcagggttataggcgctcatctcggcggctggacggtttgggacgaagcggtaaggcagctttgcgacattgacaatctttatgtcgactgctcgtcgtcactttttgccatgagtcccgagagggcggccgaaattataaacatctacacacccgacagggttttttacggaaccgattatcccatgtgggacccggccgaggaaataaagcgctttgacgcccttcctctcgacgactcggcaaagcaaaaaatcctgtgggacaatgccgaaaaatattttgatttgaaggtataaaaaaggagcctttcggctcccgcgggtcagacccttgtttcaatgaatttgacgttgccggaaatttcaacctttccgatactcgccggcaggaaaatgctgtcgccggttttaagctttaatgtttcgccgccggcgcaaataccgccctctccgtcgattacgagtatcgccgagaaggactcgccgtcaacctcgatttcggcagggccgcaaagcagctttgaattgaaatatttgcagtcggcaaggacgttttctccgccgaagtcgaccggacttgcgggttcggtttttgtgacgtcgagagctttttcgatgtggagctgtctcggttttccgtcggctccgagtctgccgtagtcatatacgcggtaggtgcagttggaattctgctgaatttcggcaatgagcattccctttccgatggcgtgaatggtgcccgaaggaatgaagaagcagtcgccctttttgacctccaccgaacggagaatgtcggtgagcgtgttgtcctttatgcgcttttcaaattcctcttttgaggttttttccttaaagccgtagaaaagacgggcgccttcttcacagtccacaacataccacatttcggtcttgccgtagctgttctcatattttcttgcatattcgtcgtcgggatgaacctgaaccgaaaggtccttttttgcgtcgataagctttatgagaacgggaaagaagtcgaattttttgcccctttctccgaggacatcctttccgagagcgtcaatcgcctcggaaagagttttgcccgaaagcggtccgtttgtcaccgtgctttgtccgtccttgtgacaggaaagcacccatgcctcggccgcggggacggtggtgcagtcgggataaaaatcgtgaagcttggttccgccccaaagataatccttaaaagcggggtaaagtttaagcgggtatatgttcataaaaacatctccaaaaaaattttaattcaattatatacagagcaaggccaaaaatcaacttttttcttgtaatattattcgctcggcagtatatcgataaaagcaatacctatatgcgaaagcggcaattcactttcgcccctttgtttgttaaaataataacgatagggaggtgtccttttgaaggaaaacgatatatcccgtgccactctcgggagaataccgatatatcttgaacatctgaagggtctttcaagctgcccagagaacatttcttcaacggctatcgcgagagaactcggcttcggggaggttcaggtcagaaaggacttgggcgcgctttgcggaaaaggacgtcccaaggtcgggtataaaaccgaaacgcttataaaatgtctcgaagggtatttcgaaaccgaaaggacaaaggccgttcttttgggctgcggtcatttcggccgcgcgctgcttgatttttccggttttgacgatctcggtcttgacatttcggctggttttgacgaaaatattctaaaggccgaaaaatccgccgggggaaggcctgttttgcccatgagcgattttgcgaaattctgcggcgaaaacgaggtgtccctcggaataataaacgttccgcccgaaggcgctcaggacgctttcgagctgttatacgaaaacggaataaaggcggtctggtgcatgacgccctgccgtctttccaccccgcccgacgcggtggttgaatatgaaaatatggtggcctcgtcggcataccttaaaatgcagatagatcaaaggagaacaaaatgaaacttgacagaataatcgccgtgagaaacagcaaaaccgtatactgcgaaggagatcacagctttaaggttttcaacaaggaccacaaaaaatccgacgtgcttaacgaagctttgaatcaggcccgccttgaggaaacgggtcttaatatacccaaaatcctggaggtcaccgttataaacggcaagtgggccattgtgtatgaacacatcaagggtaagtcgctttctcagcttatggccgagcagcccgagaaattcgacgaatatcttgatatgttcgccgaccttcagcttgacgtgctgtcgagaaactgccccgaacttgtgcctcttaacgacaagataacccgcagcatctgcgacaccgattttcccgccaccgtgcgctatgatttgctcaaccgcctgggcgaaatgccccgccacagcaaaatctgccacggcgacttcaacccctcaaacatcgtcgtttccaccgacggcacgccctacattctcgactggtcccatgccgcaaagggcaacggttcggccgacgtggtgggcagctatctctattttctgtataacaacgacgaagcaaccgccgaaaaatatcttgatttgatttgtgaaaagagcggaagaacgaaggaatatataaaatcgtggctgcccattatcgccgccgcgaaatctgccaagggaatctccgaggaaatgaaattctatgcctcggtggtaaataaattcatttaaaaaagcgtattgacccttcacggcataaactttcctatacgagcgacttttttgaagggtcacttcgcgaaaattaggaggaagatttatgaaagtaacggtatgtatcggttcgtcctgccacattaagggctcccgcgtggtggttgaaagactgcaggagcttgtggccgaaaacgatctcggcggcagcgtcgaacttgcgggaaccttctgtatgggtaaatgtcaggaaggcgtctgcgttaccgtgggagacaaattcttttcggtaagtcccggaacggtggacgagtttttcgaaaaggaaataaaacaaaaggtgaaaaaataaatgataattcagatatgtgtcggctcgtcctgccatcttaagggctcggagcgccttgtggagctttttcagtccaaaatttccgagctttctctttccgacgaggtgacgcttgcgggcagcttctgcaccggaagatgcaaccgcgagggcgttacggtcataatcgacgatgaggttttcaccggcctgacgcccgaaaagtttgacggtttttttgatgacaacgtgttaaaaaagctatcgggggaataatacatggattgccttaccttaaaaaaatcaaactgcaaaaactgttataaatgtatccgccattgccccgtgaaatccataagattttccggaaaccaggcgtatataatcggaaacgaatgtattctgtgcggtcaatgttttgtagtatgtcctcaggacgcaaagcaaatagttgacgaaaccgaaaaggtcagagtgcttcttcaaggcggcgagccggtcattgtcagtcttgcaccctcctttgtggcaaattacgagggcgtgggaataggcgccatgaaaagcgcccttaaacaaatcggtttctacgacgtggaggaaaccgccgtcggggccaccattgtcaaaaacgaatacgagcgcatgatagacgagggaacaagggacgttataatttcctcctgctgtcattcggtcaacttgctcattcagaaatatttccccgaggagcttgattttctcgccgacgtgatttcgcccatgcaggctcattgccaggacataaaaaggcgttatcccgacgcaaaaacggtctttatcggcccctgcgtcgcaaaaaaggatttttatcatttataatatgtacataaactttatcatta

SEQ ID NO: 1118 - DNA, 32759 bp, Unknown
  16S sequences of unknown bacteria
aagcagcattcggttatgagcaagtagcgaagcggattgcgaatatccgcttgactggtaaacttttcaatttgcttatttatagatggaaagtacaggagaattatatgacaacagatgaaaaatacatgaaggaagcattaaaacaggcgaaaaaggcatacgccttaaaggaagtgccggtcggctgtgtcatcgtatatgaggatcagatcatcgcccgcggctataaccggcgcaacaccgatcagaacacgacgtcccacgccgagatcaatgcgatccgcaaagcgagcaaaaagctcggcgactggcggctggagggctgcacaatctacatcacgatggagccgtgccagatgtgcgccggggccatcgtccagtcacgcatcacccgtgcggtgatcggcagtatgaatccgaaagccggctgtgccggttccgtcttaaatctccttgagatgcctgaatttaatcatcaggtcatcgtcgagcgcggcgtcttaggagagacctgcagcgcgatgctctccggattcttccgggaactgcgggagatcaagaagcgggagaaggagatggaaaagcaggaatctcatacagaagctggcaattaaatactacttgtatcattcagctccttcctattcgataaacaggtttttattgaacttcgggttgtcaacaaagctgctacgatctttcacttgcgtccacatcataggtatgttatactatagacacaaaaaggggaaagccaaagcggcctaccccagacaatgaataacctaaatgcttttcagcaacagccgttcactattcgcagtagtgggcggctattttttatgtttactctcaaagattgtataacacaatcctatgagcgagacaatgaatataccaatctgaattaactcgtcatgcgtaacgtacattgccatcaccccctttcttacgtccgggggtaactgttaggccgccttttatgttctgactttcccgtgtgaatagtatagcacagcgcatctggaaaatctacactgagagatgtacaccagtattgaaaggtaaatacatcttttatcctgccgatattataaaaatgcttttttcaccattctctctatttttgaagcggtcggaaaattcgaagctgcactgtgtccggctgaaaaaagtgtaaccaagtgtcaccctaaactcatcgacttctccgcccataaaaaaagcagaacacccggataaactcaggcattctgcgttctgaaagaagcggagacggagggattcgaaaaattcgttctgaaaaaatactaatacagaaggaggattttttgcacttcgcttttttagggaacaccatagggaacccaagccgtgtctccgacatttaaagcagtacatattcacaaaatacggacgtaaaaacaagccttttatagaggacattccttatatagaaggcttatttttgtgcctgtgtttattttgaaagcttaacctcaaaaacacagtagaaccaaactattcaaacccaaggaggaaatccaatgttagatcaatttattttaaaatttgcagaagccaaagagctacagcgacttaacaccttagagcacgaagatacaaagttccactttgcgtacatagcctttgagcttacccgcaaatgtaatcttaaatgtgcgcactgcttacgtggagaatggcagaatctcaccatgacaaaagaagtcatagacaagatgctggaagtttcttctggtattgattttatcttctttacaggtggagaaccttttctcgcgccagacctcatagagcatatagtagatagggtaattgctctggacttcgatgcaaaatatattagcgtcatcaccaacggcacaatcttaaactctttaggcatccgaagtgtgcaagccatgaatcggttcgcagagtggagctataaaaagaacggtatagagcaagcagcttctatcactatcagtaatgatatttaccacgggacaacaccacaggaagctgtagacttttatcttccttatgtcgatgagaaatatactaaagtagaaatacaggaaaaaaatgacactatcggaaatacaggtagggcaaagaagaatcatgttgctaccaatgacatgcctgtagtttacgcatatccacgtagaattaggattacagaagataatgttgttccgtgtaagtttgatctttcacccaaaggagaccttatagtaggtgaatttaacacgtgggaagaaatagacgccaatccgataggtaatattatgcaagaatctcttgttcgaatgtttgaacggaaccagtggtctgagttgccttgtaatgaagtcaaacgtttagggcgatattttaactccacaaccgagaataaagactatcaggaagtaaacgcttacatgataaactgctatgaaaccatccgcactgtccgttaccgtctgcatttgcggttcccatatctggactatactgatatttactggatgtctactctatatatggagcaggaaacaaaaatgaattggcttaaagtaaccacatatgattatgatgagaaggttaaagataaaattacacctgagttcattcaagaaaccttgtcaaattacgagataatgaataatcactatagatcacaaggcaagaaaaaggttcagcttgtaccgtacaatccagataataaaactatagagaactgtgccgatctggatgctcaagacgaataaaccaccgtcctatacttccaagctccggcatacatttctataatcagcttgctgggcataccatttacacgcacgtgttcttccataacctcatctggattagtcagaaagcttccgtatgtctgtacttttacagtagactcagtgtaattatccgaagccactttaaagcttccttctatcttataatccggccttagtgcatacgccatcagcagagctgataaaattcccacagtacatttctttttcatattctccaccgtgtacctgtaacgcttatgtgcttaattatatactgtacaaatatacagtgtaaatatataaagttattaaagataaagtttctggatataataaacgcaaatgtgaaagaggtcattctaatatgaagcatttgcatataagaatcgtagagcttttagctgagcacggtatatccaaaacaaaaatttgtaaagatttagacttacagcgtgggaattttaatcgctactgccgagatgatttccaacgggtagacgctaacctgataataaagctgtgtgattactttgattgctctgttggtgagcttttggaaataagagatgatgaatgataagggtgagaagctttctcatccttatttttttgtatgaaaaaggagtcaccgtagtgatgaccccttctaaaattctatgcttctttttccttttcttccagatactttttcagcactaaattaatgtactggctgaatgatctgtcatcttcttctgcgagctgtttcagcatttcaatcacatccgaatccaatgtaatgcttactttcgtttttaatggcttcatacttagcaactccttttcgtacaatatagcattatgcacgaaataatattgactattcgtataaagtaggataaagtaggatttaagcagtacatatatttatacaagggggaaaagaaaaatggcattaataaaatgtcctgagtgtggaaaagaaatatctgataaggccaatgcttgcccgaattgcggttgtccattaggcaaaacagattcagaagttatcactcaaacgaaacataccaaaaaaagtaaatgtatattcgtaataattggattaattatagttgttgttgcaattacgagattcagcatttataaagcatctactcaaaaagaagaaaattatcaaaacgcattagacttactaaataaaggaaaatatgatgaagccctaaatattttctctgatataccacaatacaaagacgttccagaaattgttaaacaggctaaatttgaatcatatggttattcagcggtaaaagctttaaaaagcatattgaaaaacccagattctgtttcaatatatgatatatatttctataatacatctgaacgtgctgacgaatccgaatccgaatctgaatctgaacagccagaaacggaaagcaatactgagccaccttgtatcgtaatgtattatggtgctcaaaatggctttggtggaaatacaacgggatatgttgcatgtacatattcttctgaccaagacacttatgttgtcgactgtgtaacgccaacattagataaagaagaattggatgaagatgatgaagattatatagactatctttttagcacagtaataatcaaaggattcatagaaagtcgtgaaaatataggagatataaatttcgaacgttttactaatgtgataaagaacatggcgtacacatctgttaagattatcgaataatctttgccttcatcggcttggcttacactttcgatgtcgttcctgtaggcggtgatatcctaacaccagatgttattatgactacggcaatagccgcttatgcaggcaaagtggtcgtaaagctgaccgagatcttaggtattaagcagaataattaattgagtaataaaattaaagggtagaccgttatggcctacccttatttttttgaacttaacttttcaatcgtccttaaacatttggtaaacaccacacaaaaagcaagccagcataaaaaatccaaataaggaactttccgagaatgcaaagatcgtcagcccaaaaatcaccagcatacctattaaatctaatactgcgtgatcatttgaggattcagttgtaggcttcgagtattgacgctttgctttcttcggcttatcccacgctccattcttttcccaatcttccgttaccttcttgtaaacgtaaaaatcggtcatccggtcaaaattatcatattttccatcatggttccagtcacgcccaccaaaaggtattttatcgtttgccatatggaagccccctttatatgtttaatattatatcacataccggagagtcttacaatcctatgtactgtactccggcttaatcctgtactacgtgctatgtccgttatatgcatcccaccagtataaagcatcattacagcatccgtattttgatttatcacggatggcctgccaccacagcgtccacgtgcttttgcgcttgccaatccttctttcgttctctggcttatcaggtcacgctcaagctgacttaatgcagacatcacggtaagcaaaaacgagttatacggattttctgttgttgtatctaaccaagtatctttaatactcttgatggaagctcctttttcacatatctttgccactatatccagtaggtcgcgtgtgcttctggatattcgtgtcaggtctgctatgagtacggtatcacccgcttgcagctcatcaagcatccggttcagctcaggacgttcccgcttggttccggtcatcttttccatatagatgtttcttttgtcaacaccgcgctgcacaagcgcatctatctgcctatccagattttgctctatagtagaaacacgggcatatcctattagcatatatatttcaccccttcttgtgtcagaaacgtgtcaaaaccttatttgattctgacacgttttctgatacatttttatgtgccgtaagccttataaatccgttccggcttacagtgtgtcagaaacattcgttttagacactctcaagtttcaggttattgtttaccatgatggtgatattctcaccatgctcccacgctgataagttttctacagcttcgagcgtcaccacatccgatacgatcttatccagattctgcgacattctgaaatctctcagagccacatgcagcccattgctccccgtgataatccagcgttcacgtagagcaagaacccaatagagcaatggggtaagatactcatagttgtacagatcaaagctgacatcttcacccaagctaagccggagaacggttccttcgatttcatccgacagtaagacttcggcagagaatgcggaagcatccgtaatgcttaagtcaccaccttgaacgagtccgttatctgtaacgtgcaggccatctgtattaatgttcccataaaagctcaggcttggtatattcaatgaaagctctgactcattctctaaaatcttacaaagtgcatgtgcgatagtattgtttttcatcttaaatagtccccttcctttagttaaacataacatcgatggtgccgttcggaatcttgattgtaattacacccaccgcattatcattcaatcggttaatgacctcttcggcttctgtcagatagaatgattcatctgtggccatcaattccaagcggttatccttgagctttacatccgtcagctcacagttcacaactacagagccgactcctacaagcatcgtggtcataatgtcctcatctttttcccatacacctttgattaagtcataaatttcctgtaacagtaacatcttaaaatcctccttattttgaaagttaatattcaataaacggctacagctatttaccatagccgcttgattgcttaatcggtcattatcataacttcattacattcaccacagataagtttcatatctttggtagttcgtgctgtgctcaggcacctagggcagatatgctttctatagctgcttctgcgagtggtggaagcggtacctttaccccgtgtaatagcgggattaaagcctatcaggtcatttcttgctatcagtatgtccgtcagaccgttctcaatacagaagttaagcagatcttcggtaggtgatgtaatgctccagccgatacgtgaatcatagtcgatctgtaagcctcgctgttcggcttcggctttaaatcttttattgtgataagaaccaccgcgggacgtgtccttaatctggtgaatgaaacagtattcgtgaatcatctcgtgaagtaatgtagcggtcacgttctcaataggtctgtcgagtgtacctgcaccaatatttatttctttgaatccttcatctgcacaatgccatgcatcgtaacaggtaaaatgaccataggcttttggtgtgctctgaactgtaataaccgctttcggaagctcaccggaaaagtaattctgattcaaaagattaaagatcttatccaagtaaccggtaacacgtttataattagataactgtttcatatgtagccccttcccgcccgtatagccgatagcacagctactgttttataacatatccaagaatctgttagctgctacaatctgtccgtatgatgcaaatacttcgatatgcactcctgtgccacagccacttgtttcaaaatagatttcatgcttttttaaatagcttctgaaagacacgtagtcactatagctcaattcacagctgacccaacgttttaacattttcatttaccccctgattcattgctttcgctcatattctcacctgtttcattccttaatcttgcagtagttcaatctcatacaggagctggcaatcaaatactgcttgtatctttcagctccttcctgttcgataaacaggtttttattgaacttcgggctgtcaactctccggtaaaggatttctaccatgttctgtttgctcagaaggttttctttcttccgtcgaaccatgtagtcctttaaatcctgttccaaggtagctaattctttcttctgtgcttcgatctctgcacgtttcttaataatctcggtaactaacagttcaaactcattcatattcttacacatatctttttcctcttttctttcttaataggaagcaaccccttaatcatcttcttgactattgcgcgcttgccagctactcacaggtatatggattaaggtttggtgtaaggctttcggccttgcggttgctgtcttgtttgtttctgacaccattataaatatatttgcaccaatagtctattgacagaataactatatttacaccaatatgtttgtctaaaatttatatttacatcaatagacttttgggttataattacgatacgatggagaaaatatatttattaagaaaggtggatatgaaatgtcagaagagactaaagttagtaaagcacaacaaaaagcagttaataaatatgtaaagaataattatgacagaattaacgtaacatttcctaaaggacgtaaagaagaaataaaggagcatgctgagagcaaaggggaaagcgttaatgcatttataatccgtgctgttaatgaagctatggaacgtgaacaaggtactggggggcaggataaaactcaggaatgacgtttattttctatatatactgtaacgaggtctttttctaaactcgccagatttttcataaagctaaccgtagttagacgagaaaatatttttgaactgactagctcaaattactaaacagaacatttttttgagtaagatgtgccgtccatgttgtaagcttgtccagatttggacaaagcagtgatcttccgcttgcgtccgcatcctatctatgcgatactgtaaatacaaaaaggggaaagccaaagcgacctacccccaagttaaatgcttatttattcaacaagccgttcactattgcgagtagtgggcggctattttttttgcttgaagatcgtatatcacagctcatctggaaaatctacactgagagatgtacactcacagatcaaaatgagatggtagaaataccggcggcaaattgttagggcgaagccgttctgcttaaaattaggatggcgttttacataaagttatgagaaaacgtatcaatgacgagccttggtttgtcgggaaagatgtggcaacggcgcttggctacaaagatacggatcagacaatcagaaaaaacgtagatgaagaggacaagctaacccgtctaatagacggggcaggtcagaaaagagaagctattatcatcaatgaatccggtctgtactctctcattcttttcagtaagctgccgcatcatgtttctaccataaaaaagagctacattctcgggtaccaaaatggtagtcgagatgtcaaccgccatgtggataaagaagataaaaataccgtcgtgattcacgacagaacttctggtaattcaaatgtaggaattatcaacgaaagtgttccctactatatgcaacctcagaaagcaaagggggtgacacaaaatgaacaccctatgactgagcgcaaaatccccccgagtaacagaatagcacttaccctgatttagggggactgattatgtacacaatattatgtaatccagaacctcatttcggaagcttaacagggtcgcttataaagtgttcggctaaagccgtatcgtccggatttaggagtacggctctcataaaattgtgagaaaacggaagcagcgtgattgacggctgacaagattattgatgtgtgattattttttgatgatatgttgctaaaaccgaattattcggtttttccacttttctactcatcaagaaaaatattcttataaaatgttttaatcaatctgaataatcagaaatcttatctcgatgatggtaacgatgatactgaatttaacattttcatggagcgggtgaacaagttgggcgatatgaaaaatgttagatttcagaatttttttctgcttgctccggtgctctatatgttcagtaattccatgaaccccaaaaaccctacccagtaagtagggatttatttacagagctactgtatgggatattttcatatgcagctgtgtttactgttttaagctggatttataaaatcctagtgaataagtgggatttttttgaatgagtgggtgtaaggtggaatttaagatgcggctatattcttacatctcttctgtttttcgatggagtcacgaatcgttaccccatccataattttcatagatcatctgttctttctgtacttctttcagtacgtctgatattctcatttcttttatcattctattctgtaatattcatcatttttttgattcagctagttcaaaaatatcccacaaacagactttccccgtttttcacaaaaactgccccaattgtgcaggtcagttacaatttcatagcttatccatccagctcacagcttcgtttattcacaccccttagttctaccctattggaagagcaatgcaacctgtttggcaccgctaacttccataattaaatattatattaaataaggaggagtctcaaatgaataatgaaaatattgatagactcgaagaaaaacaggcaaagtgcctagcaaaatggaactcgttaaatgtaccgctacacgaaggagaaaccgtggtacagatggtgaatcataacccgatatactttttatcatcagaaggacgggtgttttccgtagctggtaaagaatggcgtgaattaaaaacgacaacgaaaatatcaaagaacgctacatgtaagataggttcgaacaggcaactatgtgttggactacgggtaaacggaaaggtaccaattatcagaatcagcaagctgatggctgagtatttcccattgagcgtattcaatcctactaacgattcacggttggaaacacaccatatagagccttgggacgatgaaaaaggtacagacaataaccgtctggaaaacctacagcgcgtaagtaaacaggcacatgacgtcatttctatggcacagaatggcaaaatgactgtaaatggaacaatgaagcataagaatgaagatctgttctttaagaaactggccgcactgtcagatgatagagttatcattattttccaaattgtagatcgtgaaacgcgggaagtaaaaggtacatttggctacatacctacagataaagaattggaaagaatgttttcaggtgctgcactcacagaacaggaagaagctatgaagctcatacagagcggtgaagccaccggaaaagtacgtatcgtgaacggtgtgccacaattgattaaagaagaaaaggagaatgagaaaaatgttgagtaaagattttgatgagaaatacccagaaagaaaacgtaatattgaccgttggataggtgagcatggcccgactaaggacttacttaatgactatgtggatttattcgtatatgaagaatgggcgcggattaatgttaatgaaatccagaaatgggagcagtatgtgttgcctacgagtaagaatccggatgatgaagatcattaccgcggtttattcgtaggcttacgcaaacaaaaagaagaaatggataaattgctctcacgcatggagcgtataacgaaaggagaaaattaatatgaattatttaacaattgcacaggtacaggagaaatttggtttatcagcaaagcaggtgaaagcactcttccacgtagaagatttcccatgtttacgaatcggtcacacgaagctcgttcgtgaagatcttctggacgaatgggcaagcagtcacatgggagctgaaaatgctgtgaagctggattatacgaaagtgtgatggtttatggattatgtagtacgcgaacatacggtcttactcgataaggccgtatttaataagatcagaataaaatccatccataatatagaagcgctgcaagatcgtgagatcatcactatcaagcaaaaaagcaaggctaactatattacggaatcaggacaggaattttccagcttacagattaagggtgatggcgtgatagataagatggtagcaggaagtaaaatcttgggtaacaaccgcatagactactgtaatctgtctgttacgatcaggcgtgaagatgggacaaatctcaactgttatagcgtagcagaatataaggagcacttagagacggtacgccagcatctcatggatgagtacggaatcgaagccagctttgataacgtcagtttgaaagagctggaaatcaacaaaacgttccggttggaacatgactttagagaatatcaccgagtcttggaagtcatcatgtggaatcttccgtccatattcacacagagcgcagagttccggcaaaggctaaagacggatgaatcattcaacacgggaacttactatgcaagcaccagtaagagcaaacgttccgatcattacttactgtttaaagtgtacgataaaacgcgctctgtggagcagatcatcatgctgacagattcatacatgcgtgtggagcttaagcttgtgggcgctgataagatcgagcgtgacttaggtacaaagctgttcatggagcttacagatgaacgggtgaatgattacttctcagagaagatgcagaagctcataattcagccgtatgtggtttggaaagcgcagcgcgataaatttgtgcttgatgtgatgaaaacgcagctacagggcaatcagcaccattggatagtggatactcttcgtacactcacagataaatctattaaggagaactgtccggttctgctggatgttggtgagctgatgccgctcatagatcaggtgattacaggtgaccggaagaagcgctataagatcaaaaaagcatttaggagacaggccgaaaagtacgagactgtactctgtaacggtgatgacctcaagatggatgaaatcgtccgaagtgtcgcctcataggggcgacgctctaaaattgagattcatataggaatgctatagttttttgtactctgaggaacaagaaaaagtgggtgaagtgtccttgatagcaatagggacacaccaccccatcttatcgctttgagccggactaaaacttttcaaaaaactaatctcaaaaatattttattccgcttaatctcacatctaaaccgtctccccaaaataaaataactcattaactaagaaggtattgctgccgcaaggcatcacaccttctatttttttacctaaaaaaggagaaattattaatcatatatgactaaagctaaaataacatcagtagaattaaatcaactcagaaaaactaactcttctttcttttcttcattgcagtcagcctttttacaaggtataattacctcaagcgaagtgcaagaaaaaacacacatgaagaaagaggaaataataaagaaacacactgacaattactcagtctggttggccaaagacaattattggaaaaccagattaccggacggaagcccaaaaggtaaaatggtaaagcgcagaaacgagaaagatttggaagatgctattgtggaattttattcagcacagaaacagccagagacactcgaagagctttatgacagatggctacagtataaagcagtagagacgagtccggggaatgtcaaaaggctgaactccgactataaaagatatttatcagactgtccacttattaaaatgccgattaccgatattaagaccatcacgataaaagagtggatgtttaattatctgaaagaccatgagcttacaaagaggcagttcaataatatgaaaacgatattgaaccaattatttgattatgctctggactatgatattatccagtcaaatccgtcaagaagcattcataacatatcattcaaacattttgagccggagcataagaagccgcttgagaatcaggtatatttcccagatgagctggaaaaatatttggtagaatgtgaccggatgtatgaaaagacgaagaatatggcatacttagcaaccgctatgaattttgcgctgggcttgcgtgtaggagagttggtagccttagaaaaggattgcttcgatgataatttcatttatgtaaagcgtcaggaaaagatcaaatggaaagaggatgacgacggctggaaacgggacggctatgagatttcagagcatttaaagacgaaagagtctaccagacgtgttccgttgctatcaggagctaaaaagtatttgcagctagctctgaaagctaatacagattccccattcttatttgtcaatgcgaaaggtgaacgtcttacgaatgattctatcagaagtgcgcagcgctatgtgaatactcatataggtactccgacaaagggtaatcatgcattcagaaagacttatgcatcaatgctaaaagcatctcataaggtggaagatacagaaattcagagaagcatgggacacaaagacctcaaaacgacaatgagaaattatatgtacccaacgacacgagagattgaagcggtcggaaaattcgaagctgcactgtgtccggccattgaacagggaacactagggaaccccaaactcatcgacttctccgcacataaaaaaagcagaacacccgcataaactcaggcattctgcattttgaaggaagcggagacggagggattcgaaccctcgtgccggttacccgacaacttgatttcgagtcaagctcgttatggccacttcgatacgtctccctatttgctaaggcagcggaaaagacttttcgctgtcgtacctgtctattataaaacagcggcgggattccgtcaacctaaaattcacttctaaactttttataaagtgcacaaaatccccttgatttttttggtaaaatgagtataactaatttagtcggctaactgttagtcggctaaataaaaattgggatgaaaagcgatttactcaggtgtatatcttgggaatgaggtgagaaaatgtgtgagtgtaaaaaagagaatcctcagagcctgcagggggcatttatgaggttgctgcatcggtatacggaggtgaatttcgggcgtctgaaagatatgggtgtgcatccgggacagctgccatttttgaatatcatcagccataaggaggggatcagtcagcgggagctggcagagtgtctgcacgtgaagccaccgacggtggcggtgacagtgaaaaggttggagaaggcagatgtgatctaccggagaccggatccgaatgatatgcggatcagccggatttacctgacggaaaaagggatcaggatttcagcacagatagaggttgtgattcaggaaaatgagaaggtcctgactgccggattttcggaggaagagctggagctggcgagacacttttttacccgtatgattcagaacctgaatgtactttcaggcgggaaagaggagctgcctttggaaggagtgcgttctccggagaaggacaaagaagcatggagttgtgaaaccagaaaaggaggaagggcatgacaaagctggcaaaatatctcaaaagctcggcagggcttgtcgttgcgattgttgcgctgctgtttttgcaggcgcactgcgatctgaccttgccggaatatacgtcaaagattgtaaatgaagggattcagcaaaagggcattgaggacggtgtgccggaaaaaatgagcgccggtacaaaggcgaacctggagctgtttctgaatgatgacggaaagtcgctgctggatcagtattacacgcaggatggcgatatgtatgtgctgaaggagcatatcaaatcatctgaacgggaggagctggcagatatgctgtccgaaagcgagatgatgcttgtgagtctggaacagatggggagtgaggacagtgcatttggtatggatagcggcgacgcgatgcagctgccggaaggagtctcggctttggatgcagtgaagcagcttccgcaggagacccgcatggagatgctgcagaagcttaaggaaaagactgcagacatgccggatacgatgacggcacagtccgcaattctgtttgtacaggaagagtatgaagcgcttggtgaggatcttgacagccttcagattcattatctgctgcgtaccggcggcataatgcttctgattgcgttgctggcgatgattgctgcagtactggtgacatttttctctgcaagagtggcagcggtcgtggcacacgatttgagaaacgatgtttaccgcaaggtcatcggcttcaacagccatgagttcaatcagttttccactgcctcgctgatcacgcgaagcacgaatgatatccagcagattcagatgctgctggcaatgggcttccgcctggtgctctattcaccgattctcggtatcggcggtgtgctcaaggtcgtaaaaacggacgtatcaatgagttggattatcgcactggcggtcatcctgatcatgattgttattggagtactgtttaagatagcgatgcctcggtttacgaagctgcaggagctgatcgaccgtctgaatctggtcacaagagagcagctgaccggtatcatggtcactcgtgccttcagtgcggagacgcatgaggaggagcgctttgagaaggccaatcaggatctgacaaggacgaacctgtttgtcaaccgatgcatgacctttatgatgccagttatgatggtcattatgaacggcatttccgtgctgattgtttacagtggaagctatgcaatcgacggtggcaccatgcaggtcggcgatctgatggcatttatccagtatgcgatgcagatcattatgtcgtttttgatgatcgcgatgatgtcggtcattatcccgcgggcaaatgtagcggcgaaacgtatttatgaggtgctgagcactgagccgacgattcacgatccggcacagccaaagcagccaaaagcaaatgagaagggaacggtagagttttctcacgtatcgttctcctatccggaggcggatgagaaggtgctcgatgacatttccttccgtgcggaaaaaggacagaccgtggcctttatcggaagcaccggaagcggaaagagcacgctgatcaatctgatcccgcggttctatgacgtgacggaaggcgcagtcatggttgacggcgtggatgttcgtgatatggcgaaaaaggatctgtgtggccggctcggctatgtaccgcagaagagcacactgttttccggcacaattgattcgaatatccgctatggagcaccggatgcgaccggcgaggatgtgaaacaggcggcagcgattgcacaggcgacggagtttatcgaagaaaaagagggaacgtatgaagctccgattgcgcagggtggtacgaatgtatccggagggcagaagcagcgcctttcgattgcgcgagcgattgcgaagaagccggagatactcatttttgatgacagcttttctgcgctggactataagacggatgtcacacttcgccgggagctgaaaaagcagacagcagatacgacgaccctgatcgtggctcagcggatcagcacgatcctgcatgccgatcagatcatcgtactggatgatggaaaaattgccggtaagggaacacataaagaactgatggaaaattgtgaagtgtaccgtcagatcgcaaaatcacagctctccgaaaaagagcttgcgggatgagaaaggagcaggccagatgagtgaatcaagaccacgtggcatgcatggcatgcacggaggaagaatgggcggcgagaaagccaaagacttcaaaggaagcatcggcaaactcatccgctatatgtcaaaatataaatttcggtttgtaatcatgctgatctttgcagttgccgggaccgtgtttaatattgtagggccgaagattctgggtaaagcgacgacggagctgtttaacggtctggtcgcaaagattggcggaagcggcggaattgattttacaaagattacgcagatcctgctgtttacgctttccctgtatgtctgctcggcgatcttctcatttattcagggctttatcatgacgggaatttcgaatgatgtgacatacagtctccggagagatatttccggaaagatcaaccggcttccattaaagtattatgagagcaggacgacaggagagatcctctccagagtgacgaatgatgtggataccttgcagaatggactgaatcagagtatcacacagctgatcacttcggtcacgacgctgatcggtgtgtttatcatgatgctgagtatcaatgtgtggatgacgcttgcagcggttctgatccttccgctatcgatggggattatcgggacagtgatgaaacggtcacagaaatttttccgcaatcagcagcgctatctcggcgaggtaaacgggcagatcgaagagatatatggcggacatgacgtcgtaaaggtatttaataaagaaaaggatgttatagaagcatttgaaaaagtaaataaagagctgtataattcagcttggaagtctcagttcttctccggtattatgatgccggtcatgcagttcatcggcaatctgggatatgtcgtagtggcgattcttggcggattcctcgtcatcaaaaatgcgattgaggtcggagatatccagtccttcttccagtacatccggaactttacgcagccgatccagcagatcgcgcaggtgacaaatatgctgcaatctgcagctgccgcatccgagcgtgtatttgaattccttgaggaagaggaggaggatcagaaggtcgggcatccggcagcgacagatggtctgaacggaaatgtgacatttgaccacgtggcatttggctatgatccgaatcaactgatcattcacgacttttctgcaaaggtaaaggatggacagaagatcgcgatcgtaggtcctaccggagccggtaagacgacgatggtcaagctgctgatgcgttattacgatgtcaacaaaggcagtatccagatcgacgggcatgatgtgcgggacttcaaccgcaaggagctgcgggaaatgtttggtatggtactgcaggatacctggctgttctccggaacgatcatggaaaatatccggtatggcaggctggatgcgacggatgaggaagtcatcgcagcagccaaggcagctcatatccataaatttatcatgcagcagccgggcggttatcagatggttttgaatgaagagacgagcaatgtctctcagggacagaagcagctgctcacgatcgcgcgggcaatcttggcagacaataagatcctgattcttgatgaggcgacctcctcagtcgatacccgtactgaggcacagattcagaaggcaatggataatctgatgaagggacggacgagctttgttatcgcgcaccgcctttcaacaatccgggatgccgatctgattctggtcatgaaggatggagatatcattgagcagggtgaccatgatacactgatgagacagggcggcttctatgcggagctgtacaacagccagtttgaacgcagtgcgtgagtcaattatgaacaggtaataacagcagggaggaaatgtgatgaagtaccatattattacgattgagcgggaatatgcatccggaggcagcgagatcggcacacgggtcggtctacagctggatattccgtgttatggaaaagaagtgctggagcgcgcggcagagaaaatgaataccgtgccggaacggctcgtacagctcgaggagacgacgtcgaacagcctgctgtattcacttggcatggcgaaccggatcgcactcggggagcgggacggattaagcgaagagggcgctttgtatgtcacagaggagagtgtgatacgggagatggcactgcagggaccatgcgtgatcgtcggtcgctgcgcaggatggatcttgcgggatcgcgaggatgtactgcgggtgtttatccatgcggataaggaattccgcaaaaaacgcgccaggacgtgttacggcatagaggaagcaaaggttgacaatatcctgaagcggtttgaccgccgccgggccaatttctacagggcgaatacgtgcatgcactgggatgataagaaaggatatcacctcgtgcttgacagctcacagctcggcatttcagcctgtgcagacctgatctgccggacagcggcaggagaagaatagaagctgtaaatatcctggcctagtcagctgtccggttatgagcagacagagaagcgggctgcgaatatccgcgttatgctccaagccggttcatcagatcctgcagagaattggtatcggattctgtttcataaggcggcatctccgtgtccggaggtgccgtttctgtattcagagagtcagagctttcctggtcagactcgattgccggggcttcagattctgtctccggaagcagctgatcgaggatgtccgggtaaataacgatcggctccgactccggaaccgggatatgcagcggacagtctttttccggttcagtcccgacggcaaaatattcggtataggtgtcgtggcatccgttttctatggcaggcagatggctctccttgcagagctgaatttgccggactgacgatggcggggtaaattcagaggcgggtaaggtgctgtgaatccggttcatcacagcggaaaacagtgttttctgatagctgtggcagccatccggcagctccttgttgctgtcatatccgccccagacgccgcacgtgtagtagggtgtgaagccgacgaaccagatatccttgtagtccgaggtcgttccggtctttccggcgacgggctggccggatgcagaaaccgtctgataggctgtaccggaagggtcggcgacgacgccttgcattgcagaggtcagaagaaaggcggtcgagtccttcagtacgcaggtgttgtctcgtcctgccagggtgcgggtgtgaaaatcatccggtaattcgtttgcagatacagcatctgcttccaggtcggaaaaagcgtagagcacttcgccgtttcggttcaggatttttgtgaagaacttcggcgtccggtaaatgccatcatctgcgatcgcggcaaatgcaccggtgagctctaaattgctcacaccgtcggtgatgccgccgagtgcaagcggctggatacagtcagcagccgggcgcaaagtcgtgataccgaggtcctgcgcatactggaatccgagtgcgggggtgatggcagtgatgcagcgcgcggcggcgatattgaccgagcgggtgattgcttcccggatcgtgaccgcgctactcgtatcagcactgtcccagttactgaccggtgtgccatcctcgtaaaaaaagggtgtgttttcatagatagtggcgagtgtttcgccgacggcatctaaggccggggcataggcggtgaggattttaaaggtggagccgggctggcgcagcatatcggtggcgcggtttaaggtgaggctggcttttttttctccgcgtccgcctacgagtgcacgcacaagaccggtgtgctgatccatgaggacaagagatgcctgcggtgtttctgcaaaggagcctgcggggaaattggcaggattggagaactcttcatcacagatcgactgtaaagagagatcctgtgcagagtaaatgcgcagtccgccgctgaagatggcccggtgcgcctgttcctgtgtataatggagctcctgcatgagtatgtctgtgacctgggagatcagggcatcttcataataggaatagacgttttcccaaccggatagcggatcggacgcgaggacacggtcatacacgggatcattttctgcttcccgatgtgtgtcatgggagatgtagccctgtgcttccatatggttgaggacaatgagctggcgacggcggtttacttccggaaaagaaacaggattgtagccggatggattttgcgggatcgcggcgagtacggcgcattcggagagggtgaggtctgagacatcctttccaaagtaacgctttgcggcggactggacgccgtagcagccagagcctaagttgatcgtattcagataattttccagaatttcttccttgctgcttcgtttttcgagctggatcgcaaggtactgttcctgcaccttgcggcgcatacggtcgagaaatgtgcgctcggtcgtccattcagtaaaaacctgatttttgatgagctgttgcgtaatcgtgctggcaccctcggaaaaggagccgttcgtaatacctttgaaaaaggcacgcaggatgccgtggatgtcgatgccgtgatgcgagtaaaagcgttcatcttcgattgcgatgacggcctgctgcagcgcttttgggatttcatcgagcgtgacgagatcccggttggaggtggcaaaagtgaggcggcgcatgtaattgccgttggaatcgcagatataggtagcggactcggacggagagagagagatcgtatccggatcgggagcggtagcgatgagataccagagtgtcccgcagacaatgagtacgatcagaccggataagagcgcaagaccggtcagaagctgttttctggtaatgtgaattgatttcattgcgggagctccttttctgcagaaaaatttctatagtcgtagaatagtatgtcatgaggcactggtttttatgtaatttcagtgtgcttttatcgatcgcaggaaagatggtctgtccattcttgcggaactgtggtacaatccattaagaaagcatccgattcagaggaagccgaaacggttctgaacatggctgcaaatcgtgaaccggaggaaagaaaaaaggatatgaaacagattaaaatcgtatttgaaggtggcgaagacgagattgttgagaagaagtcccgctttattgcgaccgtgcgcccggtagagtccgaggaggaagcactggattttatcgcggctatgaagaaaaaatactggaatgcgacgcataactgttctgcatttgtcgttggagaaaatcaggagctgcagcggtgcagcgacgacggtgagccgcaggggacagccggtcggccgatgctggatgtcctgcttggcgaggcagtacataatgtggcagtcgtcgtgacacggtactttgggggaaccttgcttggcaccggcggactggtgcgcgcctattcccggtctgtacaggtgggacttgcagccagcaagattatcgaaaagacagaggggacactgcttagcatccgtacggactacaatggcatcggaaagattcagtacctgttaggacagcgtggccttacgatcaccgattctcagtacacagatatcgtagagctggagacactcgtgccgcaggagcagctgacagagctgaaagaggccattacggaagggacaaatgggcgggcagtctttacaaaggaagagacggtgtgcttcgcgtttgtggacggggagccgctgattttttaggttttctcatttacgattaccttttgacccaaacgttattattacatagaaaggatttaagcagaaatcatgagtattattatagaagaaacacattcatccgccccgatcggagtctttgattcgggtgttggcgggctgacggtggcgcgcgagatcatgcgaaatctgccggacgaacgtatcgtctatttcggagataccgcacgcgtgccatatggaagcaagtcgcaggagacggtcatccgatattcgaaacaaatcgtccgctttttgcagacacagcacgtaaaagcgatcgtgatcgcctgcaacacggcgagtgcactggcgttggatgcgatcgagggggagcttgacattccgatccttggtgtgctgcggccgggggcaaaggtggcggcagagacgacaaaaaataagcgtgtcggcgtcattgcgacggagagcacgattcgaagtgggatgtatggccgctatatcaaggcacatgacccggaaataaccgtctatggaaaggcctgtccgctctttgtgccgctcgtcgaggaggggtggctgaaggatcctgtgacggaggaggtcgcgcggcgctatttgaaggagctgctggaaaaggatattgattcactgatccttgggtgcacgcactatccgctgatccgctcgctgatgcgaaagattgtaggcgacaaggttcagcttgtgaatccggcctatgagacagcactggagctgggacggctgcttacccgggaaggacttgcaaatgatggaggaacagactgtgccggggaaaaatatcagttttttgtgagtgatgcagcggaaaaatttgcagagtttgccaattcgattttgccgtatgatgtaaagaaaacaagaaagatcaatatagaggagtatggagcatgacagaagatatactgatcagtgtgcgggggcttcacacgctggatattgaacaggaagaggaagagacggacgagctggaaatgaccatgccgggaaaatattatttccgaaacggaaagcattatgtactgttcgaggagaccgacgaggagagccagagcgttgtgaagaaccgttttaagctgtctgaagaccggcttgagatctcaaaaaagggtgcgatgaatacgacgatgaccttccagcgcggagagaagagcagcagctggtacgggactccggtcggagatgtgcagctcggcattgaggtgacagacatgcagctcatggaaggcgaggacgagatcgagatgaatgtggcctacgctctcgaaatgaacagcgagcatgtatcagattcgaggatccggttgcggatcatggaacggaacaaggggctgttccggatttgaacgcagatttcaagtgcgcggagcgactgcgttcatgagcaagtagcgaagctaggccctgtcagcagggctgcagggatgtagggatggattgcgaatgtccgctttactctggcgaaacaacaaaaagaggaagtacagacctgtacttcctcttttattaattatatttactgtgccagcgcctgcttcagtgccttcgccagctgatccggacaggaggttgggcgggaaccacagaggataccttccagacgggagattgcctcctcagccttcatgccttccacgagctttgccacgccctgtgtgttgccggagcatccacccacgaactctacatgcttgatcacatcgccgtcaagctccacattaattgcctgtgagcaggttccttttgtcttgtataccataaaaaattcctccttattgtttgttatgatacaagggttaaaagatcatgcgtttcatgcttgcatgaaaaaacatacttattgacccgcaaaatactttttgaccccaacatcttgttataaagttataaaagtgcacgtatgaaaagatgttcaccggaccttctaattgaaaagaaatctcaggaagagattcccaagcacagtatagcgggtttatggaaaatattcaagtaagaattgcgaggatatcccacacgggcgaggtgcgtggcaaacaggaagtgactcagagagagaatgggactggcattcttctttaaaaacgtttataatggcgacaggtacgcccgtcgcaaccgacatcagggcggatagcaaagtacggaaaggagttttattataatgaagaaaatcggaattatcggagcaatggatgtagaagtagagcgtctcaaggcagatatgactgtcacgcggcagatcacaaaggcgcagatgcatttctgtgagggaactttaaagaatcagccggtcgtggtcgtgcgcagtggaatcggaaaggtaaatgcagctgtgtgtacgcagatccttgtggatgaattcggcgtggatgcagtgatcaatacgggaattgcaggctctttaaatgcacagattgatatcggcgacatcgtgatctcgaccgatgtactgcaccacgatatggatgctgtaaactttggctatgcgcctgggcagattccgcagatggaggtattctctttcgtggcagacgagccgatggcagagctggcagaaaaggtgtgccatcaggtgaatccggagatcaaagtgttccggggcagagtcgtcagcggagatcagtttatctcagaccgcgcgaccaaggatcggatcacggagcagttccacggcttctgcacggagatggagggcgcagcgatcgcacaggctgcctacctgaatcagattccgttcatcgtgatccgggcgatctcggataaggcggatgacagtgcgtctgaggattacccgacctttgagaaaaaggcagtcgagcacagtgtacgtctggtcgagggctttctggcagcacaggcgtaaaacagagccgggaaggggatgccatgacagaacaacaattatacactttgcttgagatgccttctgaagcagtggaagccttaaatgaggcagaggggaaactgaatctgaaggagctcgcggcaccgattgcggcgctgactgatccgatgcggtatgacatggcaagaaaggatctggaacagcagctgagtgatgattcgaagggctggaagatattgcgctgcatgtttgcagcgatggtccggacatatgaacattatcagaaggcagggatttccgagcagacgtttgcagatacgatgaaatgctttccgagatttgtccgcgaacataaggagtgctttggcgattatggattcgaccgggcattttggccgggccgtcagctctcaatgctgctgttccggctcggtgcactggagtttgagctgatcccggagaccaagacagatgatgaagtaccggaaaaagaggcagtgcgggcatttcacctgccggtgaaggagatcggtgtgcatatcccgtcggatgcggacatcagtccggcacgggtgcagatatcgtttatgcttgcaaatatgttctttgcaaagtatgtgccacaggctgccgtgtgccgctatacgtgcgagtcgtggatgatgagtccggcactgcagaggctgcttccgcaaacgagccggattctgcagttccagaagcattttacgataacacactgggaaaaaggctcggaggaggactgctggcagtgggtattcagggcggcgaaggattgtccgcttgagcatctgccggagaatacttctttgcagcgcagcatgaaggaatacctgaagaatggcggagcagttggggttgcagaagccgtgtgggacggaagcccattttttgaggtgactcagatataaatgatgttatgatacacggattgcttcgcatttcatgctctcgcaatcctaaaacacctcaaatccgctcatttttctacgaaaaatggctacttttcggtgttttgcgggtcaataagtcatgctctttcatgcaagcatgaaacgcatgaccttttgaccctagtatcatcatataaatgcgaaaataccgcgaaaaagtcgaacgatttttctttgcaaaaaaaataattgcggctataatggcggtacttgagccggtgcagtgaaaggcgccgtcgctgcggctcagatcattttcgcaaagggggattccaaatgttacagtttatcatggaacgcaatgtgttgctttacgtgctggcggcggcgtgcgcagtcggtgtcatcagtcagatgatcttaaaggggatttatgatcagctgatccgggatacaaaaaatacaggagaaccatccgggcgttttcttatgcagctgcgacagcgatttttgtactgcacgcacctcaatgaaaaggtcggagatgtaccggctctgatcaaaaagagtctgtcagagtaccgtttctggggcatggggctgcaccagtggaagcggtttggtcttgcggcatttagccttgcattgtctgcggctgtgtgcggctgtgcaattcttgtgcaaaacggggcagatctgatacgggacaaccgttatttctggctgggggcgcttgtgctgctcctcttgacagcagtcgcagggatttcagataccggataccgggaaatgctgctgacggttggtctgacggactatctggaaaacagcggagctgtcaaggactacagtgacgcggcaggagaagaaccggagcccgaggccgtctatggaaataccgtgacaccgacaccgattgtctcggtgtctgaggggcggagggcaaagcaccgtgcggcaagggcagagagcgccgctgcggagacgaaggcgcagcaggaaaaaagggagctgaaggagcatctggcaagggcgagagccggcattgcacagactgcggcagctgacgagaaggagaaggacagccgggccgagctgctgcgatcgatggatccgaaggagcaggagcggattttgaaggaagtgctccgagagttcctttcgtagcgctttacaaagacaaaatcgtctgctacaataaataacggttcaaacaagacagacgcaggaaatgacctgcagtgatatacaaaacagttaaggagatgtggttatggggaacaaagtgacatttgattattccaaggcatcctgcttcgtatctgaggcagaggttgcatcgatggagaagcttgttgcggcagcaaaggaagagctggtatccagatccggcgcaggaaatgatttcctcggatggattgaccttccggtcgcatatgacaaagaggagttcgtacgaatcaagaaggcggcagagaagatcaagagcgacagtgaggtgcttctggtgatcggtatcggcggttcctatcttggggcaagagctgcaattgagttccttcgccacagcttctacaatatggtgccgcagtcagtgcgcaagaccccggagatttatttcgtgggcaacagcatcagcagcacgtatgtgacacacctgatggatgtgatcggagaccgtgatttctccgtcaatattatttccaagtccggcacgacgaccgagccggcgatcgcattccgtatcttcaaggaaatgctggagaagaaatatggaaaggcagaggctgcaaagcgtatttatgcgacgaccgataaggcaagaggagcattaaagcatctggcgacggaggaaggctatgagacattcgtggttccggatgatgtcggaggacgtttctctgtactgactgcggtaggactgcttccgatcgctgtcagcggcgcagatatcgaccgcctgatggagggcgcagcttccggaagagcacatgctctggaagcaccgtttgcagaaaatgatgcgcttcagtatgcggcactgcgcaacatcctgctgcgcaagggaaagacgatcgaggtactcgcaaactatgagccgagcctgcattatgtatccgagtggtggaagcagctttacggtgagagtgaaggaaaggaccagaagggtatcttcccggcatcggttgatctgacgaccgatctgcattctatgggtcagtttattcaggacggcagccgtattctctttgagaccgtcctcaatgtagaagaatccaaatgcgagctcacgatcaatgaggagccggttgatctggacggcctgaattatctggcaggcaagaccgtcgactttgtaaataagagtgcaatgaacggaacgatccttgcacataccgacggaaatgtgccgaacctgatggtaaagattccgaagcaggatgagttttatctgggtgagctgttctacttctttgagtttgcctgcggcgtgagcggatacgttcttggtgtgaatccgttcaatcagccgggtgtagagagctataagaagaacatgttcgctctgctcggcaagccgggatatgagaaggagagagaggagcttcttgcgagactgtaagaagcaggaccgcgcgaagtgatgggagatatgccaaagcgaccgggcggtttcggaaacggtgtgtggggggatacagaggtatccccctttccaatgtaagatctggacaaaggaggagagcatgaaaatcgtatttttagaagcggacagtctcggcgaggatatgaagctcgatcatttttttgagatcggtgaggtcgtcgtttatggaaagacgacggtagagcaggtaccggagcgtatcgcagaggcggatgcagtcatcgtaaataagcttccgatgaataaggagacgctgtccggggcaggctttttgaaatatatcggcctgacagcgaccggtgtaaataatatcgattttgattatacgaacaaacgtggaatcacggtcacaaatgtagccgggtattcgacggaggttgtggcacagcatacatttgcgatgatgttttatctgctggagcatctgcgctactatgatgactatgtaaagtccggaaaatatataaagagcgaatcattttgtcatatggatcggcgtttcacagagcttgccggaaagacatgggggattatcgggctcggtgcgattggaaagaaggtggcagagcttgccacggcatttggctgtaaggtgatctattactcggcatccggtaaaaagcgcagtgagctctatgagcagacagaccttgatacactgctggcgaattcagatatcgtatcctgccatgcaccgctcaatgataagacatatcatatgatggattatgagcaattctgtaaaatgaaaccgacggcgatctttatcaatgtcggccgtggtccgattgtggacgaaaagggacttgcaaaggcactgaaaaaggagaaaatcggagcagccgggcttgatgtgcttgaggtcgagccaatggatccggagaatcctctttgtaagctatctgagagcgatcggctcctgattacgccgcacattgcgtgggcggctgtggaggcgcgtacacggcttttgcaggaggtctataaaaatctgaaagcattccagaagggagagaaacgaaatgtctgcacaggctgagccaagagggggatccggggtgtgggactttctgagaaatctttcagagaagcaaaaaggaagcagctctgagcagatgccggaagagcatccgcgtatgcgcatcggaaggtatgcggcggcggtgcttccggcggcgctgcttttgtactactgcacgcatgcagcgttatatgcaggagagcatcatacttttattcttgcaagcggtcggacgtatgtcgtgtcactgatctgttttttactgatcgtgctcgcactcgtaccggttcggctgtcggagcatgcgaaccgcatcacttcatggggctggtttttgctcgcgccgtttgcggtctatttttcgctgctctatatgaatgcgagtaaatacagtatcaaattttttgaactgaaccgaattgcactcgtgctcacatttgtattcctgtttttattcgagaccgcagtgctcatcctgacggggagtatccggtttgctgtagtgacgatggcggtgctcattgcggcgcttggtatcgctaacagctttgttatctcttttcgtgggatggcgctctcggcggcagatttattttccttaggtgcggccgcatcggtcgcttccgagtatacatatgaactggactggtatatgtacatggagctgctgtgtacgttggcgatctgtatgttcagcctgaagctgcatgggggaaggattctgcatccggcagtgcgggccgctgtgctcgtactgtggtgcggcgtcgcaggaagcttctattatctgtgttgccggacagattttctggaacagcataatatccgctcgcagggctttacccaccagctgcggtataaaaattacgacatgatctttacgaccttaacgacctgcttttacctgtcggtcgagaagccggaggggtattccctggataaggtgaaggagattgcagcgccgtatctgacagaggatgccggagatgacgcaaatgcagccgcagcagatacggatgtcaggcaggcatcctcagaaaatgccacgagtcagacagatgggaagaataaggcagcctccgacgataaaaacaccgcgtcgaccagcggcaatgccgctgccaattctgcaatcgcagcgggagagaagccaaaccttatcgttatcatgaacgagtctttcgcagactacacgagcatcggaaagggtcttgatctctccgaggactgcatgccgtttattcacagcctgacggagaacacgatcaaaggaaccgcctatgtttcgattttcggtggcaatacaccgaattccgagtatgaatttctgaccggaaatacgatgggatttctgccggcctcctcagtcggtttcaacctgtttgtgcgcggaaacctgccgtccatcgcgtctgagctgaaaagccagggctatgagacgctggcgatgcatccgtatcgcgggacgaactacaggcgaaatctggtctacccgcagattggatttgataccttttacacccgtgacgattttacgcaggcgaagtacattcgcagctatatctcggacgacacgctggcgcagcggatcatcacggagttcaacaagcacgaggagaacacggatatgccgctcttttcctacaacgtgacgatccagaatcacggtggttattttgcatccaacaccaggaatctggatctggatatcacagtggaggacccggaagtcgatcagaccaagacgactctgtatgtcaatctgatcagggagtccgatcagatgcttcaaaatctggtgaattattttgaggataaagaggcgccgaccgtgattgtaatgttcggtgaccatcaggcaaaccttggagatgatacatatgagtatctggtcggaaatgaggatgaaatctcccgagaggagcggatggaaaagtacaaggtaccgttcgtgatctgggccaactatgacatcccggaagagacgatcgagagaacgagcctgaattatctctacagcatcctggcagaccgcctcgattttccgatgacc

SEQ ID NO: 1119 - DNA, 10110 bp, Unknown
  16S sequences of unknown bacteria
gttttgaaagacggcttgtccgtctttcaaaattcacgaccccatgtcgtgaaagcctcaaaactgtttggtctgaaaattcattttcagacttgtgcctttcagttaaacagttaaatggcaggatttcgtcactcggcgccctcagacacagccgccggaacacgcgccggtgcgtcatccatcaccgggatgatatccggcgatttctcagcgacctcttcacggctcacatagtcgctcatcagcgtctcggctgacgtttttctcacgagagcccgctccagcacctcgtccgcggtcttcaccgggacgaactcgagcgtctccctgacggtcgggtcgagctttgagaggtcgcgcatattgtccgccggaatcagcaccgtcttcacgccggcgttgtaagccgccatcgtcttctcccggagcccgcctatagcaagcacctttccgcggagcgtcacctcgccggtcatcgctatgtcacgtctcaccgggatgccggaaagcgcgctcgcgagcgacgtcacaagcgtgacgcccgcgctcggcccgtccttcgggacagctccctccgggacgtggatatgtatatcgcggtttttgtagaacatcgggtctatcccgagctccttcaccctcgagcggacgaagctcagcgcaatgtgcgccgactccttcatgacgtcgccgagagagcctgtcagctcgagcttcccgctcccctcgaacacagcagtctcaacgcgcagcatatcgccgccgatctcggtgtacgcgagaccgttcacgacgccgacctcatccgtgtcagatatgcgctcctgaattatcgtgtcctcaccgagatattcacgcaggtcctccggtttcacgacgatctgctttatctccgggtcctcgacgaccttcttcgccgctttgcggcagatgtcagcgatccggcgctcgaggctgcgcactcccgcttcgcgggtgtagctgtcgatgatctcaagcagcgcctcgtccgtgatcttaagccgtctgcggttcagcccgcagcgcttaatctgcttcgcaagcatatgctccttcgctatcgcgagcttttcggagcgggtgtaggaattcatccgtatgatgtccatacggtcgatgagcggtctcggaaccgtctcgagcgtgttcgccgtcgcgatgaacaggcactcggagaggtcgatcggcagctccatgtagttgtcgcggaacgacttgttctgctccgggtcaagcacctcgagaagcgccgccgccgggtcgccgttcgcgcccgccgctatcttgtctatctcatcgagcagaatgaccggattccgcgtccccgcctgagcgagcgcgttcacgatgcgtccgggcatagctccgatatatgtcttcctgtgtccgcgtatctcagcctcgtccctgacaccgccgagcgacacacgcacatacttgcgccccgtcgcacgggcgatagaagcgccgaccgacgtctttccgacgccgggagcgccgacaagacagagtatctggctctttatgtcggtgagctgtctcaccgcgaggaactcgagaacgcgctccttgaccttgtcgagcccgaagtgatcctcgtcgagtatcttcttcgcgcgctttatgtcgttccggtccggcgagagcttcgtccacgggaactcaaggcaggtgtcgatccacccgcgcgaaaccgaggactccgcggagccgaacggattcttcgccattctcgagacttccttcaggagcttttcctcgacctccttcgggagcttcgccttctttatcttctgcgtatactcgtcggtctcgtcgtcggacgtgtcgccgagctccttcttcaccgccttcagctgctcgcggaggaaatagtcccgctgattcttgtttatctgctcctgcaccttctggtgtatctcggactccgccgagagcaggatctcctcgtcgtacatcatcgagattaccgtgcgtatctgcttcaccgggtcgagcgcgttcagcaccttctgcttgtcagacggacgcacgagcacatggcaggcgatgaaatccgcgaggaaaccgacctcggtgatcgccttcacagccgccgagacgtcgttcgacagcttcggcatatatctcgtcaggctctcgaacgcggcgaccgcctcgcgcatatacgcctccccgcggaggtccggcgtgtcgtctgtcgcggacagcctcacaaggagctcagccgtgatgagggatcccttcctgaccgctccgacgaccgtcgcgcggctgattccctcgataatgacccgtcttaccttgtcgctgacgcgtatcgtctgctttatacgcgcgacggttccgacgccctcgagcgcgtccggcgaagggtcaatcgccgtcatgtccttctgcatgacaaagaacgcgttcccgccggttcccgccgcgtcaagcgccgcgagcgccgtgctgccagtcagctcgaagctcatcgaattacgcggaaaaaccacgatcccgcgcgtcggtacgaccggaagtgacacacggtcgatcttttctatataattcggcattatgttcaatttctccgatttcagtaataagtcgtccgatcacggaatatatcctcaacagcgtgaccggagcgcgtattgaggtcttctctatattataacacacctgacgcccgttttccatacgaatcgacaatctttaagaagaattaaacatttgtcaatattttcttcagtcaaaccgccggaaaaatgaagaaaaaacgaaaaaacggctctgcgcgggtatatcataagattgatattccgcagagccgcttaatcatacaaatcattttcatgccattaactccctcggttttctgtagattcatgccgaattcaaatggcagaaaatattataccgcatttttcgccttttgtaaataggcattaagacgaattaggcgcgcggattgtcagataatttcgtcgtttcgctgattttatctgaaagcgctcccgaacgggttccgcggcggtgtcacattatattccggagtcacgcagacctcgccgggaagctcattcatgccgttttgagtgagcggcacaggcgtgatcccgttgggcgccggcgttctgacgcagcgcctgtcgagcgggtatctcggacggttccgcgcgttttcgtttgtcatgtcagatcatccttccggacagtattcgagccgcgcttttttcgcggcgtcaataccatgatattccggaaagcaaaaaccgttcgccgcgtctcacccgtgtgcgtgcgtcctcgctatcgtcgcgctgatgatcatttccgcgccggagcctgtcagcagctcagccgaagaggcgagcgacgctccggtcgtcattatgtcgtccatgagaatcaccgtctttccggcgagatccttctcgcggacggttatcgtgttcttcgcgttttcaaggcgttcctcgtgaccgagcgtcttctgctcgagcgcctttccggttctgccgagcagcttcgcgtatctgtagccgagctttttcgcggtcagcgacgcgacatccgccatgtggtcgtagccgacctcgagtatcgttttcgggcggcgcgggacgttcgtcacaatgacatcctccggtctgacgctcctcagatgctcagccgcctcccgcctgatgagctccgccatctcccctgagatgaagtcgagcaggtcgcgcgtcgcgttccgtttcagccgccagatcagcgtgtcggtcgcgctcaggctcttccccgggacataatccgcgagaaagcatacaagaccgaatctctcccgattcttcccgtccccgaactccgcgaccggctgaccgaggttttcgctccgcgcccgcagcttctcgttctcaaacatacgcccgcatctctcgcagaacggagacttcctgtcgtccccgacaagctcgccgcagcggacacagtgctccgggtatatgaacgacgctattctgtcaattatggacatcctgtctcacctcgccagtcagtgtctgaaaagacccgtataccgcatgatctgccggttattgtcgaccatctccttgacgacggaggtatccccgacaaggatgcacatcgccttcgccctcgtcaccgccgtgtagaacagatttctcgtcagaagctgcttcgggcaggagcggtacatcgggattatcacgaccgggtactcgcttccctgactcttgtgaacggttatcgcccacgcgtggtcgagctcgtcaagcttcgcgaaatcgtactcgacaagccgctcgtcaaagcgtatcaccatctgctcggacgggacgtttatcgtctcgatgacgcctatgtcgccgttgaagacgcccatgccctcttttccgtccttctcccacgtaagatcgtagtcgttctttatctgcatgacccggtcgccctcacggaacaccgtgtcgcggaacttcttctcgagcttgcggttagacggcgggttgagagcctcctgaagcatatggttcagcgactcggtgcccgcgatgccgcgcctcgatggggagatcacctgtatccccgtcgccatctgctcgccgtaggtcttcggcagacgggtcttccagagctcgactattgtcgacgcgatatcctcgtcccgctggcggttcatgaagaagaaatcgctcttcgcgtcgttgaggaccgggtactcaccgcggttgatcaggtgcgcgttgcggattatcaggctctcgtttgactggcggaagatctcggtcagcttgaccgtgcagtagcgcccggacgcgataatatcattcagcacgttacccgcgccaaccgacgggagctggtccgcgtctccgatcagcatgagtctcgcaccgggttttatcgccttcagaagcgagttcattaaaaacatatcgatcatcgacgcttcgtcgatgattatcacgtcttcctcgagcagatcgttctcattcttcttgaagttgtcccgctttccgtcggtgaaatccgtctcgagaagacggtgtatcgtcttcgcctcggtctgcgtcgcctcggacatacgcttcgcagctcttccggtcggcgccgcgagcgcgacgcgcatatccatgctctcgtagacacgtatcaccgcgcggataaccgtcgtctttccggttcccggtccgccggtcaggaccataacgccgctgtttatcgcatctgagattgcctttctctggagcgcgtgatacttcttgtcctcctcgagctcgatgcgggtgatgaagcgctcgacgtccccagcctcaagcctcgggcacagcctgtcgagcaggtcgagcttttcctcgatctccatctcgcacctgagagacgccgaatcatacacagcgtcgagattcccgaccttcaccctcgagagcttcccggcgagaacaagctcgtccagagtcgtcgagaccttgtcctgcgtcgccccgagcgtctgcgccgcgagcggtacaagccggttccatggcaggaacgagtgcccgccgtttctcgcgctttcattaagaacataaccgatgccgcttctcagtctgagctccgagtcagcggtcacgccgagagtctgcgcgaacctgtccgcccgctcgaagccgatgccgtcaaactcctcgcagagactgtacgggttctcctttatcctctcgaccgaagacgcaccccacttcgcgaaaaccttctgctgcatcgcgaccgaaaggaactcacggcagagcatcatcagcgaacgcatcgcgaactgttccctgaacgactttgatatctcctccgccttcgtcgcggaaattccgggaaccctcgcgagccactccgggtggttctcgatgacgtcgaaggtgtccggcccgtactcaccgatgagcttcgcggcggtcttcggacctattccctttatcgcccggctcgagagatatctcagcatatcgttctcggtcgcgggcatgcagatctcgatgtacgcggcgcggaattgtcttccgtagcgcttgtcgaaagtccactcgccggtgacctttatccgctcgccggtcgatatcttcgggagaaccccctggactgtgattatttcgtccttcgggagctctcccgtcgcctcgtcgaccgacatgtcgaagactgtgtagccgttttcctcattataatagattatattttcgacatccccgccgagaattataagttccttgtcctttgactgtccgtccattccgcgccgtttactccctctgtgacttcgttatattcaattatatcaccttttgcccgaataatcaaccactccggcgcgattttccgctccgcgcgaagataatttacatattcgagcgcgcggtcgttcctgtcggcaccgtcgtgtatcgcggcggtgaccctcatgcggacctttttcgggaacaggatcgactccttgaggttccttatcagcgaccacgcgccgaaaacggcgaggaaagctacgattatttcaagaaattctctcaatgtgttcacccccttttattatattcacggaatgaatatttgtcatattcccgtccaaaataaagtaagataaagccgcttttgtctgaatgggagaaaaatgagaattattttgtgattttcgggattgcctcttgacttttcggggaaagcgtgatataatctattatatctgggtggagtgtaatgctctgccgggataaacaaatttcattattttcaaaggaggtgcagtatgccaacctttaaccagctcgttaagcagggacgcgaaaagtcgacctacaagtcgaaggcgccggttctccagcacggtttcaatactctgaccgacagagcgaccgacatcagctcgccccagaagagaggcgtttgcacgaaggtcaccacgaccaccccgaagaagcctaactcggcgctccgtaagatcgcccgtgtaagacttaccaacggactcgaggcgaccgtttacattccgggtataggtcataaccttcaggagcactccgttgttctgatccgcggcggccgtgtccgtgatctccctggcgtgcgttaccacatcatccgcggtactctcgatacccagggcgtcgcgaaccgcaaccagagccgttccaagtacggcgcaaagagaccgaagaagaagtaatttctttgcggctctcccggacggcgtccgctgttccggatgagttccccgctctctcggggagaatactgcaaggtatagaaaacagccgaaaagcttttacctttgaaaatatcgaaatttgtttatccagattccggtgcgtttcaatggacgagcatttacgggagtcaactttcgagtacctatgatatcatttttatgaaggagggaagttacaatgccgagaagaggtcaaatttccaaaagagacgttttaccggatccgttgtacaattctaagctcgttacaaagctcatcaatacaataatgtatgatggcaagaagggtgtagctcagaagatcgtttacgatgctttcgcaatcgttgagtcgaagctgggccgcaatcccctcgaggctttcaacgaagctcttgagaacgtaatgcctgtgcttgaggtcaaggcacgccgcgtcggcggttcgacctaccaggtacctatggaggtcagagctgagagacgtcagactctgggtctcagatggatcaccacctattcgagaacacgcggagaaaagaccatggccgagagactcgctgccgagatcatggacgctctcaattctgcgggcggagccttcaagaagaaggaagagacccacagaatggcagaggcgaacaaggccttcgctcactacagatattaatctgtaccgttttccgctatttcttgaaaaggagaaaaccaaatgccaagagaatacccgcttgaaagaacccgtaatatcggcatcatggctcacatcgatgccggtaagactacgacgactgagcgtattctgttctatacgggtaagattcacaagatgggtgacgttcacgatggcgcggctaccatggactggatggctcaggagcaggagagaggtatcaccatcacttctgctgctaccacctgctactggccgggttccgcacatcagtatgatatgcaccgcatcaatataatcgatacccctggtcacgtcgacttcaccgtcgaggtccagcgttcgctcagagtccttgacggttccgtcaccgtattctgcgcaaagggtggtgtcgagcctcagtctgagaccgtttggcgtcaggctgataagtatcatgtcccgcgtatgggttacgtcaataagatggatatcaatggcgctaacttctaccgcgtcgtcgagatgatgcacgagagactccacgcaaacgcagtgccgatccagctgccgataggcgcagaggctgatttccgcggaatcatcgaccttatggagatgaaggcggacgtctactacgatgacctcggtaaggatatgcgcgtcgaggatatccccgctgatatgctcgacaaggcgcaggagtaccgttccaagatgatcgaggctatatgcgagactgacgaggagctcttcatgcgctactgcgacggtgaggagatcaccgttcctgagctgaagaccgctctgagaaaggcttgtatctcgaacgagatcgtgccggtcgtctgcggtacttcctacaagaacaagggcgtacagaagctgctcgatgctatcatcgactatatgcctgctcctaccgacatcgaagctatccgcggtatcaacccggagaccggtgaggaagaggacagacattcgtctgatgacgaaccgttctccgctctcgcgttcaagatcatgaccgacccgttcgtcggaaagctctgcttcttccgcgtatattcgggctctgtctcggtcggaaccaacgtttataactcttccaaggacaagaaggagagattcggacgtatccttctcatgcacgcaaacgaccgtaaggaccttgaggtctgctacgcgggcgatatcgccgctgtcgtttcgacgaagtacaccactaccggtgatactttctgcgatgaagatcatcctgtcatcctcgagtcgatggaattcccggagcctgtcatccgtcaggcaatcgagccgaagaccaaagccggtcaggagaagatgggtatcgccctcgcaaagcttgccgaggaagacccgaccttcagaacctacaccgacgaggaaaccggtcagaccatcatcgccggcatgggcgagcttcacctcgagatcatcattgaccgactcctccgcgagttcaaggtcgaggcgaacatcggtaagccgcaggtcgcatataaggagaccatccgcaagaaggtcgaccacgagtgcaagtacaagaagcagtccggtggttccggtcagtacggtcatgtcaagatcattcttgagccgaacgagccgggcaagggctacgagttcatcaacgccgtcaccggcggcgctatcccgaaggaatttattgaacctgtcaaccagggtatccagagcgcaatgcagaacggtgtcctcgcaggctacaatgtcgtcgacgtgaaggtcactctttacgatggttcttaccatgaagtcgactcctcggaaatggcgttcaagatcgccggctccatggctttcaaggaagctatgagaaaggctgatccggtactcaccgagccgatcatgaaggtcacgacgatcactccgaacgattacctcggagacatcatcggcgacttcaactcccgccgcggtgctatccagtccatgaacgacaatggtaagggcgtcaccgagatcattgctgaggttccgctgtccgagatgttcggttacgcaactgatatgcgttctaagtcccagggccgtgctcagtacacgatggagcctctctgcttcaagcaggttccgaagtccattcaggacgagatcatcgctgcccgcggaaagggcaactgataaaccttccggatatccggaggttgtcacgcggatcaatccggtccgttccgccgtgttt

SEQ ID NO: 1120 - DNA, 5337 bp, Unknown
  16S sequences of unknown bacteria
gaactcacagaggtgcggcgtttgagcatctctgtgcgccctccgcgtaggagcgacccctcaccgcagtgagatataataaaatcaaaagacggagtcttttctacaaaaacaaaagccggattggcaagaggtgaagtcaacctctcataccaaatccggctgaaattttagtttacgtcaaaccgcgccagtgcagttctcactgtccaagaaccgccgcaccaattatgcccgcgtcattgccgagcttagcaatgagaatctgcgtctgaggcgtgccctcgcgggagtatgtctccgcccataccttctcaagcagaggcttcgtcagatattcaccctcgttgcatacgccgccgcctatggagagtacgttcggctggaatatgttgataacgttcgcaacaccgcacgcaagatagctgatgtattcgtcaacaacctctgccgcaacctcgtcacctgccttcatagcagtgaaagccgtgcgagcggataccttcgagagatctccgccgatcatttcttccatggatgtcttgcgtcctgccttgcgagcttccgtgatgtggtccttcgtgatgtttacaagacctgtagcggagctgtacgcctcccaacagccgcgtcttccgcaggtgcagggacgaccgcccttttcgataacggtgtgaccaagctcagcgcccgcgaagttgaatccggagtaaaccttgccgtcgatgatgatgccgccgcccagccccgtgccgagtgtgatcataacggaatacttagctcccttagcaacgcccgcgaaagcctcagccttagcagcagcgttagcgtcgttttcgatatacaccttcttgccgtcgaggagagcggagagcttagcggcgatggggtagtttctgaaggggatgttgttggagtattcgacgatacccgtgtcgctgttagccgtaccgggagtagcgattccggcataggcgatatcgtcgagggtaagaccgcattcggagacgagctttctgcaaagagcgcccatgtcttcgatgatggggtcgcagcctctttcgggtttagtgggggtactgcctttttttacgatttcgtaattttcgtttacgatacctacagcgatattagtgccgccgaggtccacgccgatatagtacatagtatttcctccgggaatatgtatttaagttaagtatattatacttaatgcgattaagaatgtcaatagaaagagcgcagctaatttctttaccttagacgacttgcgccttctaagagacttcactggatgaggtttcacttaagattcaagtgagggaatagaagaaagacttacgtctttcagattaattatatcgactgcggtcgaaggctgctcctacgcggagggcgcacagaggggttcagacgcctgtcccttgcacttactatgtaagtgcggagtaccggcttcacggtggagtatggcttagcaatttgcttccatctccgcacacttcaaccgattagtcgcgcggttatgcgtaagatgtattagtggagcataaaatgtgcgcgcggtgagttttggggcgcggttacgcataagccttagtagtggcattagcatgaccgcgtctgtttatttggtttagatttgataaaccgtttctgcaatcgctgacggaagcaaaacgaaatcggacgttcgctatatttcaacgcacagattagcgacctaccgcggttagcctaatccaattcacttatgatttggtattcaaccttccgcgcgaaagtgaaagcaatgatttagtaaaactacccgcgtctaactccaccgcgcgaacattctaatgccactactaaggcttatgcatgaccgcgcgactgattggttgattggggcgatgatgaagtatatcatatagtaagactccaccgcaagccggtactcgcagaggggtggcgtttgaacctctctgcgtgccctccgcacaggagcgtcccctcaccgcagtgagatttaattaatcagaaagggcaacgtcctttctacttccttcttttcgcgcttttcttgtagtgaagaacaagccccgccactgcgacaaactgcaccgctactatcgcgagagccgcaagcactatcggatttttgccgagccgcgcgaacacactctcgtcttcttcgggaagagcggcgacgcttccgcagaacctgcacacaagcacgccgtccttttcctcgtagctgtgtccggtcgcggggtatgagacagtgttgatcttgccgcagcgcgcacatttttccctcttgtagccgtcgctctcacagctcggtttcacttccatctgcgtctcgtattcgtgcccgagagggggaattgtctctttcacaaccgcgccgcactttttgcaggtttttatgctctctcccgccttctcgcaggttgaatcattcgtcacggtgtcaaagtcgtgctcgcatgaggagaggacgtctcttttttcttcaccgcagcggctgcacaccgagagaacatatccgtcggcggagtcggttgcttccactctctccttttcgacaaaattgtgaccgagagcgggagttttttcttcgtactcgtctccgcatatcttgcagcggtactttgtaattccttcgtttgtgcagtcgggggagctttcgcttatcttttcgtagtcgtgctcctctcccttgcgtacttctttaatctcgtctccgcatttcgtgcatttcttgtaaagcagtccatcgaagccgtgacctgccgctgagtcctcgagagttgcgtagtcgtgacccgttgcgggaagctcttccgtgtagctgtgcacctcgcagtcgtagcccttgtcgttcaggttatacgaaatctggcagacgcgctcgataaatccgtcctcggtgcaggtggcggctttgcttgacgagattctccagtagtgggcgttcgggtcgcggggaattgatacggttcctgttttcgctccgcagactttacatctgtaggacatagctccgtcgagggtgcagtttgcgggatggtcgaccagtctttcggcggagaaggagtgcgtgtgaccgaagtaatactccgcgagagcttctgcttcagccttggcgattttcttgaggttctcgtcgtcgtcgattatcttagcgtcctcggagttggagaggtagccgtgctcgacgataatggacggaacgccgaacttcgagcaccatgtgttgacggagtagtagtcgctcttcttgccgagggagctgtcaccgggcatatcccactgcttttcgctgttccagtagtaaatgccgagtgagtcgcctgtatcgtctcgggactcgattttgttatacgggatggagacagcggaagcgattttcgtgaggattttatccgcaagggtataagcggagaactcgtcgactaccgttatgtaggcctcacttccgcgcacgcctgtgtaatcgttgctgttgcagtggagggagaggaagaggtcggcgtttgcttcaagtgcgtagcgtgtgcgggggagaaactttagataagtatcgtcctcgcgcgtcatgattaccttgaatctgccgtcggcttcaagctcgcttttgaggtactgagcgatggcaaggttataggttttttcgtaacgcagacctgtgacagtacctccgtcgtacccgccatgtcccgcgtccaatacgacgacgattttatcgttctccacggcggagagggggacagcgaggaaagataggcagaggatgagggagagcaaaaaaatgagcttacgcatggcagtatgtgaaacctttgctttcaaatgttttttattgaaaaaatttatgtttttcctcacttcgagtgagggggatagaagaaaagacttacgtcttttcttctatcttctcacttaaatcttaagtgaaacttacctcagtggaagtctcttagaaggcgcacgtcgtctaaggtaaagaaatttgcttcgcgctttcttctttattatatcataccgaaaaatcggtgtaaacataaaatacgccaatttttcgcccacttcccctcgcttcgtgcggcaacattaaatatagtgcgaaaattaactaaatttgcccgaaattgtagacaaacgccgcggaatgtggtatcatgaaataaaaaaattaaggtgaacaaaatgaaatatatagtcctctataacccccacgctggcgacggctggaatgatgaaaaacgctctgcggctgaaaaatccatcggcggcgagtgcagcttctgcgacatgaccaaaaccgactacgcatccctctttggtaaaatgaccgacggcgagcgtcttgtcctcatcggcggagacggcactctcaaccgcttcatcaacgacacgaagaatctcaaactgcccgagcatattctctacctcgcaggcggcagcggaaacgacttcctccacgacatatgcggcagtcagaggagcgacaagcccatcgacgtggacaaatacataaaaaatctccccacagtgaccgtaaacggcaaagaagagctgttcctcaacggaatcggctacggaatcgacggatactgctgccgtgtgggcgacgagataaaggagaaggcgcagaagaagccgaactacactgcgattgcgataaagggactgctgttccacttcaagccgtcggacgctgtcgttacggttgacggagcgcgtagggagtacaagaaggtatggctcgcgcccacgatgaacggcaggtactacggcggcggaatgatcccgacccctgagcagaaccgtctcggagacggcactctgtcgcttctcgtatggcacggcaagggcaagctgaagacgctgtcggtattcccgagcatattcaagggagagcacgtgagccacggagagatgtgcgaggtactgagggggcgggagattgaggtggagttcagcgctcctaccgacctgcagattgacggcgagacggtgaagaacgttacgcattacgctgcgcggagctattggggagaaaaagcggatgctctttcaacatcctcgggtgctgctcttgcataagaagaaagagcgcagctaatttctttaccttagatgacatgcgccttctaagagacttccctctgtaagtttcacttaaacttcaagtgagaaggaagaagaaagagcttcgccctttcagattaattattccactccgccgaactagcgtagcttgttcagggcgcatcctttcggagggaacacagagaggttcagacgcctgccccttgcacttactatgtaagtgcggagttccgg

SEQ ID NO: 1121 - DNA, 9930 bp, Unknown
  16S sequences of unknown bacteria
ctgtgtatgggagctgctttcaaagccactgggagaccgggaagggagagcggtgatgatcaaagtcaggagaactgcctggacgtggaatttcaggactgcggttcacagcgcctgtattctcataacggaacgatgttatttttgtaatgatccagagatcgcgcaattatgggaaataggcagttgcatttatgcggctgctttccttgcagcattcttgcggaaattcaaaaaaagaagaggataaggaaatgaaaagaaaatcagtaatggcacttctgctgtctttgtctatgacgacagcaatgatgggatatggcggagcggttgcatccgcagagtctacggaggctacaacagaagcaacaacagaagcaacaacagaagctgcgacggaggcggctaccgaggcaggatcagaggcttccgatgatcaggcagctgcagataaggtagcagccctgatcgatgcgatctatgtacaggagcgcaccgatgacactgatgcacagtgtgaagaggcaaaggctgcatgggacgcactgaccgatgcacagaaggcacttgtagagggcgaggaggcaagcccggagtattttggccgtgataccggagatgcttctaaggatgatccgcgcaaccaggatgagatcggagaaaacgagctgcttgtagtcagcttcggtacttccttcaatgacagccgtgcagaggatatcaagggcatcgaggatgcactgcaggaagcttatccggactgggccgtaagaagagccttcaccgcacagattattatcaaccacgtacaggcaagagacggtgagaagatcgataacatgcagcaggcacttgaccgtgcagtcgcaaatggtgtcaagaatctggttgtacagccgacacatctgatgcatggtgcagagtatgacgagatggtagaggccattgatgcatacaaggacaagtttgagtccgtagcgatcgcagagccgatgctcggtgaagtaggcgaggatgcaaccgttattaatgatgataagaaggcagtagcagaagcaatcacaagccaggctgtttctgaggcaaactatgacagtgcagatgcagctgctgaggatggcaccgcatttgtattcatgggccatggtacttcccatacagcaaacgtgacctacgatcagatgcagacacagatggagaatctgggctacaagaacgtattcatcggtaccgttgagggtaagccggaagataccgcatgcgacgctgtcatcgacaaggtaaaggaagcaggctataagaaagtcatccttcgtccgctgatggtagtagcaggtgaccatgcgaacaacgatatggcaggcgatgatgaggattcctggaagactcagttcgtagagtccggcgcatttgacagcgtggattcccagatcgagggtcttggaagaatcgatgcagtagagcagctgtatgtagcgcatacacaggcagcgattgattctcttggaaagtaattaagtatcatcacatgcaatatgcgttaatatgaaagaaaaagaatagcagccgcccggagtgcgtacaggcctccgggctgttgctgtgtggaaggagattttattatgaaaaagaaaacagtaatgagccttctggctgtaatgagtgcttctatgatgctgatgtccgcaggtgcatttgcagcggagacggaagggacgacggaggcagcgaccgagatttccaccgaggcagagtcggaatccgaatcggaagcagaggagttggaggatggtgtatacagtgcagagttcgataccgacagcggtatgttccatgcaaacgaggcatgtgacggaaaaggtacactgactgtaaaggacggaaaaatgacattccatgtcagccttgcatctaaaaatattttaaatctttttgtgggaaccgcagaggatgcacagaaggatgatgcagaactgcttgagccgacgactgatacagtgacctacaaggatggtgcgacagaagaagtctatggttttgacatcccggtagaagaagtcggcaaagagtttgaccttgccctgatcggtacaaagggaaaatggtacgaccacaaggtcagcatcaagaaccctgagaagctcgacgaggcagagagtgagtcggagagcgagtcagagactgctacggaagtggagtctgaaacaaagtaatcgcataaataattcttgactttaagctgatacagcgctatagtatacgacagtgacagcaataacgaggtgaagtttacaggaaagcggcaaatgcccgccgaaggagtaaaactctcaggtccccacagccgggggaaaactgtaaatggatcgttctctggagacacctgcaatgcaggggccgaaggtgcaacgacgcatatgcgtctggaatctctcaggcaaaaggacagagtgatgctttttttacatagtagtatttttgcgcatgtaaaagtaagagttacgcttctttttggaacggtcagccacaggtttgctgcataagttctcaagaaggagcgtttttattatgtggaaggtaattaatgagtttctggtttccgtggatgattttgtgtggggcatcccgctgatggtgctgatcctggccggcggtattttactgacgacaaggctcggtcttttgcagatgcgtcgcctcccactggcactgaagtggatgttcaaaaatgaggaagaaggagacggagagatctccagctttgcagcactttgtaccgctttaagtgcgacaatcggtaccggaaatatcgtcggtgtcgctaccgcagtctgtgcaggcggaccgggtgcgctgttttggatgctggtagcagcctttttcggaatggcgacgaagtacgcggagggacttctggcggtcaaataccgcgttgtggcggaggacggacacagccttggcggacctttttactacatagaaaaaggtatgggatccaactggaaatggctggcgaagatttttgcatttttcggtgtctgcgtcggactgttcggaatcggtacgttcagtcaggtaaacggtatttccagtgcggtgcagaatttctttgatccggacaaggcaaactgcattgcgatcccgttccttggctcatattcctgggcggttgtgatttcttccttgattctgtccctttgtgttgcgctgatcctgatcggaggactgaagcgaatcgcgacggtcagccagatcattgtaccgtttatggcagtcatttatttcgtgttcagcatctgcctgatcctgtttaatattcgggagattccggcagcggttgtaatggtcgtaaagggtgcgtttaacccggaggctgtgaccggtggtgtggtcggcagcatgattgttgcgatgcagaagggtattgcgcgtggtattttctccaacgaggcaggccttggaagtgctccgattgcggcagcagcggcacagagcaaggagccggtgcgtcagggacttgtgagcatgaccggtacatttattgatacgattgtcatctgtactctgaccggactttccatcgtgctgaccggcgcatggcaggtagagggactcgagggtgtgcaggtcacgacctatgcatttcagaacggtcttccgatcccggcacaggtatcggcatttgtcctgatgatctgtctcgtgttctttgcatttacgacgatcctcggctgggattactacagtgagcgttgtctggagtacctgaccggtggccataaaaaaacgattctgacctatcgctggctgtatatctttgcagtattcatcggaccgtacatgaccgtaaaagcagtatggaccatcgcggatatctttaacggtctgatggcgatcccgaatatgatcgcgctgtttgtattgagcggtgtggtagtgagggagacacgcagctttttccaggaaagcataagatgtaaagaaaatttcacatattgtataattcagataatatctgcataaagaaattcgggaatctgcacgaatccacttgacattttaaaggacactgctatactcaagaaagagcttttcagtgcccatcgaagcatcgatgagataatagggaatcaggtgaaagtcctgaacgatccggtcactgtaagcagggagtgagaccccacagccattgcacagtcctgtgcgagaaggcgggtcaggcgatgatctgcgagtcaggaaatctgctggagagctggtgaacagcttccgaagaaagcagagatccgcagccgattgatgaccgtatgaaagatgtagtgtaccgaagtcaatacatagaactgtagcagggtttgcttctccagaaggggaagcagatcctgcttttacgttgcaggaaatgaaaaagatttttgtatcataattacattaaagaggtgcatccggcagaatcagaatgcaagtacaggaatgatgttcggactcatagatgtcacttgtcgggaatgatacggaaagtgacaccgaatctggcggacagaaaatgttccgccatagtggttcgaaaggaaggacaggtagtatgaacaaacggggaagaaagtttctctctgtttcgctggcggcaatgatgacgttgaatatgcttccggctggaacaatttacgcacatgcagaagagacagaactgacattgtctgcgaaagatgaggggcttcaaagtggagatatagagccggaaagtgaatcccaatatgaatcggattcaagcggttcgaccggagcagtaaataacagcacgggactggcagacggagtttaccccccggacagcttctccttcagcggaggcagcggacgtatcagcatcagctgtacgaagatcacggtgacaggcggaaaagcactggcgacgattgtgttcaacagcagctactatggttatgtaaaggcgaatggaaataagtatttcccgacccacagtggtaacacttcgatcttcacgattccggtcaacctgaatgcaaatacgacgatcatcggtatgacgacccgtatgagcgcggcgcatgagatcacctacaccatttatgtcggactgaatgcggcaaagaatacagatggcaaggggactgaagcaggcaatgagtccggtaataagaagctggatgagcaggcgccggatatcagcggcctgacctatcagtctgagacgaagctggactatgcaaagtactttaagctgtatcattacgatcaggatattacgttgcttgaggtcgatatgacacaggcagaaaaggcagcagacggaacaaaggctgtgtatgcggagtccgaatcagaaacggagacggaagcagcgactgcgacagcagcggcggcagcgatggaagatggcgaggcagtcgtacagacgcagggtgagaaggtatcagagctgtatcaggcagatgtcgtgaagtatctgatcattccggcggattcaacggcggagcttccggcaggtattgagaaggaaatgattctcgtgcatcagccgatcgagtcagcatatgtatcgggtgataccgcgcttgcgacgctggatgagcttggacttctggatgcagtgaagacagttggcgtcgagcaggatacgacgacggtagaggctgtaaagagtggtcttgcagacggcagcatgacgtatgccggtggtgcggatgacctgcagtatcgggagttggtaaagagcaaatgcgattttgcagtgcttccggcagatatcctttccggtgatgagatggctgatacagatgtaaagagtaagctgagcgatgcggcagacagctttgcgaccctggatgtaccgatgctggtagaccgttctgcggatgaggaggccgagcttggcaaacgcgagtggatcaaggtctacggcgcactgttcggatgcaccgagcagaccgacagtctgtttcagaaggcggtagacgcagcaaagtagaatctgcagtggaagagaaaacctggcaggatcgtgttacggctctgtcagattttcgatatcggaaaggagcagctatgaaaagaaaacagatgtacaaacggattgccgcggtgtttgtgagtgcggcgatgctgatgggaagcatgagcatggcgtatgcggaggagccggcgacggaggcagcaactgagacagaggttatttcatcagaggagacctcagaggggcagacagaagaaaatgcagcttcctctgatgcagatacctcttggatgacggcggcagaggatgcgccggatgtcgcggggttggagtgtaccggtaagctgaagcttgactatgcgaccggttttgacgtatattattatgaaaatgattatgcactgatcgatgtccatgacagtgcacagtatctgctcgttccggacgggcaggaggcaccggacggtctggcatcggatgtgatcgtgctgcagaagccgctgaacaggatttatctggcggcaagctctgcgatggcactcttccgggcgctggattcgctggactgtatcaagatgaccggtatcgacgcttccggatggtacatccaggaggcaaaggatgcgatcgaggaaggcgcgatgcagtttgcgggaaaatacagcgagccggactatgagatgctcgtcgatgaggactgtgatgtggcaattgaatcgacgatgattcttcatacaccgaaggtgcaggaaatgatcgagaatctcggcattccggtatttatcgaccgttccagctacgagatgcatccgcttggccgtaccgagtgggtcaagctctacggtgcaatgatgggaaaggaagcagaggctgcggacttttttgacaggcaggcagaggtcattgatgagatggaggattttcagaataccgagaaaacggtagcattctttttcgtgagtacggatggaacgatcgtcgtgcggagaacggaagactacatcccgagcatgatcgagctggcaggcggccggtatgtatttcaggatctgaccggggcagaggcgacgagctcttcggtatccctgagtatggaagaattttatgcggctgcaaaggatgcggactaccttgtatacaatgcgacgatcgacaatccgatctcgagtgtggatgaattgctcgcgaaaaatgagctgttcgcagattttaaagcagtaaaggaaggaaatgtttggtgcgtgggcaaatatatgtatcaggcgacggatattgtcggacagctgatccgggatttccatctgatgctgaccgatggagatccgtcacagatgaccttcctgacaaaggtaagtgattagggcttaatgcaatacagaaggaggaaggacagccgttgatcggcggagcagaacagggcaggagtgatccggccctgtttcgtctcaaaaatacaacgctggtatggctgagaaaggaactatgaaaatgcaaaaaacaacagaagtggccggtatggattttcaccatgaaaattttctgcgcaggagtcgctacgcaaccgtgtttttcgtgctgctgattgcgtttggtgcgatcacggtgttgaatattaataccggaaatgtgcatatttccgtggaaaacatcctgaaaattatttttctgagacagggagaggagatggagtacaatattatttggaaaatccgtctgccgagaattctgatggcggcgattctgggcggtggactgtctctgtccggctttctgctgcagacattctttgaaaatccgatcgcaggaccatttgtgctcggtatctcctccggtgccaagatgatcgtagcacttgcgatgatctattttatcggccactatcaggtggtgtcgtcgtatacactgattattgcagcatttatcgggtcactgatcgcgacgggctttatcctgctcgtgtcacgccgggtgcagcatatggcgacgcttcttgtagccggtatcatgatcggctatatctgttctgcggtgacagattttgtcgtgacatttgcagaggattcggatatcgtaaatctgcacggctggtcgcagggcagcttctccggtatgagctggagcaatgtacaggtggcggccattgtagtcgggatcgcggcgctgcttgcgtttctgatgtcgaagccgatcggggcatatcagcttggtgaggcatatgcgcagagtatgggcgtcaatatcaaagcatttcgggtgatcctgattttgctttccagcattttgtctgcctgtgtgacggcgtttgcgggaccgatttcctttgtcggaattgcggtaccgtatctggtgaagcgtgggctgcatacatcccgtccgcttgtcgtcattccggggacatttctcggaggggcggtattctgtatgttctgtgatctgatcgcgaggatggcctttgcgccgaccgagctgaacatcagtaccgtgacgtctgtattcggtgcgccgatcgtcatatttatgatgctgcgcagaaagagagggaactgaagatggaatcgtattattttcagatggatgagctgtcggtcggttacaacggcaaacctttgatcgagcatatcaatatcggggtgaaaaagggtgagatcgtgacactgatcggtccgaacggctccggaaaatcgacgatattgaaaagcattacgaggcagctgcggctgctcggcggacgggtcagctttgatgagcagaatatccaccagatgtcgtacagagaaatgtccacgaaaatggcggttgtcctcacggaacggatgcgtccggagctgatgacctgtcatgacatcgtggcgaccggccggtatccgtataccggaaggctcggtatcctctcgcgtgaggatgagaaaaaggtcgaggaggcgatgtgtgccgttcatgccagggagcttggcagccgggatttcaatgcgatcagtgacggacaacggcagcgggtgcttctggcacgtgcgatctgccaggagccggaggtcatcgtgctggatgaaccgacctcctttctggatgtcaaacacaagctggagctgctagcgatcctgcggcggatggcgaaggaaaagcagatcactgtcattatgtctttgcatgagatcgatctggccgaaaagatcgcggataagatcatctgtgtccggggcgatcaccgattttattgcgggacaccggaggaaatctttcaggaagagcggatccgggagctctatgagatcgacaatggatttttcgatccgtgttttggcagcattgagctgccgcgtccggaaggattgccggaggtgtttgttatctctgcatgtggcagcggaatcccggtttaccgcaggctgcagaaggagaatacaccatttgctgccgggattttatacacgaatgacattgactatcagcttgcgcggctgctttcgtgcgaggtgattaccgagcggccgtttgaaacgatccgagaagagacgctggagcaggcgaagcagtgtatggaaaaatgcgggaaagtgctgctttgcgatattccgatcggggagagcaaccggaggatcgaggagctgatccatgcggcaggtgagaagctggtgagagtataacaatagacagaatattcaatgaacttgcggatagtgcttgcgtctgatccgaatcaaagctataataaaacgatgcattaaattttatgataccagggtcaaaaggttatgcgtttcatgcttgcatgaaaaagcatgacttattgatccgtgtatcataattttattatagaagcaaaggatcggagcacacgtctctatgattacacgggataatattattcatttttacgaaaagtataaacgaaatctgaaaatagaggagcaggctatcagtaaagtcctcgatgcagaagatcaggaagcgtg

SEQ ID NO: 1122 - DNA, 10846 bp, Unknown
  16S sequences of unknown bacteria
cttcccggttaccccgttcctcacggcgcttgtctatattaccaagacggccaaacaaagtcaagcataaattttcaaaaatttataattttttcaaaatatggataacttgcctgttatccatgggttatccacacaaaaacgatgctttttgtttgtttctatggataacttcgtccaagagaaaaaggaaagctcccattcgggagctttggacttattcctcaaccacgacaaacgcttccgggcctgcgccacaaagctcgcattcaaaatctgcgggcagttcggtttggccctccggcaattcgtatacccaatcacagacggtgcatctcattttcataacagtctcctccttctatttactaggaactactcctattatagtgctttccatacgaggtgcaagctttttaggttgttttttcaaatttttctccgcaatttttacaggtaaccaagatcttgccctttcccttgggggcacgcatttcttgattgcatttgggacaatgaaaataaacgtgctctgtatcgtttttctgctggcgtttcttttccttttgcgctttttttgcttcttttgccttggcacgctgcgcttttgcttcggatttattttctttgcccagatggctctcgccggggcggcttgcgtactgcggtttcactgtacgtaccttttgcgccttttttgcctgggaacgcatcttcatacgatcccaaaaaccgcgaaagcgatcgttttcacgattccgtgcgttggggtctgtggaaaagcagcgcaccaacgcaatggcaatacagccgccggccagcagcagtgtgaaggtggagcgcaggaaaaacagaaccaacgcgatgcataaaagaaaaatattcaaagaatcaaaccataacttgcgtctcaatcgggacttctccttcctctatgcaccacatcgtacagcgaaccaaagggccttgtcaattctttccagcataacatgtaagaaagtcaaaattaggatgccccattgccataattgtataccatcgctattcaaaaagagtcatggtctgtccgcgttggtgtacggggaagaaatggtgatgtgcatagggggcaaacgcatttgccttggcatagtgttcgccaaaatgcatcgggataaaatgatccacctcgatggcgtcgataaattgctgtgcgccgcgcatataatctttacccaagcggggatcgacggggaacatagcggcatcaaaatgtggataagcagcggcaagcagggaaagctcctgcaaaaaggccttctcgtacccaacggcttcttcgcaggacacctcttcgttccaatgccaattgttgagatctccggcatgaaacagcttctttttctctatgcacatggcaaaggagatgcctatatccgtagatccgaatgcggcggcatgcaggcattcatcgctgtaggtgtgcccgggctttagataaatggcatcctgagagcgtgccaaaccggattctagaatatcctgggaaaatagatagacaatatccggacgcctttcccgccaggagaggatgatggggttgaaatggtcggcatgtccgtgggtacacagcacataaaaccggccagggcgggataaaagatcctcatccacaacaccatgagacaaacagcgattcccaatacaggaatcgctgtaataatccacaacaatggttgccttttccagcaaaagggcaaatccactatgcgccaggtacacgatcttaagcaacaatgtcaccgccatagctaatgatggaggcatcatagacgccgggaatttccaaaaagcgctcgacaacttgcagatcggactcgcgcagacgaatttccaaggtcatctctacgccggcagagcccaccgttttgctttttaactggctctcgggcaggcgtttgagcagaccatagacattgttggtggcgttttcattgaaacgaagcaccaaaagataaggcatcgtgctgcggaaccgcatcccggaaagcagcagcatcaatacgccgatgacagcggaggccaagatcgcgggcaggaagaactttgcgcccaatgcgatgcccacggcaatggaccagaacatatatacggtgtcgatagggtccttgacagcggtacggaaacgcacgatggacaaagcaccgaccataccaagggacaatgtcaggttgctggtgattggcaaaatgataaaggaagtgatcatcgccagcatgaccaacgaaaccccgaaattcttggagtacataacgccgctgaaggttttgcgatagatggcaaagatatacatgccgatcaaaaaggcaagccccagtgttagcaaaatgcgcactacgctaaggtcgccgaaggaaaaggcgttttgcagcccggcaaccaggttactgaaaaaatctcccataatgtcctcccttatgctctaaaggtcatattttctgcaaatggcatatttgctaattgcactgcgcgtggcttctatgccatcaaaggcccggcggatataaccaggcagaaactcgttgaatttgatttccagaaccatgatccccttttccaacatggggacggtaaacatctgtttatcaaatatatcgaaactttggcctgcgcacaggcctttatcaaatgtgatacgtacatcttcaatgggatgtacataggcttcccgcacataatctacaaccttaacagggtgtagtcccttgtttttcatggaaaaatacacagctccggcaggcagcttgtccttttgcagcaaaaacgaacactcgccctccatcaaaagctcaaactctttacgggtcaaactgcagctatgctttaggatatattgatcttttttgattttacgctccagacggatgacgctgtcttccatgttataaatgcgcacccgaaacttttcacggctgtcctcgccggcaattttggtgacaaggttgctatcctcccggtcgtcaaaatacagggaacggatgtgataatcgcctgtttcctcccgtgcattttcatccagagacaggagggcggacagccgatggcgcagcacataatacgttgcagtattgatgtaaaatttgagctcatggcgaaatttaccggccaaattctgtgcctcctcttctcaacttcctgtgctgggcggctgcgtgccgacgctgccaaagcggcgcatcatctcgtcatccgacaggccgaaatactgcttgacatggtataggcagtattcattgcgcactttggcaaagttttccatctttgcaatctggctgttacgccacgattccgctgtgccgttatcccagcgctcgcggtcgcggccgatctcatcctcaatcatcccggcgcactcgtcgattttggccagaacgcggtcggtggcaaaggtgttttccatatggtaggcaaaccgagttaggaaaagctccttaaattcattgtttttcagcagggtgcgcaaaaggacggtagagatgccgttgcccacgcccatgccttcagggttggtcagccttgccatcgcatcctgctccggattatacatgccccagcagaaatcgtacaagatccagcgccatttgccgtccggcgttttctcgcgccagtatttgatgttgccaaggtcggtattgttggaccagatctcggcaatgcaccaatcggcaaagttttccacatccacccagtctgtgatggtcttgtacacctccgggtcgttgatgttggcctcgttgctggtaacataatcgatcatctgattatagttgtccgtgctgcccaccaacgccgtagcatcgcctacgataaggtcgatattttctggattgctcaggttatgatgctgtgccagcatgtatttgttgatcttttcccgaatgttatagatgccccaatactggccattaatatacacgacgctttgcttgtaggccgccacatccaacgtggtagtctcgcgtaccaagtcggtaattacaatatcacgaatcttgctctgtgtacagtcttgggcgccggcgcgcagcgtgatggatttataggaggtatacggccgtgtatcaaagaagggatagtcgatggtggcggagccgtagcgctctctggcacgaatggaaaagcccttttgatccttaaaccgggagaacgcgccaaagatgcggatgcctgcatccaaagatacgccctgctttccgctttcatcaaaatactcaaagtggacttctcgctcccagtccttttggaagttggcatttttgtattcgatatcgcccactttttggccattgcccacgacatagataccgtaatcatggtcaaacaggttcggaggatcggtaatcagcgaaaccacgggcagcgtatgaggaatatcgatcaaaaacgttttggagtccgtcttgctgcccaaaagcccttccttgaaagcgcgcgcgcgcaccgcggtggttttttctacggtgattggcccggtatatacggggctggattccgtagggatagagccgtcggtggtgtaatgaatggtggtgtccgcatcaccggcctccatagtcacctgttgcgcgccgcggtaggagcctgcctccgtagtaatggtaggctttacggcaaacccgatggcgccgccggcattggcggtagacggtgtgggtgtttgaaaataaaaaaatccatcggagccactttggcggccaacggacatattggtaggcacatcgcttacatagacccgatccactagctcttcgctgctattgaacagcccgatgacctcgcccgcgccggaaatgcggaaattggtatgcatattgccaagattcgtcaacccagaacagtacaccagcgtatattgcccgggcgcaagcgtaatatcgggaaacttccacttcagcggcttttccgtatcgtccgttaatccccagcccttgagtgaaacggcttcggagccgttgttgtagacctccacccaatcataatacgcaccgccggtgggtgcgtatttatcgttatacggcatggcctcgctgatgatcacgctgctggtcggctttccgtttgcttcgacaaacttttggaagccctctgccgtattggcatagcctggagagggattggcagaggtggtccattcgtaattgtcggaaggatcgcgaaggtagacggtatcgctcttcatttccggcacctcgacggaatcgaggatctggcctgctttgttggcgagagaaacctctaccttataactgctgagcctaaaattggtgtgcaggtaattgttgctgccatctttggaataggctttgccagagcagtatacgaccacatagccgtgtgcggggatcttaaccccctctgggaaacgccatttcatggttttgttcggcttattggaaagcccatagccagacagatcgatttcgctgtcgctggtgttttcaatctctacatagtcggaataggcgccgtaatcatcggtcagcgttgtgacgttggcgctcataacctcgctgatgcgcagcggggaggagtctaccttgcggctggccagaaactgctcatatccttcatcggtattggcatagccgggcgtcaccttttcaaagctggtccattggctgttatccttgggatctcggcccatcgacgtatcggacggcatttgggaaaacgtcgtataatctacaattacgccgagattattggtgagaacaacgtcctcgcccgaagaggagagaccaaaattggcatgcagcggctggtcggtctcacgcttgtcctgcttatcacagtatacaatgacatacccgccggccgggatgctgatatccgggaaggtccactttgcctgctccagtttgctatcagacagcccccaaccggaaagcgatacatccgtggtgccgggattatacagctcaatccagtcggaatagttgccctcctcatcggttacggcctgcttgttgccggccatcacctcgttgataagaatggtttcagaggttgccggcttgtccttattcaccaaataagaaacaaatgcaatggcaaccaacaatatgatgacaatcagcaaagcccgaatgagctttttgcgattggctttggggtttactcttcttcttgtagccaaaacatacctccgcagttcttttggactttgtttattatacgcatcaagatttccaaaagtcaatcatctgccgcaatctcaatgctttcgccggtacggagcagcaccagcagcgcctgcttgacaggccgccccgtcaaatgcgaaagggcaagacggtaagcatatagctgcccctggtatcgcgggataagcgcctgcggcccttcgggcgggatgcgatccgtcttgtaatccaccagtacccagccgtccttttcttcaaaagccagatccaaaatgccctgcaaaagcgtcgtttcatccgacgggtatgccggcgagatgatatgggcgggcacccgcacgacaaatggctgttcccgcaatacctgacgggcggataggatacggccggccagcgcggagttggcaaaccgtacgatgagagaaagatccaacgcatcggcctgggcttgggtaagggcaccttgggtaagccaggtgtggacctgtgcctgtaccccttccagggttttggcttgggccaaatcgatcttttgcatggcggtatgcatataggtgccgcgctgcgccgcgtcgggcgcgcgatccgatacggaatcccaggcaggccaggatagggtgggcgcctgcgcttggctggatagatccgctaactgggaagcggcgaccttggcgggcgccgtggcagcacggaagggatattggtaatgcagggcggccaatgcgtcggcataccgcgggtctgatacgtcgaccccttctacaaatcgttgccaattgcctttggattgatacacgcgctctgtttctggctgcacggtatgaaaggagatctgccaagcgccgggcgcctcctgggcaggcaaaggaagggagaatcgatcccgcagcgcggcgccatcaggatgcagggccacggagggtaaaacccattccagcatgctttttgcgtgtgctggcggcttctcacaggccgcggcaagctgctgtgcgctcccctggcctaagaggatcagtgattcctttgcgcgcgtcatcgctacgtagcaaagccgcatccgctccgccgtttccgcccgttgcttttccgcctggcaaagcgtatagcaaagggtctgctgcttactcagggatcgctgatgaaaatgccagagcccaatgccgtatgttttggagagcggcaaagaggtatcatgagcgcgcgccagaccctgctccaaaaatggaaggatcacggcggggaattccagccctttgctggtatgcatggtcatcacgcgcacaaagtcgccgccagtgggcagggcgggcggttccttgccgcctaagcgggtggtggtatccagcatctgtaaaaacccatacaacgacccatcgccggactgcgcgtagccctgggcccgctgccatagggctatgaggttttccgttttcttagccccatccggttgtacgccataataggccagggcgttgcagtcgtcatagatatagagcaaaagtgcatctacgctgtggcggtgcgcatattgccgatatcgctcgatgcgctcgaaaaaacggcgcagctggtctgcggtggcgcctttgccatgcgcggagaaatggcgggccgcctggaaaaattcacaccgatccgaaagcgtgcccatccgctgctgttccttttgatacaggcggatgtgcgctaggtccgccgcggtgcattggcctacggggctgcgcaacgctgttacgaaatcaatgtcgtcctgtaagctgtccactacgcgcaaaacctggatcaaagcgccgcattcctgtgtggtcaaaatttccgcagaagcgtccgagaccgcttcgatgccctcttccagcagggtctgtaaaaagagcgaaacatgggtgcgcgcctgtaccaacaccacaatgtccgaaagggtatagggacgctctacgcctttatccaaaaaggtttggcccaacaagcgccggatctcctgggctgccacccgcgcttgggctatgctgcgggcttccagcgccagtgcctctgcttccggcagctcttcgccacccgctttgttttccttgataagcagatgcacgctgatcggcggcccttgctccttgcggccgggtacaagcgcttggctgtcgtcataggcaacatccgaaaccggtggctgcatgcagcgttgcatcacccaatttaccccatgtaaaacattggcgcaggagcggtagttttccttgaggtcgatgcgcacctgctctgcgtcgtcctccgggctgtattggtgataacgtgccaaaaacaaagaagggtcggtatggcggaaatgatagatgctctgctttacgtcgccaacccggaaagaggtcttagggcgggcaatgagagataggatggcgtcctgcaattcgttggtatcctgcacttcgtcgatgaatacggcatcatagagtgcgcttgtttcccgctgtgcctgcggatggcgtaggatgcgcagcgctgcttgggagacatcggaaaaatcccaggcatttgcctgctttttggcctcggtataggcatgctcaaaggcggacagcagtttacacagcccgtcgaacacaggcacgcagtcgtgcgccattttgcaaaagccggagagaccaagacgataagctgtgtgtttttgcagctgcaatatgctttttttgatgcgcttatgcagcgtatcaaactgctcattgtcctcggcggataggctctttttaatgcgagcatcctttttcagggccagctgctttagcattgcagccgattccggcccgggcgccagcttgcccagctggccgagcagggcgaagttttcctgccagacaaacagaatctcttccttttttttatgctggcatcctgtctccaatatgtggatgagctgctccacatctgccgatgcatgggacagctcttccaaaatcggtgtgcaataggcagaaaaatccgattgtatcacgttgtcatcggcataatgagcgcgtgctttttccagccatgcttgcccatccggcagggtctgcttatattcgtgtatttggagaataatctgctttacttcctcttccttgccataggaaagcgccttgagtgtatgcaaaaacgcatcccgttccttacccggcggcaaggagaaaaaatcgttgaatacatcctccagcgctgtggcgcgcagcaccaggccggtagcctcatccagcaggccaaacaagggatccaggtctaccaaataaaagtagcgccgcgccagctggatacaaaatgagtcaatggtgcagatatccgcgctgtgcaccaacagcgcctggctgcgaagatggcgcgccgtctcgggtgcgcagtgatccgccctgtccaacaattccttggcaagccgctgtttcatttccgcggctgcggcattggtaaaggtggtcatgagcagcttttgtatcggcatacccgcctcgatcaggcgtacggctctatccaccatcacggcggttttcccagagccagcggcggcggacacgataagatcgcggggcgtctgtatatccagcgctcttttttgcgcagcgttaggcgtttggatcatggctgtcctcctccttggaaagggataccttccgtacggtgcggtgcggcgtaacgccggatagatagccgcaggcattggcaaaggcacagtattggcacccatcgacagcgcccttgagtggatagggagcggtatgcccctggcttagcgtttcaaacagcgaagcggtgacggcaagcgaatcggagagcacctgggccatttgctcgtctgttagtaggcggccggcactttgcgtggaaagcgcacgatcttccacgccatgcgcagtatagtatcctttgagcttttgtgcggataaatcctcctcagcgtgctgtggatcgtcttcctggacgctggcacgcacagcgctgagcgccatggcgctgggcgccgcctgctttttttgggcggccatttgcaaatacagcggaagctgcaagctggtgccgcaggcaaagcgcgtaaggtctgcctgggatacgctgccggatttatagtcgactacgcggacgtaagaagtcccgccttcgcgctttaggtcgatgcggtctatcacgccgttggcaatgccctctgcaccatttgtcagcgggacgcggatgcggcagggcacctcggtatcctgcggcacaaactgcccgctttgcttttggcggcatagcatccaagctgctttgtacagagaatcgcgctgtttttccgcctgcaggctggctctggcatcttgggcatacggaccggagaggtattcgcgcgcttcgtaggcttggcaaagcttgtccacagcagaccggcattgttcgcgggtcaaggtgcggtcgcgatacagcagcagaaaatgctgcagcacggcatgataatagttgccctcatcaatcggcgttttcccaaactcgtctgcgggtgctaggtgaaggccacgctccataaagtgccggaagggacagcgggccaaggtttccagcccggtaatgggcgtggtatatgcgcccttttcatccgcgtacagagcgtgggctagggcagggccaatcctgtctcttatacacatctccgagcccacgagactaaggcg

SEQ ID NO: 1123 - DNA, 1570 bp, Unknown
  16S sequences of unknown bacteria
atatctattgtaccatactttgggagtttacacaatatattttacatgattaacgtgaacctcagtgcgcacttccagagcgtagagttcgcgcggatatgcagcatcttctaccgccgtccgccgggattctcgcatgtgatacgcgcggacagcccgtattttgagaacatcggcttctacatggacagagtggcgtcctgcgcgtcgggcggcgacatcctgcgcgacgaggctatcgtcacaaatcttcgggcgctggtcatcgagatcacgcggcactacgcgaagctgctgacacctgacgcgttcctgtatgacagtggaatcgagcgcgacaccgaggtgctgaccgaggcgatttcgttcgtccgagagcattacaccgagaatatttcggaagcgatggtcgcgcagaagctgtttgtcagcgtctcgacgctctctcggatcttcaacggctgcaccggaatcagtttccgcgcgtatctgcggcagctgcgtctcgacaagacgctcgcgctgatcaactccgatccatcggtaacggcgctcgacgcggcgctgtcctgcgggttcaacagcgcttcggggttttacaaagcgctcggcgatgtctgcgggaagggcggagtacggagtcttcggcatggcaaggatcggaactgagatcagcggctgtccgggggattttggtaattgagcactgacagcatggaaaggctggcgtttatcgtcagccttttttttgcaggcgggaactccgttcccggcgaaccgcggcgacggctatgccgcgccgcgtgcaggctgacgcccctgccctacctcacctcaaggtgaatacttcggcgtcgtgtcgaacgacaccgtctcaagctcggtctgccgccgcgccgacggattcttcccgaaccgcgccgtgtaggcacgccagaacgccgagtaatccgaaaatccgcaccttacgcagacctcggtcggtcgcccgccagccaatatctcgcgttgtgccatcgccagccgcttcgacgtgatgaacctcttcggacttatcccgagatgctcgcggaaaagatggtgcaaatggctctttgttatgtagagctcgccacagagctcgtcgatcccggacagagtcgtcagatgctcctcaatgtaggcgaccgccgccgcgaccacctcgttcgcctgaccgaccggcgcgacgttctcacccgcctcaatcgccgcgtttatcagaatctcctcgacaatgtgcgagagcatccgcccgcgctcgatcccacaaagcctcgcgtaataaaaatccagcttgtcaaaaagccccgcgaccgacgacctcccctcgaaattcagcacgtcaagctgatcggggagcttttttaatatgtcatacggcagcgacgacagatcgaacagaatatcataccgctcatacggctctgaaccgtcgacaactatcgaatgcaccgcgaacggacgcgagatcaccagcgtgttcctcgagagccggtagaccctgccgtcgaccgaatacaagatgtttccggtcttgaagaatatcagc

SEQ ID NO: 1124 - DNA, 6455 bp, Unknown
  16S sequences of unknown bacteria
aattgaaaaaaatctgctgaagctggacattctcggtcacgacgtgccgtccatgatccgtatgcttcaggatatgaccggtatatcgccggaagatatccctctgcgggacgagaaggtcaaccggatttttctcggagtagacacgctggacatcaagatcgacgattataaacagcgtcacggtactttcgggattcccgagttcggcaccagttttacgcggcagatgctggacgatacacagccgaaaaaatttgccgatctggtgcggatcgcgggcttttctcacggtacggacgtgtggctcaacaacgcgcaggaattcatccgcagcggtcaggccaccatggatgatgctatcgccactcgtgacgacatcatgaactatctgatttccaaaggcgtgccgaaacaggattcctttaccatcatggaacgggtgagaaaggggaagagcatcacggaggaacaggaggcgctgatgatggagaacagcgtgccggactggtatatcgagtcctgcaagcgcatcaaatacatgttcccgaaagctcatgcggtggcttacgtgatgatgtcttaccggatcgcttattttaaagtctattatccggcggccttttatgcggtgcattatacgatcaaagtggacttttttaacgcaaaggtcaatctggccggtatggaatccgtgctggaccgcatggatcagattcgaaagatgggagatgaagccacgaataaagaaaaagatgaatatctcgtctacgaagtggtttatgagatgtacgccagaggaattgaattccttccggcagaactgggaaaatctcaggcggtccggtttgcggtggaggatggaaaaatccgaattccgttccgcgctctggagggtatgggcgaaacggcggctctgagtctggagcgggaatacgcgaaacagccgttcagttccatcgaagatatgagcagccggacgtcggtgaattccagcaatatcgagacactcagagagcacggtgtgctgaacggcatgtcggagtccgatcagctcacattattttcgatgttttagccgtcggcggatgacgtcgggagcggcataaaataatcggaaaagaaaaccggcgcaccggagtcagtgtctgactccggtgcgccggttttctttttttgaatctgttttttaccgacagccgtgttgtctgtgtccggcacaggcagagcggatcgttgggatcgtcttattttcataaaatttttggtttcgcggccaagctgccggaggatatcgcggctgcgccccttccccgggaaatgaaaatcgttcgaatgcgggaaaagtcccgcttccctctgagaacgaatgttatcggcgctgtattaaatagaaatgatatgaaaatacactgcattcagttataataaaaaataagatataaaataaactaattcaaattgattgcatgaaaaataaattgaaatagatggaaaattataatatattattatctgtatttcaaattgaaacaaggctctgacaggttcgcctgatcggagtgcagacgatttcagcatagcgccggagttttttctgattttctatgagaagcgcagtcttttgcggaaaaactggaaatcatctctgccggcggcagggacaggggacgccggcgcgataaggcattccgaacagatggccactgcgatggaggccagagctttccgggcgatgccgcggcgtacgagtatgcggaagctgaaaatgaaaaacagagactggatctgtctcggcatttttctttttctgatgattttgccggcggcgctgtcgtttgcactgtaaacatgcggtccgaaaaaggataaaacagaggtgatatattgaagattctgcttactggagaagtacaggtcgggaaaagtacgataatacgcaaagtgacagaaaggcatccggattggaagatcggcggttttgtcacggtaaaggcgccgaagggagcgcagataccgcaaaactggccggaagggcaggaatttctacctgacgccgtctatatctgcagagccggaaaaccgctgttttcttcggaattcggcgtggtgggagactgcggtgagttcgggtttccgaaaggttttccggaggtgtttgaccgcgtgggaaagagactggccgaagatacatcgggctgtcatctgatgctgatggatgaactgggatttatggaaaatgaggcggaactctttcaggaggctgtgatcgaaacgctgaagagcggcgttcccgttttgggggtggtaaaaaagaagagttctccttttctcgaccgcgtaagggctcttgccggagtgcggatcatcgaggtgacggaagaaaaccgggactctcttgcggctgcggtggagcgggagatctccggcgcggtggaggatttccggcgggaaagcttctgatacaattaagatgtgtaaatcttgacgaaataggaaaagtatagtatagtattaaaagcttaaaacaacacgacgttattgcagagagtggggtgatccccactctctgtgcattgtaggggaaaatccgacgatgcggtgcggcgtgatgcattgagaagaaaggtgacagcggtaattatggcaaagaaaaaagtgaaagacgccgcccgggatcttctcggagattttctgggcgaacattctctggagcttttcaatatcgaatttgtgaaggaaggcagagaccggtatctgagagtctatatcgataaacccgaggaaagcggagaatacgtctcaatcgacgaatgtgagctggtcagcaggtatctgagcgaccggctggacgaaacggatctcatcgaggacaattactttctggaggtgtcctccccgggtctggaccgtcctcttctgaaggattcggattatgtgcgctacgcgggcaggatggtggacgtcagtctgtacagcgctgcagacggccggaagcagatctcaggcgagcttgtctcgctgaaagacggcatcgtgacgatcgaagaggaagcgggaaagatggtggaaattccgatcggacagatttcaagaaccaagctggcagtaatcatttagagaggggaacagtcagatgaacaaggagtttattctcgcggtggaagaactcgagaaagaaaaagatatttcgaaagatcttctcatcgatgccatcgagtcagctctcgtatcggcatataagaagaattacggcaactcgcccaacgtcagagtcaatatcgacagagtcaacggcgacatcgatgtatatatgagaaaaaatgtggtgtcggatgaggacgtcatggatgagtacggagaactcacgctggatgaagcgagggagatcaacgaaaattatgagatcggcgacgtggtggagctgaagatcacgccgagagatttcggcagaatcgccgcacagaccgcgaagcaggtggtggttcagcggatcagagaagcggaaagaggcatcatctacgacgattttgtaaaccgtcagagcgaaatcgctacgggtatcgtacagcgcatcagcaacgagacggtattcgtgaatatgggaagaacggaaggaattctctcggccaacgagcaggttccgggagaaacgtatgagatcaattcccgggttaaagtatatattatggatgtgaagaagactacgaagggaccgcaggtatacctttcccgctctcatccgggtctggtcaagcgtctgttcgaactgcaggttccggagatccgtgaggggattgtggagatcagaagtatttcccgtgaagccggttcccggacgaagatcgccgtcagtacggctgatcccgatgtagatgcggtaggagcatgcgtgggaccgaggggcagccgcgtacaggcggtggtagacgaactcttcggagaaaaaatcgatatcatcaactggagcgacgaaccggcggagctggtcagcagcgcattgagtcccgcaaaggtggagcaagtctttatcaacgagaacgattcttccgccacggtggtagttcccgactttcagctgtctctggccatcggcaaagaagggcagaatgtgcgtctcgctgcgaagctctgcgggtggaaaatcgatatcaagagtcacacgcagttcgaagaggcgggaggtacctacgacagcctgcgaacggaagcagacgacgatgccggcgaagattttatcgcatacggggaagaaaatacgtttgcagaagaggaatcatatgaagcgttcgctgaggacagcgaaatatgcgatgagacggctgacgcgtacgatgaagacgatgacggcatcgtcttcaccgcggaggagtaaacagaagcgggaaagcagcgaagcgtcatgagcggcgtatatttcttcagcagatttcgatccgctgcggaaaggaagccgcggaaagcggggcttaagatgaaaacgaaaaaagtaccgatgcgccggtgcgcgggctgtatgcagtcgaagcagaagagagaattgatccgaatcgtcggtgacaaagagggctgtgtaaaactggacgttacaggcaaagctccgggaagaggggtttatctgtgtccggacagcggctgtttccgcatcgcgcggaaaaagcaggcgatttccaggaatctcggaataaaagtgccggaagaggcgcttgacgaaatttttgaggaactcaaaaattatgaaaaagagtaagttagcgagttatttaggtttggcaagacgcgcgggaaaagtcctttcgggctataagacctgcgccggtacgatcggcagaggaaatataaaactgattatcctcgctgaggatacgtcgcagaatacaaaagacaaattcacggcgctgtgtgagcggcgcggggtgccgtttaaaatttacggatcgtcggaagcactgtcggcgatgacaggactgacgggaagaggaattttcggcatcacagacgttaattttgcggaagcgatgataaaggagatcgagaatgaacagataatgctgaacgtggaataaaggaggacggttatggcgacaagagtgtatgagttagccaaggaattgggcatgagcaataaggaaatgctcaacaagttaaacggcatgggaatcgaagtatcgagtcatatgaacgctgtttcagataaagattgtctcgcggtgagaaattcgatggcgaagaacagagcgccgaaggacgtaaaatcggagacaaagaacaaatctgccgatgcaaagggcagaagcggcgaagctcccggtgagaagcaggaaaaccgccctgcaaagccgaaaggaaaaggcagaccggttcaaaacgggcagcagaagagcggtcaggaaaagagagcagatcggccgcagcagcagagaaatacgcgtcccggcggccagaatgaccgcagcgacagaaagccgggtcaaggcggtccgtccagagatcgcaaaaatgataacagaaaaaccggaacagggacgcagcgcagcgataattccaaaacggcgcggggaaaaaacggcggcagcggcagcagagataaccgcacgaggaacagcagcgcggcggggggaagccagagttccaatcgcagcgattcggataaaaagaacagcagagataaaaagttcaatatgacgaagatggcaaaaccacagcacaaacacagaaaagatcacagaaaagagcagcgaaaggaagacgcgagaaaagcggaagaggctgctgcggcaattcctgcaggggctacggtcgtaaccgttccgattacggtaaaaggactttccgaacagatcgaagtctcaacctcgaaactcatcatgaccctcatgaagatgggcattatggctaatatcaatcagaatctggatgaagataccgtccagatcctcggtgacgaactgggcaaacagatcgtcatcggcaaggtcgaagaagaggaagcggaagaaggaatcgaaaacttcacagaccgcgaggaggatctgagagccagaccgccgattatcaccgttatgggtcacgtcgatcacggtaaaacctccttactggataaaatcagacattccagcgtcactgccagtgaatccggcggaatcacacagcatatcggcgcatctgagatcacacacaacggacagcgtatcgtattcctcgatacgccgggccacgaagcgtttacagcgatgcgtgccagaggcgcgtatgtcactgacatcgcggtactggtcgttgcggcggacgacagcgtaaagccgcagacggtagaggcgatcagccatgcaaaagcggcggcggttcctattatcgtggcgatcaacaagatcgataaaccgggcgccaatcaggaaaaggtaaagcaggatctggcggaacacggtattctggtggaggactggggcggcgat

SEQ ID NO: 1125 - DNA, 6191 bp, Unknown
  16S sequences of unknown bacteria
acattgccccaaccgaccgcgatcgtatccgcaagcgccgcgatgcgcgcattgaacgaatccgcatagcggcagaaatcatcatccagccacatctcgcccagctgcaggccgctgaccgcattctgcggaaagacgatcagctgcgcgccttcctgctttgcttcctcgatgcagcgcatcatctgccgcacattctcttcacatcttccttgtttgatccgcatggacactgccgcgatcttcatcatatcaccctttctctcctttaatcatgaccaatctgcaggcgaaggtcaagcataatctgtcagatcacgctgttcatcacatgcggcgaggacagacaaatcacagaggatatgctataatggaccggaaatgaggtgcctatggaaaattatctgtttgaaggaaacatctccgtcaaggccgccgtcatgggcggcatgcgtgaggtcagcgagatcatcgtcgatgaagcaaagaaagatcgggatacccaatggatcctgcatcgcgccgcagagcggggcattccgatcgtcaccgcctcccgcgcgcatatcgattccctcgccagcggacatacccacggcggcctgctggccagatgcggggcaaggcgctttcagcagctaaaggagatcgacagcgaggcttgcttcctggcgctcatcgaaggcatcgaagacccgttcaatttcggcatgatcctgcgcacgctctatgcggccggctgcgacggggtgatcctgcccccgcgcaactggacctccgccgcggcgaccgtcgcccgcgcaagcgccggcgccagcgaataccttcccctgatcatcgcggatgagatgcagcagacgctgcatgcgctgaagcaaaacgggatcacgctcatctgcgccgagcgcaaagacgccgtctgcctgtatgacttctccttcccttcccgtctctgcctggccatcggcggagagatgcgcggcctgagccgcacggtcaaagaagccggggaacaaaacgtcttcatcccttacggacgagatgtccgcagcgcgctcagcgcggtcagtgccgcatccgtgttctcctttgagatcctgcggcagcgaaaccatcagaaatgacctgctccgccagacacggagcttttttatgcaacgaaaaaaagcgcccgtcagggacgcagccgatcagtacatgacgatcgtttccatgacacacgcatcggtgtatttgtccagcagcttgcggacagccgcctccagcacatcggtatgcggaagcaggatcatgccggcactggcatacaggatggcgatcacatcgggcgccagggcacacagctgaagatcgttccatcgttcatgatggcgccagctctcataacacagcgtcagcccttcctgatccgcgatcagggaagcttcctccgccccgctgtgataacgtctcctgcgctgataaaaccgaaacagattggatatgcccatgaagatccacagcagcccaagcaggaaggacacggacatcaggatcagatgcgcgacggcctgcggcccgtttccgcgctgaagcagccagaagatgccgacgcagaacaggaccacgccctggatgagcaaggtatggcacgtcgtcgtgcatttcttgatgcgccgcttgccctgcagcagccgcctgcggttcatcatcatgccggacaggctgtcaacgaaagcatcgtccgcggagatgctgaaatgaatttcttctcttttgttcatgtccacacctcccacacctgtattataccacctgatccgcgcttcaaacatcgcggaaaaatggaaaaatgccggaaagttccgacatttcaagcggctgccacatagccgagatagatatcgagcagcgcgatgctcagcgtctggctctcgatgaagccgatgatgatatccgtgcgcaaaaacgggatcagctgcagctgcaggcagagaagcacggctgcgatcagcacacagagcgcccggacaggcagcgtgctctttgtccgatgccggtcatgcagcatcatcccgaatacgaacagcagtatgcagcggcagaccagcagcgtatcctgctgatagctcccctgcacgagcatggcgatcagctcattcagcagccacagcgcagcgatgatcagcagcgccctgccatgacggccaaatgccttcatgcttcgtcgatggtgaccgacttcatcacatcgccgttgcgcatctgacgtacggcctgcaggttgtccgtgacctggccaaagaccgtatgcaccccatccagatgcggctgaggctcatgcacgatgaagaactggcagcagccggtatcgcggcctctgtgcgccatggacatggccccagcgatatgccggtgcgggtttcctttggtctcgcaggggatggtgtatcccagatctcctgtgccgtccccgttcgggcatccgccctgagagacaaagccaggaatcacccggtgaaaggtcttgccgtcataatagccttccttcaccagcttcacgaaattggcgaccgttcccggcgcgtcttcttcatataactcgaaggggatgatctccccgttttccattgtaatctttcctttgatcatcgttctctcctcctaagtcagcagcaccatgccggcgctgtttacaaaccggatccgccgtccggcaaatacttcattgccgagcacgccgtcataggtgatatccggaaggatatccaccagcgcgctcatacacccttccatcgtgatcctggccctgtccaggtgcagcgtgacgcttttggcgatctgcgtctcaaattcctctctgccatgcacgccgaacccgaccacgcgcatgctgttcagcacttgcagcccgcggcgccggatgtacccttcgccaagccatccctggcgggcgccggtatcgatgccaaacaggctcacgcttccatctgtctcacgcaatagcagcgtagggaagctgcatgggatgagattggggcggtccagccggaaacggttcttttgcaccttcatctgcccggcgatcgtatccagctcaaaatccatggtcctcagcagatcccagcccaggatgccatcgaagcgaagcaggtccacattgagcagacggaccgaaaactgctgctgatccaggacgatcagcggctggttctcccagcacatgccgcccagctgcaggctgtcgcagcgcacggccggacgctgctcccgcgtgctgccgacactgcccacttccatcccgctcttcaatgccggcaaagcgagcgctcgcgcggcatgggcgcggatgccgctgatctgcgcgccggtatcgatgatgaaacgcatcgcccgcccgttgacccgcacatcgacctcatacagcgaaaacagattccgccgcatgctcagcgcaaattccgcttcgcgcacatgcacgcgccgcggaaatgatcgatcgatcatcatccgatactgcggcgtctgctcgatcggcatgcggacatggcgaaagcggtgcagggcgcgttcatattcctcccggcggattggtgccggcgccgtggtgctgacgatgacgcggtgtctcatcatggcctcactcctcttctgcacgagtcattatagcatactttcccgccgtggtgtataatgaggaaaagcgaggtagatgaaatgaagacaaacagagaaaagcttccgatgatgtccgtcagcggaagcgtggatcatcccggcctgcatggcgatggctattgggtcggatatgacggatatggacggatcgccatgtcagtgggcggcatcgtatacaactacagcctgctcgatccatgcatgggcatcgtcggcgatcacatcgagcccggcgtctccatcaagaacagcgtagacaagtacaataccgccctgcagtgctttgcctgcatcggcaacgaggcccgcatcgtcaatggtccggcagccggacaaaaaggctatgtgagcggcaagcacggcggcgtcgaccatgtgatggtctggtttccccgtgaggtgctggagaagatgaacgcggatgagcgcatcctgatccgcgcgtggggacaaggcatgaagctcacagatcatcccggcgtgcagctcatgaacctggatccggacctgctggaggccatggaccttcagcatggcgcagaaggaaagctgcaagtccccgtcgtgacccgcatccccgccttcctcatgggcgcaggcatcggatcgaccacgaccatgtccggagactatgacatcatgacccaggatcatgaggcaaaccagaaatacggcatagaccggctgcgtttcggcgatctcgtgctcatcgaagaccacgacaacacccatggaccgcattaccgccagggcgccgtatccatcggcgtcatcgtccattcagactcgttcacgagcgggcacggtcccggcgtgacggtcatcatgagcgcggatgaagatacgctggaaggcatcatcgatcccgacgcgaacatcgccaattacatgaacaagatcaaacgttaaaaaaactggccgcgccagtttttttaatcccgatttccgacaaagcggagaatatacatgaagatgttgatgaaatccagatacagctcaaacgcggaatacaccgccagacaattgcggctgtgctcatccggcgtgctgagatacagctgtttcatcttctgtgtgtcataagcagtcagcccggtgaagatgagcagacccaccgcggaaagcagcagcgtgtccgtggagaatcccatcagcatcatcacgacctcgacgatgatcaggatgatcagcgaaacgaacagcagccggcccagcggcatcagatttaccttcgtcgtatagccgatcacacacagcgaaccgaaatatacggccgtgatggcgaatgcaaacatgacagactgtgcgtcatacagccatccgagcaaagagaaggtaaacccggtcaggatggaatacgcgaagaacatcatgcgggtcatgcccaggttccggcgatgcaggccgctcatgaaggccacgacaacgcccagctgcagcaggatgcccagccacatgaaggcgctggatgtcagcacgatctgcatggagatccccgtgaagtagaagaatgccgcgctgagggcggtgatcagcagaccgaccgccatccagccaaacgtccgctgcacatgacggcgaagcccttcatcggcatcgaattgattctggtaactctgttcaaacatcagtaatcacagctcctgtctttaaacggcactcatgtgcctcatcgttagtatagcacatacgtttcggcttgtaaaatcaatagcgccgcagcatctggaccgcgctgcccagctgcagcagcgtcccctccgcatcacggctgccggcctgttgatccatgagcgtcctcacggcatcccgcgcatcatgcacttcctgttcgagccagggctcgctgcggtaatgatatggcgagaggacggccaggttgccggtaaacgcgtctggatgatccaggatatgcggctgtctggagatcttcgccccctgcgcatacggcaggatcatgaccttcgcgtcctccaggtcgcggatgatctcatccagacgctcctcattgtgcagatgatgcgccagctcgctgacgatgtcctttccgctgcattcgttcatcctgcggcggacgtaatccccgcacgcgtccggatacagcgcgctgccccagatcacgacgccttcttcttgcgcagagcgcggcgcgacacacagggagatgccccagttcgaatccggaaagctgatcagaccggcatgcgcaggcaatgcgtttgcgagcacgccctcccgcatcttcaccgtaaagaagccttccgccgcttcagccgggtccaccgcatccaccgcgaattcctgacggcgggcggcgaggcggttccagaacggataggccggctcctgccggggagcttcgatctgatgaagatcgcccttctgcgccagcgcggtgcgttctcccagcgtcacgatgcacaagtcgtccgcattgagctcgatgcgctccacatggtgtgcgctgcgcatatgcagcccccgcgcctgcaagacacacgtatcggagaactggatatccatgatctccgaat

SEQ ID NO: 1126 - DNA, 17364 bp, Unknown
  16S sequences of unknown bacteria
tatcaggatgtagccgactgcctggtgctggtgtcctcgagcttttccacccagacctcctatgagaaccagaccaagaaggccatcaccaacaagttcatctatgacgcgatgaacgagttcctgcgccatcagctggagatctacttcatcgagaatcccgacgatgccctgcgcatctgcgaacaggtgctggtgaacaagcgcagccgggaaaatgccgaaaagacccgtctgaacctcaagaagaagctctcgggcagcattgaccttgccaaccgggtgcagaagtttgtggactgccgcagcaaggacccggcagagcgggagatctacatcgtggagggtgactcggcgctgggcgcctgcaagctgggccgggatgcccagttccaggccattattccggtgcggggcaagatcctcaactgcctcaaggcggagtatgacaagatcttcaagaacgacatcatcaccgacatcatcaaggtgctgggctgcggcgtggaggtaaaaagcaaggccaacaaggagctttccacctttgacctcggcaacctgcgctggaacaagatcgtcatctgtaccgatgccgatgtggatggcttccagatccgcaccctgatcctgaccatgttctaccgtctgacccccaccctgatcgaacagggatatgtctatatcgccgagtcgccgctctatgagatcaccgccaagggcaagacctactttgcctataccgagccggaaaagaccaaggtgctggaggagatcggaaacgccaagtataccatccagcgctccaaaggtctgggtgaaaacgacccggatatgatgtggctgaccaccatgaaccctgaaacccgccgtctgatccgggtgagcccggcagaagcggaggccacatcgcagatgttcgatctgctgctcggcgacaacctgagcggacgcaaggactttatctcccagaacggacatctctatctggacgatctggatctatcctgaccggtgcgtgagaggagtgacagactatggcacccagaaaaaagaacgattcccagtccaagcgcgggccggtgaatcccaatgcggtcattgaaaatgccggcgtgatggtggagcagcccatcaccgaaacgctggaaaagaactatatgccctatgcgatgagcgtgatcctctcccgggccattcccgagatcgacggcttcaagccttcgcaccgcaagctgctctataccatgtacaagatgggactgctcacctcggcccggaccaagtccgccaatgtggtgggtcagaccatgcggctcaacccccacggcgatgccgccatctatgaaacgctggtgcgcctgtcccggggctatgaggcgctgctctatccctatgtggattccaagggcaacttcggcaaggcctattcccgggatatggcctatgccgccagccgttataccgaggtaaagctcgagaagatctgtcaggagctgttctcggatattgacaaggacaccgtggactttgtggacaactatgacgccaccatgaaggagcccaagctcctgccggtgacctatccgggtatcctggtcaatgccaatatgggcattgccgtgggcatggcaagctccatctgccccttcaacctgggggaggtgtgcgagaccaccatcgccctgatgaacgatcccaatcatgatatttcgtccactctcaccgctccggacttcccgggtggcgggtatatcctctacaataaggccgagctggacaagatctactccaccggacggggcagtgtgacggtgcgcggccgctacacctacgacaagcagaacaactgcatcgacatcaccgagatcccgcccaccaccaccattgaagccatcatggacaaggtcatcgacctcatcaaggcgggccgcatccgggaaattgccgatatgcgtgatgaaaccgacctgtccggcctgaagatcaccatcgatctcaagcgcggcaccgatccggacaagctcatgcagaagctgttccggctcaccccgctggaggataatttctcctgcaacttcaatgtgctggtgggcggcatgcccaaggtcatgggtgtgggcgaactgctcagcgagtggattgccttccgggaggactgcgtcaagcggcgcatctacttcgacctcaccaagaagaaggagaagctccatctgctccggggtctggaaaaaatcctgctggacattgacaaggccatccgcattgtccgggagaccgaagaggagcgggaagtggttcccaacctgatgatcggcttcggcattgatgaaacccaggccgagttcgtggcggagatccgtctgcggcagctcaaccgggagtatatcctgaagcgcaccgatgagatcggcgagctggaaaaggacatcgctgagatggaatccaccctccagagccgccggaagatccgttcggtgatcacatcggagctgcgccaggtcatcaagaagtacagccagccccggaagagcattctcatcttcccgagcgatgaaccccaggaggccgaggaggatgatacccccgactatccggtgaacctgttcttcacccgggagggctacttcaagaagattaccaaccagtcgctgcgcatgagcgccgatcagaagctcaaggaaggggacagcatcacccagtcggtgactgccaccaaccgcagtgagctgctgttcttcaccgataagtgccaggtctacaagaccaccgcagcggactttgacgataccaaggccagtgtgctgggggattacctgccggcaaagctgggcatggacagcggcgagaaccctgtctttatggcggtgaccaccgactaccaggggtatctgctctttgcctttgaaaacggcaaggcagccaaggtgccgctgtcggcctatgccaccaagacccgccgccgcaagctggcaaacgcttacagcgacaaggcacggctggtccaggcgctgcagctctccgaggactgtgaggtgctcttcacctccagcgatacccggatgctcattgtccactccggtctgatccccgccaaggtcaccaaggatacccagggtgtggcagtgatggcgctcaaaaagaagcatctgctggtttccgcccggatctatgacggtggatttgccgatcccaagcggtacatggtgcgcaccctgcccggagccggtgctctgcccaaggatggcgacgccaccgaacagctcaccctggcatagcgggcagaccgcaaaaagagccggagatatagctccccggctctgacccgaagtgcacagccagtcgctgcaagctacgggtaagggtagtttgtgccccgatgcgggaaaatatacgcgcaaaggcgcatcacaccgcaatttatccttgcactgacgcaaaaaatatgatatagtgttatatgctgatttgtgaatagtctatcggaggaatataaaatgagcatttttgagataatgggcggcgtactgctgatcttcttcggactggcagtcgttgtatcggtaaccctgcaggagcataagaccaacctgggcggcgcactgggcggctcgatgaacgagggcacctacgaccgcggccgtaccaagaccatggatgcacagctctcgatgatctccaagttctcgggcattgcgatgtgtgttgtggcgctggcagttctggcagcaaccatctatctgtaatccaatttgccaaaagcgttgctatcccgtccggtacggggtagcaatttcttttatacagcagttttcccgatggcgttttatgccgggaaaggactgcgtatcagccctccgcacagcgtcctgctctcatgcaggcaggcgcacagaaacatccgccgctggttctgcgggtatttttccttttctgttcggaaaagggactcttgtcagagccatcggctgtgttataataaatattgtgaaaaagacagagtaagaaattggaacgaaagagtaagaggtaatacacagatttatgacaaacaacaagtcaaacaccaacctgaaacccaagatcaagtccgcattccgtcaggcgggcgggtatgtgacccgcaaggacatcggcaaggccatccgcctgcgccgggaagatcgtccggaatttgaccggattattgccgctatgattgcccggggtgaactccgggaaaaagaggataagctcatgctggctgaaaagccggataccctggtcaaggctgtggtagtcaaggtcaacccgacctttggctttgccaagcccgatgaggctgaggaagatgtgttcatcgccggacgccggatgatgggtgccatgcccggagataccgtcctgctgcgcctgcgcaaggaccgcaacggacgcaccgaaggcgaggtcaccaagattgtggaggaggcaccctttatcttcaccggcgtggtgcagagaaacggcggcttcctggatgtaatgccggataagggtgcccggttccccatcggcgtctacaaggacgacggcctcaagcccaaggagggccacaaggtccgctgtgagctgatccggggcggttccagccactttgaccacaaggccatgatccttgaggacttcggcgatgcggaactcgccaagaactgtaccgccgccatcattgcggcttccggcgctcccaccgagttttcggcggaggccctggcagaagccgctgccatcgacaaggccggcatccatgagaaggagaaggctcagcgtctggatctgcgggaccgcatcatcttcaccatcgactcggcagataccaaggatattgacgacgccatctccctgacccgcaccgaaaacggctacgagctgggtgtccacattgccgatgtaagctactatgtcaccgacggcacccccatcgatcaggatgcctattcccggggtacttcggtgtactatgccagctcggtgatccccatgctgcccaaggagctctccaacggcatctgttccctgaatgagggcgaggaccgtctggccttctccgccatcatgcagctggaccacgagggccacatgacctcctatcgctttgaaaagaccctgatccgctcggtggtcaagggcgtctatgtggagatcaactccatctttgacggcactgcctccgcggagatcctcagaaagtatgagcgggtgatccccaccctccaggacatgaaggagctgttcggcaagctgatccgcaaccgggacgagcggggcggactggatctggagtccaccgaatccaagatcattctggatcagaatggccttgccattgacatccagccccggcacagcggcctgagcgagaacatgattgaggagttcatgctgctggcaaataccgctgccgccagcttcggtctggagcatgagctgcccttcctgttccgtgtgcacgacaatcctccgtccgaaaagatcgaagtattcgagcagagcatggcagagatcggcttcgacatcagcgagctcaagaagggcgtaaccccgctggccctctatcatatcctgcacaaggcccggggcaccaagtatgagcttatcgtcaacaacagcatcctgcgctccatggcaaaggctcagtattccgccaacaacatcggtcacttcggcctggttatcgacaagtattcccacttcacttcgcctatccgccggtatcccgacctgctgatccaccggatcatgtcggcctatctcaccggcatgaagcgggagaatatcgaaaagcggtaccgcacctttgtcggcgaggccgctgaaaagaccagcatgcaggaagtgcgtgccatgggcattgagcgggactgtgaggactgctacaaggccgagtatatgaagcagttcctgggtgaggaactggacggcatgatctcctccattgcgccccatggcgtctatgtggagctgcccaacaccgttgagggcctgatccgcatggaggatatgcccgaaggtgagtacgatacccagtccaaggtgattctgcagaacgccaccaccggacgcacctacattgtaggcgatcccatccgggtacaggtggttgcctgtgatgtatctgccggcaatgtggactttatccccgccggtacaacccgtaagccccgcccggaaaagggtcagaagcccggaaaccggagcggcagaggcccccgccggtaaactgccggcaggacaacaaaaaagggaggtttccccatgactgtcacattcatctggtatcccaagtgttccacctgtcagaaagcagccaagtggctgaatgagcatggcatcgaacacaacgaccgccatattgtagaagaaaatcccactgccgcggaactggctgagtgggtcggacggagcggcaagccgtccaagagctttttcaacaccagcggcaacctctataaggagcttcagctcaaggacaaactgcccgacatgccggaggaggaacggttcgcgctgcttgccaccaatggtatgctggtcaagcggcccattgtgctggctggcgatacagtactggtgggcttcaaacccgcagagtgggaagaagccctgctgaaataaaaaatttggagtaaaggagcaaccctatgaaacgaatcggactcatcggcggcctgagctggcagtcaaccgtagattactaccggatcatcaacgaggaatcagccaagcggctgggcggcctcaacaatgtggagagcatcgtctattcggtgaacctcaatgagatgctggaacacatgggcaagggagaagtggagatcctgggcggcaagtttgccgcagtgggaaagaagctggaggaagccggcgcggacctcatcgtcctctgcaccaacaccatgcatgccgcctgtgcccagctggaggagagcatccatgtgccctttatccacattgccgatgccactgccgatgagatcaagcggctggggctccataaggtgggcctgatgggcacaccgttcaccatgggtcaggacttctacaagggccgtctgcgggataagcacggcattgaggtcatcgtgccccaggagagcgagtggaacgagatctaccgggtgatccaggaggagctgaccttcggcattctcaaggatgaaagccgcaagtatttcctctcggtgatcgaggaactgcgcagccggggcgccgagggcgtgatcctgggctgcaccgagatccccatgctcatcaagcagaccgataccgatctgccggtgctggataccactgcgctgcatgccatggcagcggtgcgtctggcagaggaactggacaagtaaaaaactcctgcaagggacagcggcaatgggctgctgtccctgtttttatgcggaaaaaggccgatgggaaaggatttggatagacagttccggcggaactctgctatgatggaggcagaaaaggagggagcagatcatggagatcggcgcaaaaatcaaggaggcccgcacccggacaggactgacccaggaacaggcggcagaggctctgggagtcagccgcaagaccatttccaactgggagaatgaaaagacctacccggacattgtcagcgtggtgaagatgagcgacctctatgcggtgagcctggaccgtctgctcaaggacggggaaggcggttcggaatacctcgattatctgggggacagcaccgataccgtccgcagccgcagacggctctcggttctggtgctgctcaccgcctacctctgtgtctggggactggcagtgatcgtgttctggttcttcaccaccggatcggatgccatggggttcagcctcatctatctctggctgctgctgcctgccatcaccgtgctggtatcgcttcagctgggacggcaggggctcgaccgcttccagacgctgtcggctgtgctcggcggcggcgtgatgtatatgctggcggaatactgtaccttcaaggcagccaatatggcggcattcggggtgctgcgcctgcccgagtggggtatgcttccggcgggggcgctgctctcagggctcgggttcgggatcgccgccctgctgaaccgctggcaccggcaccggacaaaggaatagaatttacagtttgttcagagagaaaaccggcctgaaagggccggttttgtgctatactgaaactgctgaatcaaaacgaggacaggaggcggcagcatggacagatacgggacggtcggagccgtgattgcggcggcaggcagttccagccgcatgggcggcagggacaagctcgcggagccgctggacggcattccggtgatcctgcggactttggcggcagtggaggctgttccggagatccgggagatcgtggtggtcacccgggaggaccgggtggaggagtaccgccggctgctgggacagtgttccaggctgcgtgcagtggtgcccggcggcagcacccggcaggagtcggtgcgaaacggcgtccgggcactttcgccggactgcacgctggcagccatccatgacggcgcccgtccgctggtgacaccggaggtctttgcccggtgcattgaggcggcccggagctgcggggcagccacggcagcggtgccggtaaaggacaccatcaagctggcagacgaggcgggacgggtgctggatacccccgaccgcagccggctctgggcagtgcagaccccgcagatctttgaccgggagcggtatctccgggcagcggaggaagcagagcgccggggcctttcctgtaccgacgactgccagcttttcgaggccatgggctgggaagtacagctggtgatgggggattaccgcaatctgaaactgacaacgccggaggattttcttgccgccggcgcctatctggaggggataaaatgaggatcggacatggatatgatgtgcaccgctttgcaaagggccgcaagctgatgctctgcggtgtggaagtggactatgagctggggctgctggggcattcggatgcggatgcggcgctgcatgccctggcggacagcattctgggagccctggcgctgggggacatcggcaagctgttcccggacagcgatccccggtacaaggatgcggacagcgccctgctgctggcagaggtgatgcgtctggcgggggagaagggatatgagctgggcaattgcgacatcaccattgtggcacaggaacccaaactggcgccctatatcgagagcatgcgccgccggatcgcggagatctgcggatgtgacattgacgatgtcagcgtcaaggccaccaccgaggaagggctcggcttcaccgggaccctggagggaattgcggcccatgcggtctgcctgcttcaaaaacgggaaatttctccggcaaaactgtaacgcctgacgctttgccggcataggataccagtgaaatccggcagaggtccgattcaccgccttgctttggaccctgcggaaatttactggaaaggtgttgttgtctgttttgaaaccactgaccttgatgatgtgttccatcacctatgcacaacgggccgaggaggttctcgccgctgcgggataccatatacatatcgaccataatcccgacccggagggctgtcggtatctggtgcgtgtatcgggcggtgacccggacgaagcactgcatctgctggcagaacagggcgtcaaggtgcgcaaggtgatccgggaagacgaggaataataatcccaaacacccaaagtcccaatggctccggtgggaatttcccgctggaagccaccgggacttttttacagaaaattcaaaaaacagcctcaaaattctatggtttgcccggtagaataagccgtgggaaaaaccaccatacacagctggcgctccggcacaaaaattgacagaaaaaccagcttgcataaaaccacagttatgttacaattagtttagagaaaatcacaggaaggagtgacaggcagatgtcagaatttacagatatgctggttcggcagatttccctgttcggcatcaccgatctcattgatatctgtgttgtcgcgtatgtgatgttccagctcatcaagctgctccgggaaacccgggcgatccagcttgtcaagggtctgctggcactggtggctgtctatctggcggcgcacatcctccagctgcggagcatcagcttcctgatgcagaatgtctttcagatcggtgccatcgccctgatcgtcctgttccagccggaactgcgcaaggttctggagcaggtgggacgcacccgggtttcggcattgggttcggtatttgcccccacttcggacaatgagaccgacatcatgcaccgctgggaagaaaccatcaatgcggtgtgcgatgcctgtgccaccatgtcccggcagaaggtgggcgccctgatgatctttgagcgctccactcccctgggcgatgtgattgccaccggcaccattgtggatgcccagcccagctatgaactcatcaacaatctcttcttcaagaactccccgctgcatgacggcgccgtgatcctgcgggatggacgcatccatgcggctggctgtgtactgccgctctcggccaactttaccatcagccgggaactgggtacccgtcaccgggctgccctgggcatgagcgaaaactccgatgccctggcgctggtggtatccgaggagaacggcaagatctccctggcggaaaacggcgtgctcaagcgggatctgagcattgatgaactgcgcagtgagctcaagaacgggcttatcatgcagaagaaggccgagccccgccggctgaacttccggctgatccgcaaggatgcggcacagctgagaaaggaggcggacgcaccggatgaaaatgcctaaactcaacttcaaagtgctgtttgacaacgacaagttcctctggttcctgtcgttcctgtttgccttcatgctgtggttcaccgtagtcaataccattgataccacagcggaccgctccattaccaatgtcccggtgtcctttgattccagcagtgaaagcctggaggccatgggactggatgtggtgctggatgaacccatcatggtcaaggtggacatgtccggcgaacggagcgtagtcgccaatgtggaccgtcaggacctgctggttcaggctgacctcaccggcgtcacctctgccggggaatacaccgtccatctctcggtcaccgaccgcctgggacgggactttgataacctgtccaccacccccaaggaagtcacagtccggttcgaccgcacagtgaaaaagaccctttcggtgactgtggacctctcccgtttgacctatcccgacggctatgtcatcggcgatgactatgtcaatgtccagagtgtgaccatcagcgggccggagagcgatgtctccaaggtagccagctgcgtggtgcgtccggaaaaggccggcggcatcaccaagactgaggtgctcacagccgatctgatcctgctggatgccgagggcaatgaagtgccctccgactatatcaccatgagcagcgatgccgcttcggtaaccgtaccgcttctcaagaccaagcggctgcccatcaccgtggacttcctgaatgtcccggaggacttcccgctggatgagctgcgctataccctctccaaggaggatctgctggtagcgggcccggagagctccatcaattccatgaccgaactgagtgtgggctatatcgacttccgggatctggacggcggtgaatacaacttcaacctcaatctgccggcaggcttcatcaatctggagggcgatgagagcattaccgtgagcattgataccaccggcattatctcccggaccatgtcggtatcggagatccggctggagaatgtgcctgacggatatacggtcactccggtgaccaccgccatccgggatgtgaccgtctacggccgcagcgatattatggaaacgctcaccgaggaggacctggtggctgtggtggatctttcggatatggatctctccgaaggcaccagcagtgccattgccaatctctccgtaccgggcaagggtctggtgtggtgcagcggaacctatcgggtacagttcagtgtccagtcgaccgactgacccatcccagaacaacagtacagcagagctgccgtcagccggctgaaaagccaagccgcggcagctccttttgtgtaaagaaaggcaggaacagcagatgtccattctggtatcctcgatcagtgtcccgtttcagaagggcgaagcggcagccatagagcttgccctgcgccgggccggggtgaaaaagccgaaaagtgtctatattgtcaagagctcggtggatgcccgccaccgcagtgacatcaagtttgtctataccgtggggatcgaatgtgaccatgaggaggaagttgtcctccgggccaaggattccaatgtgcgcatccggaaatcccatctcccggagtttgtccccggagaacggaaacttcccacccgtccggtggtgatcggcttcgggcctgcgggtatgtttgcagcgctgaccctggcacggctgggctatgccccgctggtgctggaacggggcggcgatgtggacagccgtgtggcagcggtggagggcttctggaaaggcggcagttttgatacccgttccaatgtccagttcggtgagggcggtgccggtaccttctctgacggcaaactcaccacccgcatcaatgatcctctgtgcgaaacagtgctggagatctttgccgcccatggggccgacccgtccattctgaggaaggccaagccgcacatcggcaccgactacctgcgccgggtggtgaaatccatccgggaggagatcatccggcttggcggcgaggttcggttcaatactcaggtgaccggattttccacccagagcggacggatcaccgctgtccgtacagaggcgggggaagtgccggcggaaacagtaatcctggcagtgggacacagcgcccgggataccttccgggcggtgcgggaagccggggcggagatccagcccaagccgttttcggtgggagtgcgggccgagcatctccagagtgagatcgaccggggcctctacggtgacttcgccggagatccccggctgccggtgggggaatatcagctctcttaccgggagaacggacggggcgtctataccttctgcatgtgtccgggcggttttgtggtaccctcctcttcggaggaaggcggcgtagtcaccaacggtatgagtgagtacagccgttcgggcagaaatgccaacagcgccgttgtggtgagtgtggacagcagcgacttcggaaatgactgggacagcggcatccgctaccagcgggagctggaacaggcggccttccgcatgggcgggagcagttaccgggcgccggtccagacagtgggacggttcctgtccggtcaggccggggccgacttcggacgggtggagcccacctatgccatcggcaccgaagccggggactttgaccggctgtttaccgccggagtggcgtccatgctgcgcaaagggctggagaactttgcccggaagctgccggcctatgcggcagcagacgcggtgctcaccgcccccgagacccggacctcctcgccggtgcgcattccccggggagacgacttccaggcggcaggactgcgggggctctatccctgcggcgagggcgcggggtatgccggcggcattatgagcgcggcagtggatggcatccgctgtgccggagccatcatcggggaatatgcccccatccagaaatagcgatgaaaaaagagccttccggttttccggagggctcttttggatcatagtcagaaggggacgatttcagtggcggtgccgtggcgtcggatcagttccgccagctcccgggttttcagccagacagtggcggtgttgtcattggggtgaatcccgatgatccccggctcctccaggaaatcctggtccagatagaagcggacccggcaggcggtatcgtgcagcaggcccagcggagtcacagcgccgggggtgagccccagcagctccagcagttcctcttccgaggcgaaggtcagcggacgggtgccgtgctgccggcggaagtccttgaggttcacccgcttttcaccccgtacggtgatgaggtagtagttcagccgtttgtcgtcccggacaaacagattcttggcatccagatggggatagggcagatccacctctgccagctccgccatgttgtacactgccttgtgttcggtgagttcgtaaccgatcccctcccggtccaggcagtccagtgtttcctgtcggttcattgacgctcctccttttttccccgcttttcggaaagcaggggtgctcttctgacagtataccatccgtccggctgtttttccagctgtccgccggggcttcccgggcagaatgtgcgcagactatggaatttctcggcgttttatggtatactgtactaataaaaatgtctgcggtcgcctggaaaacggctgcaccaggaggaagaaattggaactcgaactgcttcgctatatccagagtgcggcttcccccgtgctggatgtattttttatagggatcaccatgctggcagaacccgccctctgggtggtagtgctggcctggatctactggaacagcgataaaaccgccggacggttcatctcctatgcgatgttcacttcgctgtgcttcggcaacgggctcaaggagatcttccggatgccccgtcccatcggagagcccggcatccgcaccatctacgcggatacagccaccggctattccttccccagcggtcacagccagatgatggccacagtgggaagcgcaatcccgctctggtaccggaaaaacagcctgtggtacttctttatcccgctcatgttcctggtggcgttctcccggatgtacctgggggttcactatcccagggatgtgtttgtgggactgctgctgggtgtgggcatcagctggctctgcgccaagctctgggaccgggcactgggtcacagcggcctctttgctgccaccttcggactgatgagcatcttcctgtttgtggcacgctcccatgactttctccagctctacggactgttcggcggatttgccgccggctgcgcctatgaggagcggtatgtgcgctttggcatgcgggaccgtgcttccagaaaagcggcccggtttgtgctggggctctgtgtgatcggagtggtctatggtctgggcaagctgctgcccggcctgctctggctgatcccgatccggtacttctttgtggcatttgcgggctatggactggtaccgatgctgtttaagaagctggggatctgaagaaccccggaaaaatttttgaggagaggaacggcggaaggatttgagcatcaagttttggaatacagccagccggacagcggacccggaggcactggcttctctgcaggcggcaggactttcgccgctctgcgcccgggtactgagtgcccgtggggtacgcagcctgggggagatccagtcgctgtacggggaaaaggacaccctgtttgacccgttcctgctccgggatatggaccgggcggtggaacgcatccgcctggcgatggaatcgggcgaactcatcgtggtctacggtgactacgactgcgacggcgtcacctccacagcgctgctgtacagctatctggaggcagtgggcgccaatgtgatctactatatccccgaccgggagcatgaaggctatggcctcaataccgaagccatcgactttctgcacaatgtccgggggatcgggctgatcatcacagtggataacggcgtttctgcccatgaggagatcgcccatgccaacagcctgggcattgatgtggtggtgaccgaccatcaccagccccgggagaccctgcccgatgcagtggcggtggtggacccccatcgccccgactgtcccagcccattcaaggggctgtccggcgtgggtgtggcgttcaagctggtctgcgccctggaaggggacgacggctatgagatgatcgagcactatggcgacctggcggcactgggtaccatcgccgatgtcatgcccctgacccatgataaccgcactctggtgcgccatggtctggagctgctggcggacagtgcccgtccgggtatccgggcgctggtggaactggcagggctgtcgggacgcccgatgactgccgtgtccgccgcctttggtctggcgccccggatcaacgctgccggacggatgggcgatgtctatgacgccctggagctgcttctctgtgaggacgagggcacagcccgggaaaaagcggagatcctctgcggctacaacgaccagcgcaagaagatcgaagcggagatcctggcagaggtggcggcgaagatcaccgctgatccgccgttggtgcaggagcgggtcatcgtcatggacggcgctggctggcatcatggcgtagtgggaattctctgctcccgcctggtggaaaagtatgggcgtccggccttcctgatctccaccgatgacaccgagggccgctcctccggacggggcattgacggcgtttcggtgatcgaggcggtttcggcctgcggcgatctgctcacccgctatggcgggcatgcccaggcggcaggctttaccctgttgaaagagaatcttccggcattccgggagcgctttctcggctatttccgggaacactatcctatcatgccctattataagctcacagctgactgtgtggtggagccttcagagctcactgtccccatggtgcagagcctgtcccggctggaacccttcggagaagggaatccctcgccggtgtttgagctggacgctgtacggctggaacgcatccagtccctgtccggcggcaagcatctcaagctggcctgttccaagaacggcactgctttccaggtgctgctgttcggcaccggcccggatcagttcggctatcagcccggcgatctgctggatctgctggtatcagcggagatctcggtgttccggggcgaagtgagtgtgagcctccgggcagcggatctgcgcctgaccggagtggatcagaatgcggtctgctatcagcagcgcatctatgaaaatgcccgccggggcgaacacagcccggcagaggatcagctcatctgtcccacccgggaagatgcggcgattgtgtaccgtttcctgagcagtcagggcggatttccccatgggccggagctgctctatcagcggctgatggcttcggggatcggatatggcaaaatgctgg

SEQ ID NO: 1127 - DNA, 3593 bp, Unknown
  16S sequences of unknown bacteria
tccgccgccgttttcttcaccggctgcgctcttccatttcctgcagagaagaaaatccgtacagctttgccatatattccaggttctgaatcgtcatgtttccgccccggcgcgccagttcttcagcatgagacagataggcgcgcagcgtacgctcagagtatgtgtacagctcacagcgcaggtaagtttcaaagctggtaacataatccgcgtcggcactgtgatccgtaggccgagacccgcgggccaccctggggtaacggcgcgcatagtcctcctgccacttcagctggatcgccacgattttttccaccagacgctctttcggctcggagatcaccggcaggcggttgcacagcgcggcatattgtgccggcgccgtatagcgcatcatgcgggcatacttctccgtcagcagattccagccaacggactcggcttctgtcaaatcctcgtaataactctcccgcatggcgtcatcccatgtaaggaactgcgccaagcggttcataacgaactccttcatatgattctgacaggacgcgcgtccgccttcattgcgcacctgctggaactgattccactccttcaaaatgagttctgcaaccgatctcataggttcacctttatccttccatcaaatgcatggcgcggatctgcggatcacgaatgcgggacataatcgaaatgccgtggtgggtgataaagctgttggtctcagaggacaacccttcccgccgcagttcatcggccaccaggcggcagatctgctcaatcagaagcacattgcggtcggcgctgttcagcgcctgcggtgcattgggaatgatctcgcagtcccaagcgtccagattgacgccgttttcagccagctccttgatcagactgcccacctcttcacctaggaccggcagcgtcagcattgcccggtgcatccacttataataaggcttataacgcttgttcagcaaaaacaccatagaaatggtattgagaatgaattcgctcagagcatgctgcgcagccactgtttcaccgcggcgcatgcagcgggcatagttgtactgccccgcctgccccattaccgcagcgcgagcggccatttttttcaaccgtacatcgttgggataaaaggcgaggagcttttcccggatagcgctgaactgccccagcttatcaacaaacacctcgccgttggtcaccgtagccaaacggctctccggtacataaacccagcctgtcatactgaattcggcatccgcacgtccgatctgccggcgataaaaatcatcgatgcatagcacgcccacgcgctcgccgccaaacggttcttccttgcgcggcggatagccataaaaatctttcggcagcgcctgatatgcccggcgcagctccggagcgatcacctgataatcctctttcgtcagccacatgcagaaagacggaccgaaatcatggtcacgggaaatggcatcgtcaaaaccaaagcactccgaaccttcccccgcaaggcctaccgcaatccgatctgcatatctggggaattcttctgccagcatgcgtttgccataggtctcataatatgcctttgccagttccaaacctgtcatggtcaaaagacctccttacaaaacgccgttttgcttcacggcatatgtttccattgaaatataattttattgtaacagattgccactgcggcgcatcatacaaaacggaatttctttttgcaaaatcacgatgcccccttttcatttcttgcacttttcacaaaaaatagtgttattcgtacatgcttctgtcaacacctttttcccccgcatgtccaatttttttggtatcgcttttacaatattttctataattacaaaaaaatatcatattttcgtacacaaagtcatataaatacaagaataaaatgggattcgtacaaatcctgcgaatcatctgcgcttatactacctttatagatcagcttagcccttttggcacggcggagcactatttctgccgcatcgtcgttttctgcttttcccgtttccctgccatgaaaaagagcaccgtttctacctcaggcggttctttacggatcggattcccccctattgagtgatttctctaccacccatatctctcccgatcccatctcctatttccccccaccgggaaagccgcggcgaatgttgacctggcctgcagctcgcaggttacttagaacggaatcccattgcgctgcaatggtattccgttttttctttcagaacacacgttttcctgcatcctgcggcaacctcatgccccctcggttcctttctgcccttccccgccttcctgcgccatgcgggacagttttttgtactttttgggcgtcatattcatttgtgcaaaaaacacccggttaaagtaggacggatctgtgaaaccgcactcgctggaaatacggtatgcaggataattggtcgtttccagcagcttgcaggcatattgaattttcagtttattgacatattccgtaaatgtcacgccggtctcgcgtttgaatacccgcgaaaaatactgtgcattcatatacacccgcgaggctaccatctgcagcgtgagccgctccttaaaatgcttctggatatagcgcatggattcatccacaaaggattgctgctcattgtgaccattttttgtgatggactctgccacaatctggggcgcgccgcttttttcatgttcacgctcttcatccacactctcaagcatgcgcttcagcgttgccttaaaatcagacggcttgatgggcttgagcatatactcaaatacacgcaggctgatggctcgctgagcatagcggaaatcggtataagccgtcaaaatactgatgcaggtgtccggggcaaactttcgaatctcctcaatggcctccaggccatccatttccggcagcataatatccataatgatgatatcgggacggcgttttttagcctgccgcaccgcttgagcgccggtattggccgtaatgacaatatcttccagctgcaattcctcgtgaatcaccgcttcaataaattccagttccagctcttcgtcttccacaatcagaatcgaacgcaatggtctcacctcgaaatcagacttttggaaatcgtaatggaaacggtactgccgctgtagtcggatttgaccacctcaagcccatagtcttccccgtaatattgcttgatacgtcgatcagtaatgcgcagccccatttcactgcctaccgtactgtccttgtcccgcagccgcttgagcacctcttttggaaatccattgccgttgtccaccacaaaaatcgtgatcttctcgccatggttttctgcgtagatatccacctttccaccgtcgcgtttgggcgaaatcccatgcagcaccgcattttccaccacaggctgcagcaccatattggggatacggcaggaacggatgtgctcgggcacgttgatcgtatactgcaatcgagcctgaaagcgggccttttgaatataaagatatttctctgtattgtccagttccgcttgaatagtgtgtagagaatggccgttctgcacattgtagcg

SEQ ID NO: 1128 - DNA, 12191 bp, Unknown
  16S sequences of unknown bacteria
taaataaggaggtaaaacagcaatgacaagtagcaaatctaccaagcgggcattgatttccggcgcactggcgctccttatgtgcgtggcaatgctcatcggcaccacctttgcgtggttcaccgacaccgcatccaccggtgtcaacaaaattgtgtccggcaatctgaaagtggatattatcggtgcgaacatcgattctcatattgagaagctgtacttcacaaaagctaccggcgcagaaggagaaaatcttctctgggagccgggttgccgctatctgaccgatggcttcagaattgccaacaacggcaatctggcgctgaaatggaaggctgaaatcaacaaggataacatcgttgacggcaaggcggctcctaccgccaaggacggcaagagcctgttggatgttatcgatttctatgttgtaacaaaggcagccgatggaacagaaacagcggtcgcaattgaaaacttcaccggcaagctggcggcgaatgttggaaagagcgaaacctattacatcaagggtgtgatgcagaccactgccggcaatgactatcaggatctgacgctggacggcatcaccatcaccgtttacgctactcaggatactgttgagaacgacagctttaataatcagtacgataagtacgcgcagtatggtgagcgtaccgtcaagaatgaggctcccgtggtaggaacgaatggcacctatgggctggtagatagtggtagagacaatatcaacaccaagaatgtcacctatagcatccctgctggaaattatgacggcgggttctattctcagcatttcggcatcaactccacatttgatggtaatggttctacattcaagagcttccagttaaactgtggttatgttccgactaccgaggcaagcacgctggttgtttctaacctcaatgtcaatggtgatttgatcatcactgcaagcagcaacaatgttgttatctacaactgcaccgcaaaacatatctctgtacttggtgtcaaaaatgatataacagtaacgattgacggctgcaaaatcacgggtacacctatcgctaatgtagtaggcaataacaagtacggcgtttatatcacaagacccggtgcagaaggtactgcaaaagtaagcattatcaattccgagctttccaacatcaagggtcatgcgattgctgttaattccagtggtgcaacctgcgatttcactatcacaggaaatgagtttactaactatggattggacggcgaagcaaatagagctgcctttaagatttggggcgacggtgttcttgctcccacatcgaatgttggtgggaatttgaatgaacaagcaaccgttcttgcaaatgcaattaaggcgaacaacacatttaacacaggtaataattgcgttgtcgcagaattctatggtgcaacattaggtctgaactaaaatgcaagtcctctccacccgtcgcggtggaggggcaatccaagggtataggcgagtgcgtatgtctttggattgcccgaacgtcaagatacggctgagccgaatggtaaggaggaaaaggaatatgacaacctgcacaatcggcaatatgcaccacggggtgccaaatgccctcgattagtcattttgactaacccgccgggcgaggaaaaaccggatcgtgtgatacctccgttttgtcggttgagcggagcgtatccggcgataatctaatagtcaccgaccaactcatatttcagccctgtgtgttcatctataatatacttttccatagtcaaaccctccgttctgcaatcgtgaatttcttgatttttgattttgccactttaacaagcatctcatccaaagcatcggtgtatctgccctccgatataagccgattgcgtaatttgttcaggcactcaatcataatccgccattcctagttcgtaagcgcaaggtaatatttttgtttcaccattctgacctcctttgattttctgctcttattttaacggaggacgcagaaataatcgaatgtgcggataagtaagagtgccaaatggttatcgcttggcactcttgattttttctcgggaagtgattgaataactcaataaaagcaacgaatttcggagaattttgcaaggaagccagccaacaaattttggcatccttgaaccgtaattagtaaagtgaattaaccggcaaatgtacgtggaaatatgtgagttttcagccggatttcaatatggattttagattggttatgaacatccgtaccatacagagtgttgttatagtagcgagaggttatttgtaacaacactctgtttttatatttcgttctattaggcagccgcagagtggatgttagagtccggttcaatatcagctcaatatcttagccgcataaaaacagcgtagcagtcgtcaaaactactacgccacaaaaagtctgactttttggagtcacatcggtttacggtcttttttattcctataagcaccttgcgagaaagcctatcctcccaaatcggctttctctaagtgcatgcgggctgcaaataaacagcattcaccgccgaatcagataaatagcgcactgcagcagccgagcttatcaacggcatcggctgctgcgttttcaagctcttcgggcggtatcgccccgtcagagcaaaaacgcacaaatgcttccgcgtcgttcctgttacagaatacatccttaagcgttttcacggcagtgccttcgcttataacatcaacaccgtatacggttatcccttctccctcctccgtacagatttcatcgcttcgtactctaaaatcatacttcattctatgtttcctcccaagtttttcattattataacataaaatgacatattattcaagagttttcttatttttttatatatttaacatttgaataccaattttaagcaaaatttaagcattgaatattaacggcagcatcacaaacagacccaccgcgggaattccgaaacctgccgagaaacctgccgtccaccgatttatcggtatatgcaccccggtaaagcgggttgtgaggtttataagaatcagcaccgaaatccccagaagcgcattcagcaaaagtattcttaagggctttccgcttttaaacgcaaaaataagcagcaccaagccgcacagcaccgccagggctattccgccgtatttaaaaaattccatttcgctgccccccttttttaatgatatgtacggggcggcggaataattcttacttattaagcttcggattatcggtacgacccaacagaaaatcgacagatacattgtgaaagtcagctattttaattaaagttgtcgtgggaatatcaatatccccgcgttcatagttgctgtaaacccgttggctgcaggagagcaccttacccatatcggtttgggtaagatccctatcctcccttaaatcgcgtatccgtttatagtacggcataaaatatcaccctccggaaatattttatgtagaaaatttctcgctattgacttttagcgagaaattcgctataatatgagtgcagattttatttttgggggaattttcatgtcaaaaccgataatttgcaaaaaatgcggaactgtttatacctcggcacaaaccgtctgtcccaattgcatgacccgcagaccgcgcaacaccgaaaaaataatagcgtgtgcagcaatcttttttattgtgataggaattgtttcagtattagcaggggttttcggcgatgattccgaaagcgttgattcactctcttccgtgcaatcatcggttccgaccgacggagcttcccgaataacaacagatgaagagactatacgcctcaatataggcgaaacattaaatgccaacggtcttcaaatcacgcttgacgaagtaagtgactggaacagcgataatatgtttgtcagccccaaagacggatacaaatttatacgcgcatactttattatgaaaaatacgaacaagacagaccgttatctcggttcatttgatttttcctgctatgccgacgattcaaaaatggagaaaagctattacggcgaagatacccttaatttcggaaatgtttcaagcgggaggaacatacagggctatatttactttgaggttccgaaaaacgcgcagaagattgagattgaatatgaaacaaactggtggactgataaaaaagcctatttcaaaataaaataaacccggtttcaaaattaactcattccgttaaatcacatacctgtatcggcgattaataagtgcttgcaatacgcctttatctgatatataataatctgtaaaggatgtgttaactttgaaaattgcagtaataaccggcgcctcttcagggctcgggcgcgaatatgcctttgccgccgcacggagatacgccgatatagacgaactgtggctgatcgccagaagagaggaaaacctccgccaaactgcagagcagataagcaaaagggtaagaataatacctcttgatatcaccaaggaggaaagcgttaaaacctatatctccatgcttgaagaggaaaaacccgaaattgctctgcttataaacaatgcgggcttcggcaaactcggggatttcgataagctttcatatgaggataacggcgggatggtgcgccttaactgcgaagcgctgacggttatgacctcagtgtcgctgccgtatatgaaaaacggcggtgagatcgtcaacacctgctccatagccgcctttgcgccgaatacccgaatggcggtatactgctctaccaaggcgtatgttttaagtctttcaaaagcgctgcgctcggagcttcgcccgcgggggattaatgttttggctgtctgccccgggcctatggacacagagtttctgccccttgcggggattgcgccgggctcaagccacacctttgacaccctgccgcgcgttaaccccacagtcatggcggaaaaatcgcttgcggcttccgcccgcaaaaagggagtttacaccaatctgctgttttacaaattctaccgcgtgcttgcaaagcttttgccgcacagccttgtaatgaaaatgtgcggtgcgtaaaaagcgaaatatgcggagtcgccgccgcaaaagcaaatttttaagtgacagattgagcccctcgcactttaaagtgtgaggggctttttgtcaggatacgaatgttttacttcattgcacgcatagcgtttaatatcgctattatcgtaacgccgacatcagcgaaaattgctatccacatattcgcaagacctacggcgctcagcagcagcaccgccgcctttatcgccagcgcgaagattatattctgccgtactattagcatagtttttctcgcaattttaaccgcttccgccagttttgagggcttatcgtccataagcactatatccgccgcctcaatagccgcgtcgctgcccatagcgcccattgctatgcccacatcggcgcgcgcaagtacgggcgcgtcgtttatgccgtcgcccacaaaggcaagggtcttgttttcgcttatcagcttttcaacagacgataccttatccgccggcataagctctgcgtgaatttcgtcaagccccagctccttgcctaccgcctcgcctatttccctgcggtcgcccgtgagcattacggttttggtaatgccgagccttttaagtgcggctatcgcgtcctttgaatcgggctttacttcatcggtaataactatgtgccccaaataatcagagccttcggaaatatgaataacagtaccgtttatatggcagttgtgccatttagcgcccaccttatccataagtcggctgttgccggcgaaaatcgttctgccgtctattaccgcctcaattcccattccggcgtgttcctttacctcgcctatgcgcgatgggtcaatatgacccttatgcgccgcgattatagactcggctatcgggtggtttgagtagctctccgccgcagcagcaacatccaaaagctctgcttcatccgatttttcggggtgaatggcgctgacgctaaagcagccctttgtaagcgttcccgttttatcaaaaactacagtttcaacctttgaaagcacttcgagataatttgaacctttaataagcacgccgcgctttgacgcgccgcctatgccgctgaagaatgagagcggaaccgagattacaagcgcgcaggggcaggaaacaactaggaagttaagcgcgcgctgcagccaatcgctccagccgctgccgataataaggggcggcaaaacagccaacaccaccgccgctataatcaccgcgggggtgtagtattttgcaaagcgggtaataaagttttcggccttagcctttttagaggacgaattctccacaaggtcgagaatcttcgcaaccgtactttcgctgtaaacgctttcggttttcacggttataacgcccgtaaggtttacagacccgctgactaccttatcgccctccttaatatcccgcggcatgctctctcccgtaagcgcggcggtgttaacagaggtctcgcccgtaagcacggtaccgtcaagcggaattttctcgcccggctttacaataattgtttctccttttgaaacttcctcgggagatacctttatttcctcgccgtcacgcagcacagtggcgctgtcgggtctgatatccataaggcttgaaatgctcttgcggcttttacccacggcaatgccctggaaaagctcgccgacctggtaaagcagcataaccgcaaccgcctcaagatactcgcccgaggcataagcgcctatagttgcaatagacattaaaaactgctcgtcaaaaacctgaccgtgagcaatgttcctcacagcgccccacagcacatcgtaccccacggtgaagtacggaataaggaatatgacggctttaagccacccgtcaacgggaacaagcgccgccgctatcagcagcaccgccgccgcaattatgcggataagcctttttttatgtctgcggctcataaaaagctcccctttttgctttatttaagtattattcgacaatccggttctaccctgcggcaaaccttaaccgcctttttcataatgctgtcaaacttactatcgtccgcctcaacggtcattttctgggtaaggaaattcacgtccgcaaaggtaacgccctcaatttttcttatttcctccgccattttagcggcgcagtttgcgcaatcaagatcctcaagttcaaatgtttttttcattttccgttttcctttcttctgttaaatgattaaatccctgacctataattgttcgcacatgatcatctgcaaggaaataaaaaatcgttttgccctccctgcggcaggcaatcagattgctctgctttaatacctttaactggtgcgatattgcagactgggtcatacccagcagctccgcaatggcgcaaacgcacatttccgattcaaaaagcgagaacaaaatgcgcatacgcgttgtatcgccgaaaagcttgaataaatcggctaaatcacagagcatttcgtccttcggtagctcgtgccgtaccgctttcagcatctcggcatggtcgtgcatatgcttttccatatttcaacctccattcatatgaatatttattcatttgaatttctgttcatatgatacatcgttcatatgtatttgtcaagcactattttaaaaaaacttgtaaacagcggataaatgtggtaagataatagggcttaaattcgattttaagggcggatatgtctgccttgcttatcgtaaaggggtgaagcttcccgcttggctaataaatataaaactctgttttcaaacacactgcttataagcataggtacattcggctcgaaaatacttgttttttttatggtgcggttttacaccgggtatatgtcgccttcggattacggcacggcggacctgataacccaaaccgcaaatctgctttttcccgtaatctcgctcggaatcaccgacggtgttttccgctttgcgcttgataacgagcgcggcaggcgaagtattttcacggcgggctttattgttataactctcggcgcgcttatgtttattcccatagttccgctgctcggcatagttaaggagtttcgcgggcatatatggcttattgtcatatacacgctttcctcctgctaccattcgctttgcgcgcagtttataagagcgcggggtaacacggcgctttttgcggtgcagggaataattaacacatctcttgttattgcgcttaatataatattcttggcagttatgaaaatcgggcttacgggctatgtgctttcagtcgtgttggcggattttctctgcacggtcttcatgtttataaaggaaaagctgtggctgcagttcaccccgcacccgcgcaaaaaagcatttgccaaaatgcttaaatacagtattccgcttatccccacaacggttttttggtggataaccagtgtttccgaccgctatatggtaaacggctatatcggcgacacggcaaacggtatttatgcggtttcgtataagattccgaccattttaaccatagtatcaagcgtatttatgcaggcgtggcagttttccgccgttgttgaatcgcacggtgacgaaaaggagcacgccgagtttttcggcggtgtgtggcgctcgtttcaggcggttatgtttttggcgggctcgggaataatcgcccttgcaaagcccgctataaaaattctctccgccgcagagtattatgaagcgtggaaatatgtgcccgttttggcgctttcaatggtgtttactgcattcacctcttttctcggcacggtgtatgttgttaccaagcagagcggaatatcattcttaaccgcaatggcgggcgctgcaataaatatcgcgcttaattttctgcttataccctctcccctaggtgttcagggcgcggcgatagctacctttataagctatttcgcggtgtttttgatccgcgccgcaaattcaagaaaatatatccgctttaagctttacggcggcagcgttgccgcaaataccgcaataacccttgtgcaaaccgcttttattgttttcgagcttccgttctggattcccgttcaggtgctcggagtaattgcggtggcggcggtaaattataaatatatactttcggcgctcggaagaatgataccctctctgcgcagataaggagaattttatggcgtttttcagcacaaccctcggaaagcttattatcaccttttttgtttcaatggtcccggtaatcgagctgcgcggcgcaatacccataggcgtcggcatggggctgcctttttgggcagttatatttgtttctattatcggaaatcttgttcccgtgccgtttattattatatttattaaaaagatattcgcctttatgcgcgaaaaaatgcccaagctcgacgggcttgtaacacgccttgaaaataaggcgaacagcaaatccgaaacggtgcagaaatacgcattttggggattgtttatcttcgttgcaattccgctgccgggcacgggcgcttggacgggcgcgcttattgccgcaatgcttgaaatgaagctgaaaaaagcattcccgtcaatcgtgctcggcgtgctttccgccggggcaatagttacctttgtaacataccttgtgcctgtaatagcacgcttttttgcataggtgaccgcccatgccgctttgcaaaaaccccttttatattcatgaacccaccccgctgcagtgcgggcaggcggtgcttgccatgctttcgggtaaatcggtagaggaaataatagaaattgtgggcaccgagcgcgagaccgaccttaaaatgatgtattccgcacttgataagcttggaattgcatacgaaaaaaaccgcgtcccggtaagcaggcgcgaggatctgcccgaaatatgctttttaagcctggaaacaccgcgctgctggcattggtcgctgtactttaagggcaaattttttgacccggagcacggcgtgcttgacgatttccccgaggcgaaaagaaaatattactggaagataaactaacttggacgggaatgccgctcgctcgaaaatcacggattttcggactgcactccctactcttgcggaacacacagaaaataatcgcttggagcgcgaattttctttgaccgcggcgccataactccctccttttatccgccacaggcgacagtcggttgttatgctccgtgggtactcaccccagtgccctcctgaaaccgcttattcagcgttttttcgcttacaaggtgtttttccgccgcacctgtcgccggaataacgaaaaatgcggcgttaccgccgcaaatacaaatttaagggtttatcaacagactgtagtaacccaccgtccccgttcggtttaatgccgagcggggataaaattttacccgaattttacaaaagccatacccttgatttaacagagaaatgctattattcagataatgcgaagtctgaaataaaaaataagggttgattaaaatgaatgaggaattatggaagtttattaagttcaatatatctgttgttattacctctgcattggacattttgacctatctgtttctgatataccgtgtatttgacggcatcataagcgttccgctcccggataatgcggttttatcgctgctcggaatcaaataccgcgggtatttgttcgcttacctgatttcaacctgcgtaggctacatagcggcatatctcatcaaccgaaaaataacctttcattcaaatattaatcccgtttacagcgctgttatgtaccttatcctcgcgcttttcaatattctcataagctcgtatatcggcggcgttttcggctcttttttagagataaacaatatgtcgaacccgattacggaggcggtatctaaattcatcatcataaatattcccacgctttggacatatccgctggagaggtatgttatacagataaacaaaaaggaaaaagcggtaaaatatattgcaaccgatttggacggaacgctgctctcaagcagcaccgaggtttcatgggaaaatctcgaggcaatcaaaagactgtcggaaaaagggataagcaccattcttttaaccggaagaacgctgtatgaggtgcctgcggagctgcgcgaaaatacctgcgtcaaatatattgttttctccgacggcgcgggcgtttggcaaagaggaaagggactcattaaatatgactgtttccccgcggataccgcatgggaaatatttaatatcctgtcagagtatgaaacctttatcgaggtatattcggacggtacgccgctggtcgagggcgaaaagctgaaccttaagcagctgaattattataatatagataaaagcttcatgcccgaaatgttcaaaagcagacgtgcagttaattcccttgccgcacttttagatgataaagaccgcaaaaccgagctgtttgatgttttctttaaaaacgcaaatgaaagaacgtactgcgaaaaacgccttaagtcggctttcggcggaatattcatcacctcgtcactgcagaacaatctggagatatgccctccggggacaagcaaaggagcagcgctcatatggctttgcaaaaagctcaggaccgatataagcaatgttgcggtggcaggcgacagtaaaaacgatataaccgcctttaaaacaaacgcaagaaaatacgccgtagcaaacgcctgtgaggatattaagcttttggcagataaaataatctgctccaacgatgaaaatattatgtgctgctttgaaaaggaatttgccgattgaccgcacgcgccgcttgatcgtgttgaaaaagtcgacacgctcccctacgggaatgccgctcgcaaaaattaaagatttttgactgcgctccctactcttgcggaacacacagaaaataatcgcttggagcgcgaattttctttgaccgcggcgccataactccctccttttatccgccacaggcgacagtcggttgttatgctccgtgggtactcaccccagtgccctcctgaaaccgcttattcagcgttttttcgcttacaaggtgtttttccgccgcacctgtcgccggaataacgaaaaatgcggcgttaccgccgcaaatacaaatt

SEQ ID NO: 1129 - DNA, 10363 bp, Unknown
  16S sequences of unknown bacteria
gggttcgagggcgttgttgtgcttggatgaatctgctttgaaagacgtggtgaatctattcgcggaaagggcagtgccacgtacgcgcgcccggatctatttagactgcacgacggggatgtcttcttcccatttctcatcgaggttgccgtcgtagacgtagtgtttggtctctttggcgatcatgcccgaaagcgcgagtatcaagatgatgttcggaacggccatgagcgcgtttccgatatccgaaatcgtccagaccatgtcgccgacgccgatggccccaaagaacccgacgatgacgtagatgatctgatagggaacgatcgccttgcggccgaacagatacgttgcacagcggttgccgtaatagctccacccgaggatcgtcgaataggcaaagctcaccatgccgaggatgaggatgggcgtgccgacgaacgggatggtggcaaaggcggcgttcgcgaggtcggcgccttgctgcagagaaccggaggcggcaatctcgggatgagcgagcatggtcgacacgagcacgatgccggtcataaggcagatcacgacggttgaccagaacgtgccggtcgaggcgacaagcgcctggcgggcggggttcttggtcgatgcggcagccgcgacgataggcgcggtgcccaagcccgactcgttcgagaacaggccacgcgcacagccatactggagggcgaccatgatgccgctgccgacggcacctccaaaggcggcctttgccgtgaacgcgcattcgagaatctccatcagagctgccccgagaaactggtagttgatcacgaggatgacgatgcatccgagcgcgtaggcgaccgccatgaagggcacgagtttctcgcagacgttggcgatggtcttgacgccaccgaagatgacgacggcgacgaggaccgtgatgacgatggcgagtacccacttgggaatgagggggaagttgccgcagatgatgctcgtcattgcggaggactggacagcagaaccggttcccagagtcgcgatgacggcgaacagggcgaacaaaaccgcgccggcctttgcccatttgggcgtcgtgccgtcagagcgcttgaaggcgcgctcccaggcgtacatggcgccgccgatcatctcgcccttgtggtccttcacgcggtagcggatcgaggcgtagacctcggtgtacttcgtcgcgatgccgaagacgccggtgagccacatccagaagacagcaccggggccgcccgagatgatcgcggtggcaacgccgacgatggagccagtgccaatcgtgccagcaagcgcagtcacgagagcgccgaattgagagacatcgccctcggcgtcttcgtcttcctgcaccgacatcttgatggctgtcggcagcttgcgttggatgaacctgagtctgatggtgaggaaaatgtgcgttcccagaagcaggcaaatcattaccgggccccagacgaacgcatccacctggtttaaaatctcttcaatattcatggtgctacacgttagcacaagtatgcgcgcttaggtgcatgccgtgcgattctacctgccacgatatgcgggcagtgccgccgctgacgagtggggaaaaggagggcagtccgataatggggcgtcataagctgctgctgtatgcgtatgctgcgcttgccatcgccatgatggcggtgatcttctggttttccgcgcaagtgggaaccgattcatcctctaaaagcgatgccatcgccgccgtgatctgcagcaagctcgtttttggctacgacagcctttccgtcgacgcgcaagattctctgttttccacggtgacctttgccgtgcgaaagacggcccatatgaccgagtacgcggttctgggcgcactgtactgcttgacgctttgccagctcggaaaggtccggggcatacatgtgcgaggaggtggccggaaagggtacgttgcgtgggcacttgcagtggcatacgcgtctacggacgaaattcatcagctgttcgtagacggaaggtccggcatggcaagcgatgtggtcatcgactctatcggggcggccgtcggcattcttctcgttcttgcggtgttgaagcggcaagagaagaaacagggaagcgggtctgctcaatcctgaccgcttccctgaagcgtaagttcccataagatatgttatcagccatttataccaatggcagggaagtgcgagaaagcgcccttacttcttgcccgtcgagccaaagccgccctcaccacgttcggtagcgtcgagctcgtctaccacatcgatcgtgacgacgggcacctcctgaatgacgagctgcgcaatgcgctcgccgcgctcgatctgaatggtgttctccaggtcggtattgagcgcgatgaccttgatttcgccgcggtagccgctatcgatgagtccgggcgtgttgactatggtcagcccttcacgcgcggcaagtccactccgcggctgcacgaaccccgcatagccttcgggaatggcaatggctataccggtgctgatgacctcgcggcaaccggggtcgatgctggcatcctgtgcagcgtacaggtcgagcccggcatcgcctggctttgcgtatgcgggcgtcggaacggaatcgtcgagtttcttcaacttgagggtgatcgccttgctcaaggtaggctccttagctagttttcggggtctgcgttcttttcggagagcttcttcagctcggtgttgaactcgtcgaggtccttgaagtccttgtataccgaggcaaatcgcacgtaggcaaccttgtcgaggtcgcgcaatcttatgagaacctggtcgcccagcatcgaggacgggatcggaccccggtacttgaaccggatgtcgttttccacggaatcgacgagggtttccaagtcatgcagcggaatgttgcgttttgccgtagcggtgaggagactcttgagcagcttcgaatgatcgaacggctcgacatgaccgtcgcgcttggcaatcatgacgggctcctcttcgcgacgctcgaatgtggtgaatctcgtgccgcattcgaggcattcgcgacgacgcttgatgctcgttccgtcttcgaacgacctggaatcgacgactttcgagtctttgcatccgcagtttggacacaacacggttgggctcccatcctcgggacaaattgtactcactgccagtttagcaggttgaggatgggctaacgcgcagctagaccgcacatttctactaaaccagggtgataaaggagaatacgaaagcgctggcgaagcccaatacggctaccgctgccccaaatgccctgtctgacttcgtctgggcaaacgacaagcccttcaaatcgcgaagcgcggactcgacgcgggtgggctccgcttcgaagcgatgctcgtgattgccctgctggataccgggaaccgaaacgacgcggctctcgaaaggaacgacctcatcaacgtcatgagaacgactggatacatctgaaatggggttttcgtaggtaagcttgagagccgatgtgccgtcgatgcagatcacgttgttcatggccgttcctttcgagagccgcgtacttcttacaccgtgagttatagctcgggggtgagacacgaactctataaccgaacgtctgttcgtatagtcatagtacacgaacatttgtacgtttcaaggtatatacgaacatttgtttgattatttgcacgtctcgctatacactgggcaaaacgattctctgggagacacgatgaccacgtcagacctgacaaaacgccaaaagcagatactcgatttcatcagcacctgcgtgaacaagaagcactgcccgccctcggtgcgcgaaatcggcgaggccatcggcttgtcctccccttctaccgtgcacgctcatctcaacgcactcgagcagaagggctatatcaagcgcgacggcgccaaatcgcgttcgatgagcatcacgagcaaagcgcaatcggtcgaggcttcggcctccccttgcgctcagcctcaagcccacgcctcacgtggcattgtcgagcttccgctcgtggggcgcgtcgccgcaggtcagcccatcttggccgagcagaacatcgaagagcaggttcccctgcccacctcgtttttcggcgacgacggctcgtttttgctcacggtacacggggaatccatgattgatgccggcattctcgacggggacacgctggtcgtgcgcgagcaaagcgatgccaacaacggtgacatcgtcgtcgcgctgattggcgatggcgcgacggtcaagacctactacaaggaaaaggactgcatccggcttcagccgcaaaacgagagcatggagcccatcttcacgcgcgatgcggtgattctcggcaaggtcacgggcctgttccgctctatctaactgctaattcacgattctttcgagtaacgttcgaagcgtggcgcgagcgcctggggaacgtacatctctatatgcgttccctgctcggtgtagctctcgctcgtgatggagcatgccttgtgcgcaagctccacgagacggccctcgctatacggaatcaacacgtccatcggacagctctgcttgcgaatctccatgcccaggcgggcgagcagctcgtcggtgcccatgccttcagcagcggagacgaacacggcagatggatggagctctctcagatgcgcgagctcgaggcttctctcgccccgcatgaggtcgatcttgttgtagacgaccaccgtcgggatatcgcttgcgccgatttcccccagtacctcgcgcacggacccgatctgcgcatcgcgctgctctgccgccacatccgccacgagcaagatgaggtctgcctctttgatctcgtcgagcgtcgacttgaacgcctcgacgaggctgtgcggcagtttctgaatgaagccgacggtgtcggtgagcgtgaccatgtggccgtcttcgagcgtcagctgccgtgtcgtggagtcgagcgttgcgaacagcttgtcataggcgagcacgttcgacccggtcaggcggttcatgatgctcgactttcccgcattcgtgtagcccgcgagggcgacgcggaacacgccggtctcgttgcggtgcttgcgctgcgtctcgcggctcgaggccacgtccttcagctccgcccgaatgcggccgatccgcttgcgcaccagtcgtcggtcgacctcgagctgggactcgccctctccgaagcgcgacccgacgccgccgcccatcctgttcgcggcaagatggctccacatgccacgaagacgtgggtagaggtactggttctgcgcgagcttgacctggagcctgccctctttgctcgtggcgtgcagcgcgaagatgtcgaggatgagtgcggtacggtcgatgaccttgaccggggagcctacgagcttttcgaggttgctctgctgcgagggcgagagctcgtcatcgaatatgacgacgtcagcgtcgaatgagcgcacggcatccacgagctcttcggccttgccctggccgatgaacgtgcgcgggttgggcgcaaggaggcgctgcgacatcgtgtggacgaccgtggcgcccgcggtgctggtcagacgttcgagctctgcaagcgattcttccagcggccaggcggcatctccgcggtcgatgccgacgagtatggccttctcgggtatctctcgcgtgtccaccctgaacttctgcctagtcaccagtcgcctctctcacgatatccgctgcggtctcgaacacctgctgcgtaatgccagtatcgcaggaaatccagtgcacgtcgcgctccgacctgagccaggtcatctgtcgcttggcatagcgtctgctcgagcgcttgatgagctcgacggcctcgtcaagcgtcgtctcgccatcgaggtacgccacgatctccttgtagccgattgcctgcggagccgtgagccccgtgcgaaactccttgtctagcagccgcttgacctcgtctaccaggccgtttgaaaccatcaggtcgacgcggcggttgatcttctcgtagagcagctcccgctccatggacaacgcgatcttcacgttggggacaagcggagagacgctgcgaaacgcctgcttgcgctgggcgtagctctccccttccgcatgcatctcgagcgcgcgcatgacccgcttgacgtcatgggggtgcacgagccgtgcgctttcggggtcttcgcgctgaagcagctcgtataaagcctgttcgccctcgttggccagaagctgcgagagccgctgtcgaagcgggttgtcctgctgctcgccgggtgcgaactgcaggtcatcgagcgcagcacgcacatagaaacccgtgccgccgcacagaatgggaacgtgtcccctctgggcgatttcggcaaatgcccggcgcgcatcgcgttggaagagggccgccgagtatggctgacctgggtcgaggatgtcgaggcagtggtacggcacgcgacgctcgcccacgggcatcttggccgttccgatgtccatgccacggtagatctgcatggaatctgccgagacgatctctccgtcaaactccaaggcaagccgttctgccagctcggactttcccgatgccgtcggcccctggatgcatatgacgagcggcatgtcaggcatctacgagctgcccccgcagataccaggtcttcgtctcgtcgaccttgacgttcacgatgcggcccaggtactcgtcgatggtggcgcctgcgggaagcggtgcgtgcaccgtctggttcttgggactcttgcccgcaaggaagcgctcatcgcgcttcgaggtaccctcgacgagaacgggcaccgtggcgcccagctctttggcgttctcggcgtgcgcctgttcctgcacgagcgcgacaaggcggtcgaagcgatcctggatttcctcgtgcgtggcggggtcgtccatctcggccgcgggcgtgcccgcgcgtttggagtagatgaaggtgaacacctggccgtacgagacctccttcacgaggtcgtaggtagcctggaagtccttttccgtctctccgggaaagccgacgatgatgtcggtcgaaagcgatatatcgggaatcttctcgcgcaaggtggcgatgaggctgcggtagcgcgcagtatcgtacttgcggttcatggcggaaaggatccggtccgaacccgactgcagcggcaggtggagttgcggcatgatcgtcggatgcgctgccatcgcctcgatggtctcgggaagcaggtctttgggatgactcgtcacgaagcgcacgcgctcgacaccgcaggtgcccgcgatgttgagcacatcggcaaaacgcgggtagccgtacaggtcgcgcccgtacgaattcacgttttggccgagcaaggtgagctccttcacgccctgcgcggcaagcccgttcagctcgcgctcgatgtcctcgattggccgggaggcttcgcgcccgcgcacgtaggggacgatgcagtacgtgcagaagttgttgcagccggtcatgatcggcacccaggcatgccagggcttgtcacggtgcagcgggagctcgctcgagaagccgtcgttcgactcgatggtttccgcaacggcggtgcccgtttgcatgcgccgctcgatcaggcggaccagatggccgaggttgtgcgtgccgaagacgacgtccacgtgcttgagctgctgttgcagcttctcgccgtctcgctggccaatgcagccgcccacgcagacgatgcgcttgtcgccgtgtgccggagggatgttcttgagcgaggcgacctggcccatcaggcgctcgtctgccttctcgcgcacgcagcaggtgagaaagatcgcgatgtcggcttcctcgagcgtgctcacggggagcgcccctgccatctcgagcatgccggcgacgcgctccgcgtcgttctcgttcatctggcacccgaaggtcttctgccagtaggtcattctggcgaggggcttctgcccgtctgtttcatcgaagttcataaaacgtggttcctatctgccacaggcgtgtaaaaactgagtgaacgaagcgcggtccaatcccgcgcttcccaaagaggcgtgatgcgatccgtcgccatgccaatcggacccgccgctcacggcaagcccgagctcttccgcacgagcgacgagcaaggcggaatcatcttcgctctgaagcgaatggtacgcctcgaggcccgcaagcccctcgcgctgaaactgcggaatgaggtcgacgacatggtacagggcaggatgtgcgataaacgcgaagccgccggcctcgcctaccaggtggatggcttcagcggtgctcgcgctgcggtagtcgacgtagtacttggaggaagagccgagaaaacgtttgaaggcgtcgtccacgctcgcggcggcaccgcattcgacgagcatgcgcccaagcagcggccggttgatgacctgcccgctctcgcgcaggcgctcggagctcataggatagccgtcgtccgcgagccgctcggccatggcgcaggtgcggtcctcgcgcttcttgcgcgcagtggcgaagaactgcgcgagcccctcgtcatcggggtcgatgaagtagccgagcaagtgaaccgtcctgtcgtcggtctgcgtggtgatctctacgcccgggatgacctcgactccataggagccgcccagctccaaggccagccgcgaaccgtcgagcatatcgtggtcggtaatggcgatatggagcagccccaagctgcgcgcctgctcgagaatctgccgaggagagcgcacgccgtcagaaaaggtactgtggatatgcaggtcggcatagggcatgccgcaaggtcgccccacgattacaggtcttccggctctggggcctcttccgcatcaaagtcatcgtcgtcgaggtaatgcggatgcacggagaagcggatgcccgtgcgcgtctggccgttgatctcgagctcgacgaacgagggcacgcaggtgaggtcgatgccgctgggggtcaagtaccctcgagcaatcgcaatagccttgaccgcctgattgacggcaccagcgccgatagattgaatcctcaccggattgccgtctttgataagcccggcaaccgcgccggcaacagaggcaggagacgatttgctcgaaaccttcagaaaatccatgtactcatccctagtgcgttacctatttacgttgttgctgcagttgcgcatcaataaaaccagctcattatatcgtatagcacctgttagtctagcagggcttttgcggcttcctgcagctcgtcgagcatctggagcgcctgctcgcgcgttgccgccttcgcaaacaggtacgctttgatcttgggctcggtgccgctgggtctgatgagcaccttgacgccatcgccgagcgtgaacgagacgacgttcgcgccggggagcatctgcgcctcatccgcgctcccgttaacgcgcggcatctcgacgccaggctcgaagtcggcgaacttgagcacgcggtgcccggcgagctcctggggaggattgtcgcgcaggccctccatgatggcggccattttcgccgcgccctcgctgcccgggtactgcacgttgacggttcggttgaggtagaacccgtagcggtcgtacagggcgttcatagcatcgaccaggtcgcgtccctggctcttgtgccaacgcgccatctggcagatgagcatggaggcgttgactgcgtctttgtccctcacgtgcgcgccggacatatagccgtagctttcctcgaagccgaacatgaagcgctcgacctgtccggcctgctcgagctgggcgatctgaccaccgatgtacttgaatccggtcagcaccctgcgcatctcgaagccgtatgctgcggcctgcgcatcaggcatcagcgaggagacgatggtcgtgatggcgaccttgtcggcaaggctctctcctctctcgaggcgcttggcgcacaggtagtcgaggagcaagatcccgacctcgttgcccgtgagcagctgatagctcccctgatggggaacggcaatgccgacgcggtcagcgtcggggtcggtggcgagcaagagatcgggcttgaccttgtcgcagagttcgaggcccttctggagcgcctcgcggatttccgggttcggataggggcaggtcgggaagttaccgtcggggtctctctgctcgggaacgaccgtcacgtccgtgatgccgaagcgctcgaggatcttgaggacgcacttcagccccgtgccgttgagcggggtgtagacgaccttgaggttgacgtcgcggtggctgtcgggcccctccacggactgtgctg

SEQ ID NO: 1130 - DNA, 32759 bp, Unknown
  16S sequences of unknown bacteria
cttgtaaaaagctttcccatcttcattaaaactggctgtgactctccagcaaacgctgtttgatttcccaaagtttcggagaaaggtccacataaaatttatgtggattctcaaaacgcttcacttcatcccacaaatgatccacctgatctttgcagtaagcgcggatttcttccagagaggggcggtcgtaaacacatttgcccttttcaaacacctgtactaagatttttttggccgtgatattggtcagcgttttctttttccaggtcgcatcggggtcaaaaatcgttaccggctgatcggtatccaccgtctcgtcgaacagcgtaacatagtccgccactgcctcgccgtcggttttgttgtaaaaccgatagatggttttgaaatccggattggtgatcttttcgatggtttcactgattttgatttttgggatcagccggccgttttcttctatcgcagccaatttataaacgccgccgaataccggatctgatttggatgtaatcaggttttctcccacgccgaaagaattgatctgggcaccttgcagcaacaaatcccggatcaggtattcatccagcgaattggaggccacaatggcacagtccggataacctgcttcatccagcattttgcgcgcctttttagacaaatacgcaatatcgccgctgtcaatgcggacgcctttgggccggtaacccagaggggccaacacctcgtcaaaggcgcgaattgcattgggaatcccggatttcagcacattgtaggtatcgaccaacaatacacagttatccggataaagttccgcatatttccggaacgattcgtattcatcgccgaacatctgaacccagctgtgagccatggttcccaccgcagggatatgataatcacggtcggcaatggcacaggccgttgcatcacagccggcaatgtaggcagcccgtgcgcccagaatggccgcatcatagctttgagcgcggcgggaaccaaattccataatcgaacgcccctgtgctgcacgaacgatgcggttggatttggtagcgatcagcgactgatggttaatggtcaaaagcaccatcgtttccaccagctgtgcctggataatcggccctttcacaatcagaaccggctcattgggaaaaatcggggtaccttccgggacagcccatacatcacattcaaaatgaaagtcggccagataatccaaaaatgcttcgtcaaacataccgcggctccgcagatattcgatatcttcttttgtaaaatgaagattctcaaaataatcgatcagctgttccaatcccgcgcagatcgcaaaacccgcctggtccggtatcttccggaaaaacatatcaaaaactgccgtttgatttccggttcccagtttaaaataaccgttggccatggtcagctcataaaagtcaagcagcatggtcaaatttttttcctgtttccaatgattttccatcatccttcacccactccatataaactgctgctcccgcagcgcaaaccacatgtctgtattatagtcccgcatcaggaaaaaaagcaagaaaaacacaggattccctctaaaagaatcccgtgttccaatcatttcacaacgatatggcaaattcaaacggcatctgacgcacatcacagctcatttttcgtcttatgctctatattttaagccgtttctttttctgccgcacattgtgggcaaacccctaaaaaggtaatcgcgtgctctttgatttgaaatccagtcacttcctgcgcttttacatccatttgcttatcataaggaagaaaaacatcttccagccggccgcactcccggcattgaatatgggaatgtgggtccatattgccgtcaaagcggtcagctgcgccttgggactcaatttttcgaactaacccctgttccgccaaaatgcccaaattgcggtatacagtacctaaactgagcgaagggtgctgaggcttcaggtattcatagatatactccgccgttgggtgaaccggatgggtcaccactgcttcataaattgcctgccgtattttggattgcctgcgagcaaccatcgaccctcactccttcatagatttttgcaaaacagcggctgaaaaaacaagccggaacccccagctcattccagccgccaagcggcctgcgttctgtgcagtcctttttgtttttataataataccagataagtatatatttcgcaagactttttacttctgtatcgtaatggtgattttttcctccagcgttccaagtaactccaatgtatccatgtcgaacagttcgatttggcacactccatcataatttcctgcaagcagttttttgtccaggcaggcgcggtcgatatgactgtccggcggaatcatttcagagcggtacacctcttcatcgcccagccgataggaaatacgaacaaaatgctgatttcccccatcattttgaaaacagaccgtgccgctggtactgctgtccgcaaaccagggcgctgtgttcagccggtaccgtaaagagccatattccacctgtgtacgatcacactctccctccaatgcaccaggcgcgcagttttcatccaatatcacatcgtaatcgtcccattttcctgaaaatgcgtccccggtattcccacttatccataccagaaacacgctcaccaacccgaacagtacgatcgctccaacgctgaccgaaagcgtaatccagctgttttgtttttttcttctcctcatgtcttgtccatccttactccgtccgttttgaactgctagaagtgtccgccggttaagcgatcttctccctgatacgtcttgccaaaaaatgcaaataaaatttctattttattataatacgaaaaagtgggaacgcaactatatgcgctttcttttttctgtgctaaaataaaggaaaatatttttgaaagggattttgtcatgcgcaccctgcttttggctctcaatgccaagtacattcattctaatatcgccgtccgatatctgcaaaaatacgcggctccttttcttcgccagccgccgcagattttagaattgaccatcaataaccgattggattttattttggacgaaatttttcgccgctcaccggatattctgctgttctccacttacatctggaacgttgatatggtgcgccggctggcatcagagtatcgaaaactgcggcctgacgcgctcatcggcgccggcggcccggaggtcagctatgaatccgaggcgtttttgcggcagaatccagccttcggcctgatcatccggggcgagggggaacagacggtccgccagctactttcggcggcagaatctggcgccgattggcatgctctgcccggactgaccgtgcggacagagcattccgtccgtgtcaatcccccgcagcctgcgttggatctgtccgatcttccctttccctatgagctggacctttgcgatgcgccggagcaaataaaatattacgaatcctcccgcggctgtccttttcagtgccagtattgcctgtcttccattgaaaaaggggtacgcgccgcaccgcttgataaagtctttgccgacctgaaggtctttttgcgcgcaagggttcgtcaggtcaaatttgtggatcgtacttttaattacgacagccgccgcgctctggaaatctggcgttttctgcgcgatcatgacaacggcgttaccaattttcattttgaaatcaccgctgagttgttaaccccggaaacactggattttttccgtactgtccggccggagctgttccagtttgaaatcggcgttcagtccaccaatccgcaaacgctcaaagccatccggcggcaaaacgactggccggctctttgctccatcgtgcaaaaaatcaaatcgtaccataacatccatcagcacctggatctgattgcagggttgccatatgaaaattatgattccttccatcgctcttttaatgatgtttacgcactggaaccggaacagcttcaactgggatttttaaagattctcaaagggtccggactatctcacgatcagcaaaaatacggtcttatcagccgagactatccgccgtttgaggttctcttcaccccggatcttccttattctgacacgctgagactgaaagccgtagaagaaatggtggaacagtactacaacagcgggcggtttgttcatgccctccactggcttttttcgcagctggaagatccctttttgttttatcagtctctgggagatttgtttgtcgccgaaggacatgcttacgaaagccagtctctggagcagcgctatgcttttttccatcgtttctgcgtacagctcccggagattgacagctctgctttcacccaatatctgaaactggattactgcctgcaccaacgccccaaacggcatccggactggtttaccggaccggacgccgccgttcttcgccagcgcgcgctgctatttttggagcaggaagaaaaccgcctccaatacctgccggattatccggaaaccgaccccaaaatgctgtataaactggtgcatatcgaaccgttttccatcaacgtcctgaccggggcggcagaaccggtcgttctgctgtttgattatcgtcggcgggatcttttgggcaatgcatatgtccagcttgccgtattgccggaataggaagaatcctctcctttttgcatgcatgccgtttacatcgttttttccaaaaatactttttttaccgacttgtcttttcttgtcttgtcggcaattttttaaaaaccggaaaaaatcaattaaaaagccctttcgcccttataactttacatagattttacaagcagcaccagatacattttaccttttcgttacataataggcttgtaaaaggaaaataaaagggaaaagtgggtgcaatatggatattttctccgtgtttcaaatggccggcgggcttgcgttgtttttatacggcatgcacgttatgggcgacgggctggaaaaacaggccggcggaaaattaaaaaccattctggaaaaattaacggcaaacccggtaaaaggatttttgctcggagcagccgtcaccgctgtgattcaatcatcttccgccaccaccgttatggtggttggatttgtcaacgccggaatcatgaagctcagccaggcgattggcattatcatgggcgccaatgtcggcactacgattacctcctggattttgagccttaccggcctgcagggggacagtttctggattcagctgctaaaaccgacttctttttctccgattattgcattttttggcattattctaatcatgttctctaaaaaagagggtaaaaaggatcttggctctacgctgataggctttgccgtgctgatgttcggcatggaacaaatgtccagcgcagtggaaccgttggctgatgttcccgaatttaccagcatactgcttttattctcaaatccattgctaggcgttctctgcggggcaattctcaccgctgtgattcaatcctcttccgcatcagtcggcattttgcaggctttgtctgccactggaagtgtgacctattcttctgccattcccatcattctcgggcagaatatcggaacctgtgtcaccgccttgatttcctccattggcgccaataaaaatgcccgccgcgcggcggtggtccatctgtatttcaacttgatcggaaccggattattcctcgccgtattttatctgctcaacggatttctgcacttttctttctacgaccagtcgattgaccggctgggcatcgccgtggtacacacctgttttaatcttctctctacgctgacactgctgccctttaccaagctgctggaaaaactggcttatctcacaatccgggatactgccaacgacgaaaattttcaaattctcgacgaacgttttcttgcctctcccgcagtggcgattcaccaatgtcagaaaatggccgtctctatggcaagactggcccagagctctttgtatcaggccatcgggttaattggtgcttatgatgaaaaaatcgcccattccattgaggaaggcgaagaccaaatcgatatgtatgaggacaaactgggcacctatctggtccggctgtccagcaaaaatctgacgatggaagaaagccgggaaatctccaagctgctgcatgtaatcggagacttcgagcgcatcggcgaccatgcagttaacattctcaagtccgccaaagaaatgcaggtcaaaaaatatgtattttccgggcaagcgcagcaagagatttccattatttccagcgccatcgaagaaattgtcgatttggcaaccaatgcttttgtaaaaaatgatctttatctggcctctaaggtggagccgctggagcaggtagtggattctttgaaagacgaattgcgtaaccggcatgtccaaaggctgcaaaacggggaatgcaccatcagcaacggctttattttctctgatttaatcaccaactatgagcgggtcgcggatcactgttccaatatcggcgtttgtattctgcgtattgctgaggacagctttgacacgcacgaatacctcaatcatgtgaaagacgggcatgacgacacttttgaaaaccgatataaccgctataaggaaaagtatcagcttgcataatcgttcgcccgtgaaaggatgatatttcatgatttatattgtagaagatgacttgaatatccgtcagatggaaagctacgctttgaaaaacagcggctatctcaccgaagagtttgacgatggtgtttcttttttcgccgcatgcgaaaaaaagctgcccgatcttgtcctgctggacattatgctgcctggagacgacggactgaaaatcctgcaaacgctcaaagccaatcatcggactcgttttgtgccggtaatcctcatcactgccaaaacaaccgagctggacacggtaaaagggctggatctgggagcagatgattacataaccaagcctttcggcatcatggaattcatttcccgggtcaaagctgttcttcgacgcaccaattcctccggcgatggcgttctggctttgggacaaattcagatggatgatcaaaaacgccaggtctggtcagaaagcagcctgtgcgagttgacttacaaagaatatgagctgctcaagttcttcctgcaaaatcccggcatcgtcctttcccgtgaaaagctgatcaatcgcgtttggggaattgactacgaaggagaaagccgtaccgtagatatgcacgtaaaaacgctgcgccaaaaattaggcagtcagggcgccctaatcaaaaccatccgaaacgtggggtataaaattgaggtatagggaggacccgtatggaagaaaaaattaattttcgttttctttttatcggccttttgtcgattcttttaacagccatttccatcactctggttttccataccgcttttcaggagcaagtcaaagaagatttgcaaaacagcgctggaatcatcgccaaaaacgatgattttctcactgatcccaacctgcttgcggtatatgccagcgataaaatgcgtattaccttgattgctcccagcgggcaaattcaatatgaaagtagcgccgacgaatcccagatggaaaatcatctctctcgcccggaaatccagtcggccctgcaaaacggttttggcgaggcaatgcggcaatccagcacgttgggatacgatacctattattatgcgctgcgcctgcaaaatggcagtatcctgcgggtgtccatgcaaattcgcaacatgtactccatttttgaaaaggccctgccaatggttatcctgatcggatttctgattcttctggtatccatcattctttcttctcttcttacaaaacgtttgattaagccgattgaagtaatggcccagcatatggacaccatggaggccaacactccttacaaagaactgattccctttgtccagacaatcaaagaacagcagaaaaagaaaatggaaaccgcccagatgcgtcaggaatttactgcaaatgtctcccacgaattaaaaacaccgctgacctctatttccggctacgcggaaatgatcgaaaccggtcttgcccaaccggaggatattcctgtttttgctgagaaaatccattccgaatcccagcggctgctggaactgatcggagatatcatgaagctgtctgaactggacgaaagcaaaaaggatctcttttttgagcgaatcgacttggctcaaattgtgcaagagaccaaggcccgcctgcagctgcaggcacaaaaggcacaggtttcgatcctgacggagggaacccccgctttgataaaaggcaaccagaagctactggaagaattaaccttcaacctctgtgacaatgccatccgctataaccatcccggcggcagtgtaacaatgcgcacggcctgccaggaaggacgcgcactgctgattgtttccgacaccggcatcggtattgcaccagaccaccaaaatcgggtattcgaacgtttttaccgggtggacaaaagccgatccaaagaaacgggcggaaccggcctgggacttgccattgtcaaacatatcgcgattcagcaccaggcgctactgtctatgaaaagcaaaccgggagaaggaacgaaaatcacagtttctttccctgtttttcaagaaccgcacaattcctctgcatcataacattacagccggatgcttggaaaaatctccgtgcacccggctttttgaagcgataatttgcaaaatatcgttttaccagcccaatcaggtcacctatggaaaaccttcatctttcacaccaaaagaaaaaggcgctgtataagcgccttttttgttacttaataatttttagctaaaatctggaaataagcctgcggatgtgcacaaaccgggcaaacttccggcgccttctctcctacatggatatgtccgcagttgcggcagacccatacgacctgtccttctttgcagaaaaccttattttcctctacatttttcaaaagatccaggtatctggcctcatgctctttttcaacggcgccaaccatttcaaacagcttggcgatatggtcaaagccctcctccttcgcttcttttgcaaaggtggcatacatgtcagtccactcataattctcaccggccgccgcgtctttcaaattctccgtagttgtaccgattccgtcatgcagcagcttaaaccacattttcgcatgctctttttcattgtctgccgtttcctggaacaaagcggcgatctgctcatatccctctttttttgctttcgaagcatagaatgtgtatttgtttctcgcctgagattctccggcaaaggcagtttgcagattggcttccgtcttggtacccttcaaattcatagtttatcgccccttcttattaagaatgattattaactattttatatcatcttctccatgatttgtcaatcagaaaaaggctcttttgtaaaaattaacaaattgctcatgatttctctgttccttttctctaacaacattcttgtgatttgacgaacattatattatactagaaatgtaaaaagggggagttttatgattctgactattgatattggcaactccaatatcactatcggggcttaccgtggcaatgagcttttgtttttaacccggatgggtaccgatcgaaccaaaatgccggatgaatacgcgattgccattcattctcttcttcgcttgtatggctatcacggcagtgatttggaaggtgcgattatttcctcggtggttcctcccctttctgcctctttaaagcaggctattactcgtattaagccggtgcggattctaacagtgggccccggtattaaaaccggtctgcatatcgccatcgacaatccggcgcaactgggtgctgaccttgcgtgtgtatcggtggccgctctggaaaaatatcctctgccttccattgtaatcgatatgggaaccgcaactaccatctcggcgatggatcgggatggcaaaatgctcggcggttccatccttcccggcgtgcgtatttctttggaggcgctgacttcacggacagcgcagctaccgcagatcgaactatccgatccaccgcgaagtatcatcggcgccaataccatcgactgcatgaaatccggtgtcctgtacggcactgccagtatgttggacggtatgatcgaccgttacaaagcagaactgggtgaagatctgaccgtaatcgctaccggcggcttgtccaaatccattgcggtactgtgccgaaacgatattgtcttggacgaaaatctggttttggagggcctgcggatcttattccaaaaaaacacaaaataaatagattgctttgagctgttgcggcttttttaaggccgttagcaaatagaatgcgctgtatcggtaggaaccgaacagcagcaaggaggattttttatggcaaaagcaacagaaaaaactcgaagactggttcagatgtctatcttaattgcgatcatgctgatcctggcgtttactccgttggggtacttaaaagtcggtgcgattgacatcacattcatgactattcccgtcgtcgtgggtgcaattcttttaggacccgcatccggtgcggtgcttggcggcgtttttgggctgaccagctttatccaatgttttggtatgagtacgttcggcgaggcgctgctgaacataaatccttttctgacctttttggtctgcatggtaccccgtgttctcatgggatatctgtctggtgttattttccagctattgcaccgcggtggtaagacaaaaattctttctttcgccgtatcgtctttatccggtgcggtattgaacacagttttttttgtcacgatgttaatgctgctgttcggctccagtgattatatgatgtcaatgcgcggcggcatggggctgctttcgtttttagcggcctttgtggggatcaacggcctggtggaagcaatcgtcgcgtttatcttgggaactgctatcagcaaagcgctggtacaattcttgccccaagaaaaacaagcttaagaaaccaaaatgggcggcgtggagaaatctgcgccgcttatttttcgtttaggaggattttatggaaactttatttgaaaaccgttacaccgtcaatcttcgtatgctccgctccttttcccgcggcgccagcttctcccaaaaatttttttccgcttttccctggtcggaatggcggtctgcgcgctggcgctagtctattgtctgctatttcttcctggtgattacaatgcgatggtttcgcctgcggtctcttttctcctttgtctgatgctgttcttctttcccagtttaactgcacaaattgtctaccgtaacacgaaaaagctgcacggcggtattgtcccggaaacagttgtccaattttccaacgatgaaatctccatgactgagggaacattatccgttcgctttcaataccggcaaattacaaaaatccgggaaaccgggaatttgtatgtgttgatgctgggaaaggacagtggaattatcctggaaaaaaactcctttaccatcgggaattttgaggcgtttcgctcttttcttcccgaaaaatgtcccaaacgaaaaaaatagccatccattcacaacataacaaatataaaaggtgcgcctttctttacaaggccgcaccttttttgcaaacgattcctgagcttttgctcacaatttcgatgtttcttctattttaaaaacagaataatacaacaatcaaacagcctctctcaatacaaaaaacaccttttttcatttctttcctcattgtattccttttggccgtcatctataccaaactctatacgatctacaacgtgtgtcacatcatccgtacctttcttccgctatgtctctttggggaggttctgccgtttgagaaggcttcttttgccacgttgtcagtacccttagcgccagatctcttttcctgcataagtccatgctgctctttgttccaagaccccagttttgcggtgcaaaaaagcatagcaaaactgccataaaatctcaatacatggactaaacggcccatagcgtcaaatttcatgcatcatccactttgcatgccatcataattactttttaaacacatacagttttacaccaactcgcacaatcggcaatacggcccaaaaaattgaatcgagccgcccttttccacaagaaaggattcatcatatagcccgtaaaaagcatctgctttttttgcggcttccctgatatccggcatccgttcttccgtgaccgatgcaaaatgcggttcgatattgaaatccactaaaccgatgccctcgtattgggacaggcggacaatgccatcatccaaatccttggctacaaccacctgccgtgccatattgatcgacccggcgctcatcccaatggtaacgccatcctgctcgcgcagtggctcaatcagtctatactcttcgatatggcgaatttgtgtcagcgttgggccaccggacagccaaatcacatctgctctttggaccagagatacagcttctttttgagaaatggtgaaatctaccaacgcggcttcttgaaaagaaattccatgcacagaaaaatcccggatatattgctgcaaatactgctgggatttttcatgcgccgaaaaatcagaagccaccattacaaaaaatccctgagccggaagatatctgcgaagttctgcgagaaacatttctgtaaaaccattgggaaaaccacttgtcacgaaattgaccttcaaaaaaaatctccttcttcatacgaaaaagcggatataaaatccgctttttctgagcaaagattagttttctttgtcaatgggtttccagccctcgccaatgatttcgccggcctcagtcacaacaataaacgcattgggatcatggctgtgcaccaatgttttcagcttaaaaaactccgttttgcgcacaacaaccataatcacatccatctctgtaccggaataagcgccgcgcccttttaaaatcgtcgccgaacggtttagatgcgcgatgatatccttggtgatttcatcgttttgagtagaaacgatatgtaccagcttcccattctccaatccgtacagaataccgtccatcacttgggcgctggcatacatggcaatcaatccaaacaagcttgcctcaatattgcggtaaacaatggccgccgcggccagaacaaagcaatccagaatcagcatcattcggccgatcgggatgtgcggtgctttcagctgtaaaagcttacccagaatatctgatccgccggtggtagatccgcgcataaataccaccgccaagcccgcacccatgcaaacgccgccaaacaggctggccagcagcgcattgcccgtataggtgggaaaatataccaccacatagtccagtaccgccgacataatcacgactgacttgagtgttttcgctgtaaaagttttgcccaaaatcaaaaatccgatgatcaccagcggcacgttgatggcaaaattcatcgcgccgataggcaatcccgtcacaaagttaatcagcgtggcaacaccactgaccccaccaggcgccacctgattgggcgctgtaaaacaaagaatccccacgccgtaaatcaaagaaccgaccacatcatatagacagtccacgcagaaggttttgatttttccgctttttacccgtttcacttctgtcccaccctttccgtaaaaattcgcatcgccttgtcaaacaaaaagtacagccgctcccaatcgcctttcagatacaaaaagccaaacagtgcctctaccccggtcgctttgcgataatcggccatctgagcgtttttgggcacactgccggtatgggcatttctgccccgtttcagcatatccctctcatcctccgtcaaaagcggctccaacccatcgtagactgccgcctgggcggatgcccgcaccatttccaccttatgggcattgagctttttcggcggcatgctgcccgcctccacaattcttttgcgaaccagcagttcatatacgccgtcgcctacaaacgccaatgtcaaagggctcaaaagctttggattctgttcttccggcgccataatattgctccttacttaatatagtcaaactcaaagttcaaaatgcttaccgtatctccttcgttaatgcccatacgctccagctcttcaataatgccggatttaatgagaactctttgaaagtactgcaaggattcataatcttccatatccaccattcccagtgaagacatcagccaatcggcctctacgatatacacaccatcctctatccgaatggtgaagggacgctttccgccttccaacggctccggctgcggcgcaggttccggctcgtactggcggattggcggcaattgatccagctgtgctgccaccgcatcgatcaaagcgtctactccctggcgtgttgccgcagagatggaataaaacggcagccctttcccttcgatataagctcgaaacacctcgatctgctccggagaggccatatcgcacttattggccgctacgatctgcggacgagaagccagctcctcgttaaagttttgcagttcccggttgatcgtttcaaaatcttccaccgggtcgcgtccttcgctgccggatacatccacaatatggacattcagccggcagcgttccacatggcgcaaaaactcatgtcccaggccaatgccttcgctggccccttcaatcaggcccgggatgtccgccataacaaacgactttccttctgccacttttaccatgcccagaaccggcgtcagcgttgtaaaatgatagttggcgattttcggtttcgcctcgctgaccattgaaaccagcgtagatttacccacattggggaatccgaccaagccaacatcggctaacagttttagttccaatgtcacctcgaatgcttcacccggcagtcctggcttggcaaaacgtgggatttgacgggttgccgtagcgaaatgacagtttccccatccacctttgccgcccttggctactactactggctcattggtggaaacatcggccagaatccggccggtttctgcatctttgaccagcgttcccaaaggaacccggataatcaaatccggcgcgctttttccagtgcaccgtccggctcgaccgttttccccattctgggcaataaaacggcgcttatatcggaaatccagcagggtggacaggttggtatctgcctggaatacaatactgccgccccggccgccgtctccaccgtccggcccgccggccgctacatacttttcccgatggaaagatacggcgccattaccgccgtcacctgctttaatgcgaatttttgcaacatctacaaacatgaaaaacctccccttatgctttcttcctagtatcggcaaaagcataacaaaaaatcccgaggagacctcgggatttccaagctttgttactgaacgggataaatgcttacctttttgcgatcccggcccacacgctcaaaacgaacctggccatcaatcagggcaaacagcgtatcatcagaaccacggccaacgttctctcccggatggatgtgtgtgccgcgctggcgaaccagaatgttgccggccagtacatgctgaccatcggcacgtttgacacccagccgtttggactcagaatcacggccgtttttggtggaacctacaccttttttatgtgcaaagaactgcatgcttaaacgaatcattcgttacacctccgaaacaattatctgaatggtatttctgtaatcttctgccaagattttcagatgctctaaaagagcctccagcagcaaagctgcttcctctcctgcgttggacggtaagagaagggaaatccgattttcctccactgcgacctctgccttttctccgaactgttcagtaatggcattggcagtcaactgaactgccgaggtcacgctggcgcatacaatatcccggcccgcgtcggcataaccggcatgaccttcaattgaaaacgccttgaacttttggcccgatttttgaaactgagcggtaatcatatcggattacgctttgatttccaaaatctcaaccttggtgtaaggctgtctatggccaagttttcttttagaagatttcttcgatctgtaagtaaatacggtgatctttttggacttgccgtttttcgcaatctttgcggtcacggttgcaccgtccacataaggcttgccgacaacgattccatcgtctttgccaactgcaacgattttgtccagttcaacaatctccagttcctcatagggaagcttttcgacgtaaatcgtatcgccctgctcgacgcggtactgttttccgccggtttccaaaatagcgtacatgttaaggcacctgcctctttcttatagactcgctgcccaaaggcggcgcaaacgcgcacttacagccagttgcatgcggcatggattatcataccatacagatagcggcttgtcaactaaaaacgcctgttttccgcataaaaaagccgatttattcctgttttgccgccttttgggcactggtcagggtgtttttcaaaagcatcgtaatggtcatggggcctacgccgcctggaaccggcgtaatgtaagaagccaacggctcaactgcggcaaaatccacatcaccgcaaagctttccgttttcgtcacggttcatccctacgtcaatgacaaccgctccgggttttaccatatccgtggtaacaaactttgcccggcctactgccgataccagaatgtccgcccgccgggtcacttcggccaaattttttgtccgggaatggcagatcgtcaccgtgccgttttcatgcagtaaaagcatcgccatcggcttaccaacaatattgctgcggccgataaccacacattctttcccgctgaccgaaataccagtagaatggatcaactccattacaccggcaggcgtgcagggcagaaaatcgtaattgccaatcataatttttcccacatttaccgcatggaacgcgtctacatcttttgatggcaaaatccgctcaatcaccgccttctcatccagatgacggggcagcggaagctgaacaaggatgccgtggatcttgggatccgcattcagccggtccaaaagctgcatcagttcctcctgggaagtttgctccggcaaagcatattcctcagaataaaagcccacctgctcgcaacctttcttcttgtttttcacatacacatgagaggccggatcgtccccgacaattacaactgccagtcccggacggatcccggtttctgccatcaatttctgagcgtccaaggcaatctgctcccttgtttctgccgaaattttcttcccgtcaattattgccatttttatcctcctcactgctttatgccctatccgcaaaaaggactttccacattcgttttcctgcttttgtctttgctccgttttgtccgaaatctatttttcttccggatcgggcattgaggtctgcccgctttcagctggtttttcttcgtcaggctgctgctccttttcctcagggacaggctctttttcaacctgcctgccgtcttctggggtatgcacaggattttccgcccaatccggctgtttctttccatagaatttgccttcccggatcagctgcgcctcttcggtatccacatacaacttcaaatattccggatcattgctggctttcttcttttgcagaaccaccagcatgataatcagagcaacaatagccgaaaaaatcgcaaaaacctgggatacccgcagattgccaatcatcaggctgtcagtccgcagaccctccaccacaaagcgctccacaccgtaccatatggtatacaccaagatcatctgtccgtcaaacttccggcgcttcgtcatccagaccagcaagaagaagccgagcagacaccaaagtgattcgtaaaaaaatgtgggatgtactccaatcgcatccattccgcccaaagcgtcgacttcagcagaagtcagtgtcgccagatatcgctgtacctgtgtggagccaattccgccggcatattcgctggtcatccgccacggaacagtggtagcgcagccaaacgcctccacattgacaaaattcccccatctgccaatagcctgcgccaaaatcaggccggcagagcacaaatccagcatcggcaaaaaacgcactttccgccaccggcacaaaagccagccgctgagcactgcggcaatcacgccgccgtaaataccgataccgccgttccaaatcttaaaaatatccatcaggttatcccgatacatatcccaggaaaaggccacataataaatccgcgcaccaatcacgccgaaaacgatcgtacccagcaaaacgtcgatgacccgatctccatccagcccgaatttcttcgtatttttcaaaacatacagcgttcccagcagaaaggcacatgcaaaaagaataccgtaccattttattgtcaggctgccaatggaaaaagcgtcaggattgatctcaaaggaaaaacccaacccgggaaaagaaacgatctgtgtcataccaaagctccattctgttgtgttttctctgcttgattgctcagtctctgccgccaatcagcttaacccaacggcgaaatgaccgacaaagccgcatattctgtccggtagtcctcagccagccgccgctgcgcttcttccagagtagcgttggctgccgcttccaaaagatcatacaggcctaaaccggaaaaatgggcgcctaccatggcattggcaatggaatccggacggttaagcattcggatataacggctgtaaaccgcctttttaccccgctcaaatgcctcgagagaaattccttctttccgcacccgctcgatctcgttaaggatctcctgcgcagcccggtccggatctttcgattcaccagaaaaaatcagcgcagaaaaatcctttccgcagtctgtttcgctgtcaaaggtggcgttgataagaccgccgtcgtacagccgacggtataacggagaagcgtcccccgccaaaacttcgttgacaatctcattgacaatgctgcgaagcacgttggttttaggatcggcaggatgcactttcagccccagtgcaaacatgggggcggcaaccggaaaattctgttctatccgtttttgtgccacctgatccggctcctctacaaaatcccgctccagatgcagctgagacgccggacgaagcacttcatctgtgatacggacaacactttccggcgaaaagctgccggccactgtcaataccatattgtgcagattataaaaagcatgataagtctcatacaggctatccgccgtaatttccgcgatactttccaccgttccggcgatatcaatggcaatggggtgtttcacatacattgccttgagcagattgaataaaaccctccaatccgggttgtcatcgtacatcttaatctcctgtccgatgattccctgctctttgctcaccgtctgcggggtgaaataaggagtcgtgacaaactccagcagtatgcgaagcgactcttcaaagtgatccgcgcagccgaacaggtaagaggttttgtcaaaagaagtaaacgcattggctgatgcgccggtcgccgcatatttagcaaatgcgtccccatcctcattttcaaacatcttgtgctccagaaaatgggccatcccagcggggatgcgggtaaagtccgctttcgggtcggtccggaatgccatgtccaccgaaccgtaatcagtagtcagcatggcataggcggaactgaagccctccatcggatataaaagcagcgtcaacccggaaggatgatcgattttctggtagctttcgcgtacacgttcggaacgaatttcctgtttcattggtcctgtccctccttttttgccgctaaaaagaataccgtatccaacgtaatctgagcagcagcagcctgaatctgctctttactaatccgagccacctttcgggcattttctatcggcgactcgtcagacccgcttaaaatctgagtcaaataccaattttccagtccattcagggtgtcaacggtagatttcagcgcattattgatggtcaggacagttgcatccagctccgcgtcgtcaaacgctccctgctttaccagttccagctggcgcagaatctcctcctgcgctttttgttcgttgccggtttccaccccgctgtctaccatcatcataccgctcgccttgtcataacgggcagcgcagtaataacataaagacagtttttcccgcacgttttgaaacaagcgggaaaatggcgtgccgccatacagcgccaccatcatcttcatggcgtccacttcatccggcgacgtagtttcgccagtgcggaagcccatgaccagctttccctgagcaatatccatatcctcccgtaccgttcggacctgtttggcactaacacagggcaaagaagcatcgtatgccaccggctggcgctgtgttttggcaaatcgagcggaaaagaccttttctgccgccgatggatcgccgcagccaatgaataaaatctccaccgctgcccggcgcagaatgtcatggtacgcatcggttgcgctcttcgccgtaatcagctgcgctttttcccgggtcccgtattttttcaccgccagggggcttccgtcaaacatcagcgaaaggcatttgttgatggcatattcccgtttatcgttaaattccgattcaatggtgtcaatgagattctgcctttccagacaaacatcttcttcggaaaacaaaccgttttccaaataagggtcgaacagcattccgcaggccaaatccgcacattcctgcaccaacggctccccagcaatgctgtaccggtcatccaaggattgaaccgacaaattaataatctgataagcaccgtatttgcgcacgtctccgtctacaattgcgccgtatagatcacacagcttttcattcagctgggtaaaatccgggcagtctttgtatctcagccgcaatacaaagggcacaatcgcccgatttgccgctgtttcttcctccagaggaagcaaaaggttcacagaaatgcggttggatttgaactttgggtcggtgatcgcagtgaaaaacacaccttccccgattttttcccgtttgatgcgatcattcattgattccagctccgttccgccgtcataacggctattatcgtctccatttattttatcccgctgttatgtaggaaaacatttgtatcagaaaatcttctttttgaccccgcaggcctcaaaaaacgattgattctgtaaagagcggaggacatttttatccatcagtaggaccgttctttcctgcccttccgaaaagttggcttctctgtctttttcctttttcaactcagtgcaggactttaccagctcataccgccttcttttcgaacgctttttgctcagcctttgacaaagtataaatttattataacacacgtggattttttcttccacgggcttattgacgtaaaaactgaataatttgtaaaatttggactattttcgccatatataaaagccgacgctgattagcgccggctttggctttatcaaaactatctgattttggatttgacctttgcagccttgcccactctgtctctgaggtagtacagtttcgcacggcgaacgcgaccctgacggacaatctccaccttgtccacgttcggagaatgcagcgggaaaactctctccacaccgcagccatgggaaacgcggcgaacggtaaaggtctcggcaacaccgccgtgttttttggcgatgacagtaccttcaaatacctgaattctctctctgtcaccctctttaattttcacgtgaactcttacagagtcaccaacctcgaaagaaggcacttcggctttcaggctgtcctgtgcaatcagtttcaaagcatccattttcatatcctcctcatattttcagacgttcatactcattgcgtgaatgacagaggaccgcccgctttaatgtcacggcatagccgggcatcaactcccgtcgcggaatacgacggcacataatgctcatatatgttaccatatcccttctaaaaaagcaagagattatgcaaaattctttccgtccttggtcagcaccgctgttttctgtaccgctagccggtcaatgagcattcccgtttgcactccaaaggcatccagcaccagcgtgggattgatattcagctcatttcctgccggcaactggaccgaaagcaataccatatctccatccgcttgaagggaaagaccgtgcagatgctctttgagcgaaatctctctttcaccctttttggtccgcttcatagcagtaatctcgggctgcgcaaaaaacgcctctaaaatccggacagactgttccgaatccgtgtcggccagcgtcaaccataccgtataggctgccagtgcgatgtctgctgccttataaaccggaggcgcggcggcatatgcttttaatcccatgggaagcacgcggttgaggcggtctacaatctctccagattccatcggctgtgtcagccgaaaatccacacattcgcacaaactctcgtatccgagcgccagcggcagcggaaaagtcagatatgcgtggggattaaatccttccgtgaaccacaacggaatcccggcccgtttcatcgcccgctgaaaacagcggttgatatccagatgggaaatatatttggctgtatcggtttttcggtaaaacacccgtatcggctccatcaaaaacaactccttcctatcaggcagttggcgccgcagccggaacacttttcccggcagttgggagtaggcgcgtccccatgggctttttggttttcccgaatcaaaaactgtttggtcacgccgtaatccagatgatcccaaggcatcacttcgtcgtaagaacgggtccggttggcgtaaaaacttccgtccactccgtttttctcaaatgccgccatccaagcgttataattgaaatgctctgtccatccgtccagtttgcagccgtttttccaagcatcttccagcactgcgcacagccgccgatctccccgggccaataccgcttctaaaaaactggtttgagattcatggtaattaatccggatttttttgctgcggttatatcctaccatatgatgctgcttttcccgcagcatttcctctgtatcctgcggctcgaactcgaagggcgtaaaaggcttcggcacaaagcaggccaaactgaccgtaacgttaacccctttccccttgggcttatccggcagactgtaaaataaatccaccactttctgcgccaggtccactaccccttcgatatcttctttggtttcggtgggcaggcccatcataaaatagagcttcaccgaagtatacccaccttcaaacgcggtccggcaggtggccagcacctcttcttcggtaacatttttgttgatgacattccgcatgcgctgcgttcccgcctctggggcaaaggtcagaccgcttttgcgcaccttggtgatcttttccatcaagctgggagaaaaattgtcaatccgcaaagatggcagggacaggttcaccttatcctgctccgtccaagggagcatctcctccaaaagatcttccagctgggagtagtcgctggtggacaaagacgacagcgaaatctcatcatagccggtagacgcgcataaatcgcagccatttttgttgagtgtttcatagtttttctcccgaaacggccggtaaataaatccggcctgacagaaccggcaaccgcgaatgcagccgcggaacagctcaattacggcccggtcgtgaaccgtttccaaaaacggtactacaaaactgtccggaaagaaaacgcggtccaaatctttcacaatccgcttatgtaccaccgccggcgcgccgtcccggggtgttactgcccgaatggtaccatcctcttgataggacacttcgtacagcgacggaacatataccccttcgattttgcaggcacggcgcagatactcctcacggctccagccttctttctttgcctgcaaaaacagatgggccagttccagattgacctcttccccttcgcctagcacgaacaggtcgataaaatccgcaagcggttccgggttgcaggcacagggacccccagcaatgatcatcggcgccaggcttgtccgctgcgacgtgcgcagcgggatccctgccagatccagcatgttgagaatcgccgtataggacatttcatattgcagcgtaaagcccaccatgtcaaaatcccggatgggatcacggctttccagcccaaacagcgggatgccctctttgcgcatcatcgcttccatatccgtgtccggcgcaaaaacccgctcgcaccacatgttttcttcccgattgtataaagaatacaaaattttcatgcccagatgggacattcccacttcatacagatcgggaaagcaaaaagcaaatcgaaagtccaccgccgcaggatcctttactacactgttgagctccccgccggtatagcggcccggcttttgtaccttcataaaaattcgttccagttgagaattcatggtttttctcccattctatcacattttcggccatatcaaaattttattatatcggaactgatagctgaatgcaaccctatttccattcatagcagactgtattcagctggaaatttacttttcttttcacatgtgttgtactgttgataaatcaaatagaaaggatccgtcttttcagaagggcttttcgtattgcagcatatggtgttataggaaaaagtccttttttattatctgcccggcggcattccacacttttaaaaggagaatccgcataaaaaacaccataagaaaaatgatacatggatgtttattgcagtagataatcaaactctctctggacttatttctaaagtatccgggaaagaccagccgacgtgccagataccgcacactaagaaatctcctcgaagacacaaacagttttctatgtagattggaataaagctgcaaaaacaagaacatccggtttgtctaagccgtatgctcttgcagcggatattttaaaagaaatctgggattcccgatcgttgaaagacccattccgtctgtcttttaacctggcggcaatgacacgcatccgctcaaatttccccgtttccaaccaaaagcagccacagcagataagcggatgtcaccagcaaggaagcgttgtaaccgctattccaaaatatcaccgcagccagtaccgccagtcctgcgccccccaaaaaggaaatggttctctgccagaaatccgcccggctaatctccattcgcttttggagaaagcagcgcaaaatctgcccgccatccagaacgccgacggggagaagattgaaaatccccagcaaaagatgaacccggcaaaccgccggatgtccagcaaacagtcctgcggccagcagattgaccgcaggacccgcggcataaatcaaaatctctttgtgataagatagacgggttcccgggcgtttttcaatccggatgccaaaactgccggatacgatcttctgaggctgttctcctaatacagtcatcgccaatagatgaccgatctcatgagaaagggcagccagcaccatttgcccgccaaggccggtgcggtcaacaagtaaaaacagaatcagaccgcataaaaaaggaacggaaatttgtatttctgttttgatattactgcccggcaacttcgtcctcctgctgtacagcctgtctggtgccaaaaatccaagctggatctacccgcattccgttcacacgaatttcccaatgcaggtgcggtccggtagaccatccggtggagcccacatagccgatcagttctccctgccgcagcaccgttccttctgtcacggcaatcaaatcgcagtgtgcataaaaagtcgccagtccactgccgtggctgacgagcgcatagtttccgtaaatatccgaccagccaacctcactcactgttccgggccaagcggcggcgatacgcgtaccctgggctgccgccaggtccagccccgtatgaaagtccagttcgccggtaatcgggtgaatccggtacccaaaaatactggtaacagtagcccttttcagtggcaaaagcggttttgcactgaccgccaccggagaaagcagacacccttccggcgccggatattgggtagcgccagtaccggaaacactgaccggcaggtatccccccataccggtcggcccagtagatgcagcctgctcttcctcaccactttttccatactgttcaatgtaacggtacaactgcttcagtttttccggcgacacccctgcctgctgcgcttgatctgatggcggagacaaagacgcggcatccggcgtggtcgcaggtgcctgcttttccgtttcgtctctttttaaaatgccagacagcatatttcccacccgctttgtctggtccgctgcattgatttgaaccagcagcagctgtttcccttcggcaaaccattgggcatctgtcatccatcctcccagtaagcacaacagtaaaacagtgcaaactgcgatttggtagggcaggataccagtgctttttttgtacgcatttttccgatggtaataagaaccctccttgtaagtcgggccgctcctgcgaccgctgtaatcccgacgatcagccatattttctgcctccgttttttgtttcctgagccatcctatgcaaaaaacggacaaaatatgcaaaaagagaaagcgccccacgaaagaacgctttctcaaattccaatggcttatggatatttttgcttggaataatacggcagcctcaaggcagttaatgccaaatggaaccgccgtctgtcacggtaacggtccattcacaggtggaaccatcttccgccgtcagagtaatcgtagcaacacccgattttacgccgacaacaaccccgtcatctgtaaccgttgcaacctttatgtcgctgcttttgaaagtgactttaggatttgcgccggcaggacgcacttcataggtcagctgcttgctgtttccgcgactgacggagatttcatcctcttccggaacaatgccatccaactcggaagatgaactgccggaagaagaactatcgctgttggacgaactgctggaagaggaggaaactgtgactttgcaggctgcggtcgcaccgttgctcgccgttacgataatcgttaccgtcccgtttccctgcgccgttaccatgccgttcgcatctaccgacgcgatattcccattctctgtcttccagctgtaagtaatctcaccgctgccaccggtagccgaagcggttaactgatatttgtcgcctttttgcagcgcaatttcgctccggtttaagctgacggttaccgccgagccttttaccgtgattttgcaggtagctgtctttccgccgctgacggttttcgccgtaatagtagcggttccttcttttttgccggtgacggtaccattggcgtcgaccgttgccaccgactcgtcagaactgctccagagcgcctctttgttggtagcgttttccggcttaatcgaagcggtcaaagacagcgtttcaccggctttgatcgtcgctttggtctgatctaaagcaatatcagtgacagctaccgcagagccgccggacatatcacccaccgactgtgtgccggttgccacatttcccattcccatggaagaaaggaaggatttgattgaagaggctaccgacgatgcaatggacttctggtaactggctgtgatcagcttgtaatactccgactggttggaaacaaatccagtttccaacaggattgccgggaattcactgtcgcgcgtcatgtaaaaacgcccgaatttcgcgccgcggtttcccgtttccaacgcactggctgttgccgaacttgctttcgaagccaaatcactggaaaatgcattgaaatagtaagcttccgaaccgctggccgaagaactggtagcagagtttgcatgcacactgatcaaaaggtgcggatctgcgctcttgccgttgttaagtcttgtcagcagttccaccttgccgttggtggtattgttcatgtaaacataagcgcccatggattccaattctgctttgagatatttggaaatagccagattcacttcatactcattgtaatcctcacggaatcccagtgcacccggatccgtattgcagtgcccgggatcgattacaattctggcgctgctcatagaagcaggcgggttattacactggaacaccagatatccagtatccgattcataataggctttataccccaaaaatccacttttcagtttgagtttcagcgtactgccgctccaagttgcggaactaaacagcggattcttcgaaaggctcagatcatccggcacactgtcggtatagtggaagtcgatggtgatggcgccggaagaatattggaaagtatacgccgccttttgggacattttcagtttgacataggtgtgtccgctgtcgctgaccacctgcaggccggaaatcacattgttttccatagagccgcccaccgtggtaatatcttttgaataaacacgccgaccggaggccaggttgtagtaagagtaggtggttccgccctctttgtagatcagctcgtcaccgacaacaaaatccaagctgcctttacaaagcgggaaataagacggttgcgacaaatcgtccaaagtgttgtctgggaaagtctccgcctgggacgcagttacctgtaccaatacgccgtcgctgatctgcacttttttgttgatggtcacataagcgccctgcagagaatcggtcacgccgctccaggttgcagaaatattgatattacccagcttctgcaccgaagaggttccggctggaaccgtaaacttaccactgaatttcacaaagttcgtgtctttatccgtagaatcatcctctgccgtatcgcgggttaactgaatcgattggccgcccagcgaggcggtcactttcgcgtctttgtacgccatcgcggacgcagtgacttccgttcccccatttacagtcaggttgccctgcggcgaaatgctctccaaaaccttgaccacacgggtaatattataggtcaccgtctgatccttgtgcttgaaagtaaaggtattttgtcccggcttcaattccaattccatgctgaaataaccgttttgatcccgttccagtttttctccgttgaataatgcatcaaaataggggtcagaagatccgctgaataccaccgtaggctcataggtcgtaaaagtagttttctggggcttggctatctccagcttggtcgcaaaatactcgacatccagctcttctttaaacagcttctgcagggcggttgtgcttccttgtgggtctgctttcaggcggcttaaagagtcgaacatgctgcctttgtacccggcaatttctctggccgccatcacctgctctgtcagctcggcggggcttgtccatcccgtttcggtggaaaccgatttgctggaagcctgcaccgcatacagcggaatatttttctgctgcgccaaagctgcccaccatttgacgacagtggcaaacggcgtcgcagaattgcttctggctgcgaatgcctttaccgcaacaaaatcgtagtaaccccgctccacaaagctctttgtatccgcgtagccgttgatcagcgcctggaaactggccgatgtatccgaccccgcatcgttaacgtccttattcgcccatacggcatcggacaaaaggcccacctgaatgctgcgccggccttgatggaatgcgtccaccactgctttcatggcagattcggtggcactatacatatagttttcaaaacccatgccgccgccagtgcttaaatatgacgcataagcagtgccattcccggaagaagccagataataatgatccagtaaaacgccatccagcccatatttctgagcaagcgcctttgcgttttccgttacagagcttaaaaccgctgcatccactttgtcagcggctacatttttgccgtcctgctgaactttcagcacatcgaaggtcgaataaacaaacaatccattttcccggcatttggcaatgatatactccatcacgtcaaaattcgtgggaacactggccgctgtaccgctttgatacaagacataatccccatataccgaatcaatgataatcgtgttcatcatcaggtttttagcgtcggcaaccgcactgtcaatcgctgcttttacagttgccgcgtcatagtttccgccggtcagaaaatctgtccccggaaccagccaaactccgcgcatctcgtccggattattgaacaccaccgacgtattatccggctcttcatcctccggctgctgacctggcacttctcccggttcattttccggatcgtccaccgggtcttctacggcactgtggcctggattgtcggcaggatctttctccggcgtatttgccaccactgctaccacggtaacagtgagggtaatgaccgccagcagaacgccgatgacgattcccaatatttttttgttgttcagcaaataagccataatatgtacctcccccgcggccggccgccgcttctctccttttcccttgttttacagaatgtccgccaaggcgtttttctctttttccacctggctttttaccgacgaatccggtacgaacaaggacgcataccgaaacagagcaaacccgccgtattttttataatctctggcggactgcacctgacgggccaaaatagacgaatcatggatccattcatttttgccgcttccggcccaagtatccgtcaatccgattttatagggtgccagaccgatataaagcgaaatgccggaaaccttgattttattattccacaacgccaccgtctcggtataaggagaggtggagttgttaaatccaaaatagatttgcgggcagatgtaatccacatatcctttgttggaaagccatttgtccacatcaatatattgactgttataattgttggagttgttgccctgaggacttataccaaagcggatcgaagtgtctgccgctttgatcgcagaatagacatcccgaatcagaatattgacattctctcgccgccagtcgcccagcgacaaagaccccccgccatttttgtattcccggtaagcagtgctgtcaaagctctcatccggggacggatagaaatagtcgtcaaaatgaatgccgtccaaatcataattctctgccagttcccgcacgccgtccacaatccgttcccgcaccgcgggccgtgccgggttataatagataccgcctgcgtaacggattacgtaatcctcttcctcgtcctcccactgagatgcagtgtttgaggcagaaagcgcattgttattgcctgctgttcggatccggtaagggttcacccaagcttcgatttccagccccagagcgcgagcttcttcaatcatcacctgcaatgggtcatagccggggcttttcccctcggtgccggtgcacaagtaggaccaggggaaataatcggaatcataaagcgcgtcaccgaaaggacgaacctgcacaatcaccacattgcatcccagattcgacacattttgaaaggccgttctgatattttttcgaaaagccgactgtccctgccctttgagcattccggaaagatccaaataggaaaaccacaccgcccgatattcatcgccggtgtagctgccggtaccggaactttcaccggcctgagaagaactgctttgcgagctggaactctgcgagctgccgggtcctgcttgggaggcgccgctctgtcccatcgtctggctttgagaagatgacccagccgcctgagaagatatcttcgatccctcagaagtccgggaagacgtatccgttcccgaagaagactccgcttgagaggaaagcacaaccggatcagatgaaaaaggtgtttccccgctgccctgagaaaattccggtcgttcctgctgagaaagcaccgtgccttctcccaacagcatttgcgggtccggagccgaatcggcaggctggccggcgcatccggaaaaagatgtcagcagcaaaacagaaatcagcaatatactgataattcgtttcatacttcccctcccatttcagataccactagatatccactttttattttatactgtatgagaaataatagcaagagattacgcgcacttttttacaaattattgcatattatgacaaatttgtatagcggtaatctctggaagcatgaaaaaggctcctgcttcctgtctttttttcatttcttccgctgctttgcaataaaaagcgaaggctgtccccaggaattttcctcgcaaggcagtaggcagcagtttttcggcaaaaacgcctagccctgcagggctaggcgtttttgccaggatggcctctattgttctagaaaaatgactattgaaaatattcggttatgaccgtaccgactaccagcggcccaacctccaggctgtccagttcgacaaactcctgcctcgtatgccctttgtgccctacatacc

SEQ ID NO: 1131 - DNA, 28276 bp, Unknown
  16S sequences of unknown bacteria
aacatcatgttttcgttgtgctctgcggggtattcgatcttgtactcggagatgtcatttcccgcgagagtgaggcgttcgatgcggtatccctcatggtatacaatgtcgagggtgtcggcttttccggtgtcaaccgcgttcgcgtacttgtgtaccgcggcgtcaagtccggtttcggtcttagatgcgataacggtcgatgagccgtcggcgcggatcacaaatccgtcatcctcgaagttcgtcatgtcgatgccgtttgcactgtccccgactgcaagcacgatcctgcccgtgagggaatcgccgagacgtttcgtcagccataccgcgctgtcttcggcggcagacgacgagacggtgatcctcggcgagacgtaaggcttgcttttctgcgcgcacgaggcgagagtcgcggcagccatacacaggcaaagcgccgcggatacgattttcttcatttcaacatcctttcatcatttacaaatttgtagaaaacatcatatatctgcgatattataccacatttttttgtttcggtcaaggaaaagtgtccgaaagatgaaaaaaacgtttattttccgaaccgaaatatgaacgccgtgccatccgatgagaatgccgcgttttcgtattattttttattcattattcaattaaatgttgcctccgggcgtactttgtgatataatcatatgatagaagatttttgccgccggagcgccgtgcctccgggaaaacggcgattcgatacggctgagcatgaaaggcagtgcgaatgataaaggtacttcatacaggcgatattcaccttgattcaccgttttcggggctttcaccggaccgcgcagagctgcgccgtgcggagcttcggagtgcgttcacgtcgatgatgacgtatgcgcgcacgggggacatcgatattgtccttgtgacgggggatctgttcgagagcagatacataacgcgcgagaccgccgagcttgtgacgggcgagttttcccgcgtcggctgtccggtgatcgtttctccgggaaatcacgacccgtatactcacggcagcatatgggagaaaataaaaatgcccgacaatgtaaaggtgttcagctccgacgttctccaatgcttctcatttcccgagcttaacaccgatgtttacgggtacgcctttgtttcgggcgagatgacctcggtgccgcttgcatcggcatcggtcgccgaccgcgggagaataaacctgatctgtgcgcacgccgatatgacgtcgccgctttcgcacagcgcgccgctgtcaaaggacgtgcttgcttcgttcggtgcggactatgcggcgctcgggcatatacacaatgcggacaattaccgcggcgaggcgggaagctgcagctatgcgtactgcggatgccttgtcgggcgctccttcgacgagtgcggcgacaagggcgcgctcgtcgtgaccgtggacaaggattccgattcggcgaaggcggcggtacgcacgatgaaattttcgagaaggcggtacgaggacatatccgtcgatgtcacgggggctgcgacctcgcgcgaggtcacggacaaaatagaggacgcgatatccggcgcggacgacgaaacggcggtccgcgtgagaatctacggcgtgacggattccgcgctcgtcatttcccccaccgttattgccgaagcgtttccgggagtgttctcgttcacgctcaaggacgagaccttgccgctcggcggtgcggactacctcgaggacgatctgtccgtgcggggcgaattctacaggatgataaagccgaagctcgagagcgcggacgcgcgggagcgcgaggtggcgctgcgggcgctgcggtacgttacggcggctatcggcggagaaaacatttcggatatctgaggaggagaatatgacggtaaacaaaataaagattgactccttcggatcgctgcgcgacagggaattcacgttttcggacagcctcaacataatcgagggcgcaaacgagtccggcaagactgccgcggcgatgtttataaaattcatgttttacgggctttcagggcgcagcagcgacgctttcccgatctcggagcgaaagagattcgtgaactgggatacgggctgcgccgcgggcgagctgtatctcaccgcgggtgaggggcgttaccgtatcgagagatcgctcgtcgtctcggacggttctgacagcgcgcccgtcagggagcgcacggtgacggtcgatctcggcacgggcgcgatcgtcaagatgaactgcgaaccgggagaatatttcttcggaatgcccgaggatgttttcgtgaacacggttttcatacgccagctcggaacgaacgaaccggacacctcgggcgtgtcggcggcgatcgagaacatactctgctccgcggacgagaccgttgatgtgaaaaaagtgatctccaagcttgacaaggtgagaaggcagcttcttcacaagaattcctccggcggcgcgatccccgagctgaaagcgaaaatttcggcggctgaaagggagcttgagctgtccgagacggagaacgccgcggtcatagatgcggaagcctcgcttgtgcggacttcggcggagatcgagcgcgccgaaaaggaaaacgagaccgcggcgaaggtgatctcgcattttgaggatatcgaagcgctcagaatgaagagagagcttgccgaggcggaccgctcgctcgaggaggacaagcgccgcctcgaagagatgaaagccgacttcccggcgcgcgatattctcgtgagcataaagggcgtcgaaaaggagcttgcggcggagaaggcttctcttgagagaaaccgctcgcgcatacagtatctcaaatcgaatgctgcagagcagaccgatgccgacgactgcgctgccgcccgcgacagtgcgcaaaagctcggatcgcgccgccgcgtgtccaaagtttccgcgatcgtcacggcgattcttgcggtcgccacctgcattgccgccgtcgttatgtatacgcttcgcttttccgaattcctcgttcccgccgcgtccggcgcggtgcttctgtgcgcgacggtcgttttcgcatccgtttcgcacagcgcgtcgaagaaattcgatgcgctgtgcgcgcagtgggatgccgacggtgaggattcgctgcttgcgaatatagctctcggagaagagaaggcgcgcgacgcggtgaagcttgcggggcaggcgaaggagcttgcggatattgccgacgaaagcgaaagacggatattctcactgaccgaggaggctgcggggctttatacggagagcaccggggacgcgcctgatgaggatatgagcgccgaggatatgctctgccgcgcgcgcgaatgcgcggagaagaagttcgcggagatcgatgcactgtccgagaccgtgaaagaaaaatcgggtgagtgcaccgtccgcgcgatggcgcttaagcggtacgattttcccgcgataaatcaaagacgcaccgaggccgagcttactcccgaatgggagcgcgcggaaaagcttacggcggaggaatgcgccgagcttcgccgcaaaagggaattcaacgatcagaagctccgcgccctttacgcaaagcggaccgattatgagtcaaagcgttccgcgggtcgcgcgcgtgcggttccgcccgcgcagatcgccgagaggatcgaggcgatgaggacggagctttccgatatgacgctgcgctgcgacgcggtcagacttgcgatagacactctcgagagtgcgggcgaaaagcttcgcgccgacgttatgccgagaatcataaagggcgcgtccgagcgcttctcgacggcgactctcggacggtattcgtcgctcggcgtggcgcacgatttctcgatgagctataccggagacgcgggtacgcgcgaggcggaatacctttctgcgggaagcgcggacagcgcgtatataagtctgcggctttcgcttgccgaggtgcttttcggaaagcggaccccgccggcggtgttcgacgaaagtttcgcgcgtatcgatcgcgcacggctcgccgaaatacttgccatgcagagcctgccgcaccgtcagtcgcttttgttcacctgccgcgagcttgaggcggagcttgcgcccgaggcgaacataataaaactgtagaaaaactttcccgccgcgaggcggaacggagaatgataaatgccgaaaaatatagttataaaaggggcgcgcgtcaacaatctgaagaatatcgatgtcgagataccgcgtgacagcttggtggttctaaccggactttccggctcgggcaagagctcgcttgcgtttgatactctgtatgccgaaggtcaccgccgttttgtcgaatctctttcgtcatacgccagaatgtttctcggtcagctcgacaagcccgatgtcgattccatcgagggactcagtcccgcaatatcgatagatcagaaaaccacatcgaagaatccccgttccacggtcggaacggtcacggagatatacgattacctccgcctgctttacgcacgcctcggcgtgccgcactgcccggtctgcggaaaggcgatacgccagcagaccgttgatcagatcatcgagaggatcatggcgctgccggagggtcagcggttcatacttctttccccggtcgtccgcggaaagaagggacgccatgagaaggttctcgcggacgcgaagcgctcgggctttgcccgcgtgcgcgttgacggaagcatctacgacctcaccgagaagatcgagcttgataaaaacagcaagcacacagttgatatcgtggttgaccgccttgtgatgaaggacgggctccgccagcgcctcggcgattcggtggaaacggcgctgcgcacgtctgacggacgtgttacggtgcagcttgtcggagaggggaatgccgagcgggacgagcttgagttctcgacgaactacgcctgcgaggagcacggcataagcttcggcgagcttgagccgcgtatgttctcgttcaacaatccctacggcgcgtgcccgaaatgtatgggactcggcgcggttcgccgcgtctctcccgaaaagatcattcctcatccggagctgtcgcttcttcacggcgcgattgccgtgaacggattcaaatcgctcggtcccgagtcgtggtcgggaccgctcgtcgccgccgtcggcgaacgccacggatttaccatggatacgcctctcgaggatttttcgccggaggcgaaaaaagcgctgctttacggtacgggcgacgaggtgtacgatatccgtcggagcttctcgggaccgccgcgtccgcagcgcgtgctctataaggggataattcccaccatagaggagcggatggagcagaacggcagcgacgccgaatattacgaacagtttctcgaggaaagcgactgccccgagtgcggcggaagccgtctcagccggacggcgcgcgcggtcacggtcggcgatatgacgatcagcgcgctctgcgctctccccgtgacgaaatcgaaggaatttatagagaatctccgcttttccgaggcggagaccgaggttgcacgcgagatactcaaggagcttcgcgcgcgtctcggattcctcatatccgtgggactcgattatctcacgctttcgcgcaagagcggcacgctctcgggcggtgaagcacagcgtatacgtcttgcaacacagatcggaagctctctcgccggggtgctctatatcctcgacgagccgtctatcggacttcatcaaagggataaccaccttctcatagaaacgctgaaaagtctgcgcgatctcggaaactcggtcatcgtggtcgagcatgacgaggagacgatgaacgaggcggattatataatcgacgtcggaccgcgcgcgggagtgcacggcggcgagatagtcgcctgcggaaccccggctcaggtcgcggcgaacactgcgtcgatcaccggagattacctctcgggaagaaagaagatccccgttcccgccgagcgccgtaaaggaaacggcacgtttctcgaggtgctcggagcggctgagcacaacctgaagaacatcgacgtgaaaattccgctcggatgcttcgtctgcgtaacgggtgtttcgggctcgggcaagagctcactcgtgaacggcgttatttacagccgccttgctgccgatctcatgggcgcgatcacatggcccggcaagcaccgcgcgattctcggagaggataatctcgacaaggtgatctgcatagaccagagcccgatcggacggacaccgcgctcgaacccggcgacgtatacggggctgttcaccgatatccgtaatctctttgcacagacgaagggcgcgaagctgcgcgggtatacgtcgggacgcttctcgttcaacgtgcgcggcggccgctgcgaagcgtgcgagggcgacggcgtgaagaagatcgaaatgcattttctccccgacgtttatgtgaagtgcgatgtgtgccacggcaagagatacaaccgcgaaacgcttgaggtgaaatacaaggaaaagaatatctacgacgttctcgaaatgaccgccgaggagggcgcagacttcttctcggagataccgaaaatatcttcgaggctcagaaccctctgcgatgtcggactcggatacgtcaagatcgggcagtcctcgacgacgctctcgggcggcgaagcacagcgcgtcaagcttgcttcggagctgtccaaacgaagcacgggacggacgatatatattctcgacgagccgacgaccggacttcacaccgacgatgtgagaaagctgatcgaagtgctgcagaagcttgtcgacgcggggaatacggtcctcgtgatcgagcacaatctcgatataataaagaccgcggattacctgatcgacctcggacccgagggcggcgagcgcggcggtgagatcgtttgctgcggaactcccgaggaggtcgcaaagtgcgaccgctcgtatacgggaaaattcctgaaggacaagcttgtcatgtgaaaatgcgtccggcggcacagcccgccccgcgcgataaaaataaaaattacgtttcgtaaggaggatatacgaaaatgctcagacatattattctgtggaagctcaaggacacggttgaggataaggaaggaacgaaggcgaaggtgaaagccttgcttgaagcgcttgtcggagttgtcgacgggcttgaggagctgaccgttcatacggacggacttgcaagctcgagcgccgacatgatgctcgaatcgaagatgcgtgacgcggacgcacttgcgttttaccgcgaccatcccgcacatgtgaaggcggcgacgtttgtccgctccgtagtcgatgtgcgcctctgccttgatttcaacgagtgaagcaaagcggtgccgtttggcaccgaagactgatttatcggagaatttttgatgaagattccggagcttttgtccccgtgcgggaattttgaaaaaatggaggcggcgcttctctacggcgcggatgccgtgtatcttgccggaaagcgcttcggcatgagaagcgctgcggataatttcaccgacggtgagcttgcggcggcggtggggcgagtacacgaagcgggaaagcggatatacgttacggtgaatataatgccgcgcacgtcggaatatgccgcgctcgaagagtatctccgctttctcggaaagatcggcgcggatgcggtgatcgtctcggacatcggggtgtgcgctctcgcaaagaaggcgtgccccggcgtcgagatacatatctcgactcaggcaagcgcggtctcggcacaggcgtgccgcgcgtggtacgagctcggcgcgtcgcgcgtcgtgcttgcgcgcgagcttacgctcgccgatatccgcgagatacgcgaaaacatccccgatcggctcgagcttgagtgcttcgtgcacggctccatgtgcatcgcgtacagcggacgctgccttctttcgcagtattacgtcggacgcgatgcgaaccgcggcgcgtgcgcccagccgtgcagatgggaatacacctgcgcgtccttttcggaggtcaagcgtcccgacgacgtgctcacggcggaggaattttccgacggaacgtacatcatgagctcgcgcgatacctgcatgatcgagcatattccggagctttgccgcgccgggatcgacagcctgaagatcgagggcagaatgaagagcgcgtactacacggcggtcacggcgaacgcctaccgcatggcgctcgattcatatgcgcgagacggcgaagggtatgtttacgatcccgcatggcttgcggagcttgagagcgtgagccaccgcgaatacgcgacgggcttctactttaccccgccggggcttgacccgaacataacccgttcgccgggctacatacgcgaaaaagcatatctcgcaaccgcactttcggacagcgcgccggacggtacggcgctgttcgttcagcgaaacaaagcgatccgcggagagcgcgccgagatgatttcgcccggaaaatgcggcagggccttcaccatggaggagatgtacgccgagaacggcgaaccgatcgaatccgcaccgcatccctcgatgatattcagactgaaggtgccgttcgcggtgaaaaaaggagacatacttcgcggggcgcagtgacggtgcggcattacgcttcggcggcgcgtgatttgcagatcggcgcgggacagatcggcgcagcgcgcggtcgccgcgcccgaaaaacctaaacaatacgaaaggacgcctccgagggaggcggggaagatgcaatgaagataatagaaatactctatgccgttctcatgggaatcgttgagggaataaccgaatggcttcccatatcgagcacgggacacatgatccttctcgatcggcttttcacgatggatttctcaaagaactttaccgagatgttccaggtcgtgatacagctcggcgcgatccttgcggtcgtggtggtgttcttccgccgcctcaatccgttcgcgccgtccaaaagctccgcggagaagaaaagaacgtgggtgctctggagcaaggtcgtcgtcggcatgatccccgcaatggttgcgggagtgcttcttaaaaagctttacggctcgatccccgacaatccgttccttatcgccggcgcgcttatcgtttacggcgtggcgttcatcgtgatcgagcggcttcaccgcgggaaagcctacagaatagaaagcgccgacgatctttcgtataaggatgctttcgcggtcggatgcttccaggcgcttgcggttattccgggaacgtcgcgttccggctccacgataatcggaggaatgcttgcgggcgtttcccgcacggcggcggctgaattcacgtttttcatggcgatccccgttatggcgggcgcatccctgatcgaggtgctcggatttataaaggacggcatcgtgccgagcagcgcggaatggggcgtgcttatcatcggcataatcgtcgctttcgcggtctcgcttgcggtgatacgcttcctcatggatttcgtgaagaagcacagctttgaatccttcggctggtaccgcattgtgctcggaatcgtcgttataatctattttgcgataaatgctgcgtgagcaaattcacaaaatattatttatttccgacatcgtgtgtgatacaattttaacataaggcggcggatgcgccgcaggcttataatgccggaggtgtgatttgacggacaaaaaacataaagtcctgccggaacgtatgaacaaggtcggcggacaggcggtgctcgagggcgtaatgatgaagggcggcgaaaatgtcgcgcttgcggtacgcagcgaggacggcacgataaagcttgatacgaaaaaacacgtttccgtgaggaaaaagtataaaatatgccgcgttccggttatccgcggtgcggtgaatatggttgagaccttcatgctcagctattccactctcgaaaaatcggcggagatgctcgggatcgacacgtccgagcccgagaccaaatttgaaaagtggcttaccgagaagctcggcgattcgatcatgaaggtgctcatgggcttttcaatggtgctcggagttgcgctcgcgctgtttcttttcaaattcctgccgacgtttattgcgggctccatcggctcggtgatcgagctcggcggagtggtgcgcagcattatagaaggcgtgatcaagatcggcattttcattctttatatcgcgcttgtagggcttatccccgatatgaggcgaaccttcgagtatcacggctcggagcataagtctatcgcctgctacgaatcgggcatggagcttaccccggagaacgcggcaaaatgcacgcgctttcatccccgctgcggtacaagcttcatttttgttgtgctgataatatcgataatcgtattttcgtttatcccctggggcaatttctgggcgcgcctcggtctgcagcttctgctgcttcccgtggtcatcggactcggatttgagtttatcatgtacgccggatgccatcagaatcttctaacgaagatcctttcggctcccggactttgggtgcagcgcctcactacaaaggagccttcgctcgatcagcttgaggtggcgattgcctcgctgaaggcggctctgcccgacgaattccctcccgaggagaacgaaccgaatgagtcatcatccgaccgtgcggaaaacgcggaatcgggagataccgactgtgccgaagcggctgcggcggagagcgaggtttcctccgatgctgcggcgactgccgatgcggagaccgcacacgacgcgaaattttcgggcggcgcggacggcaaaaatgcccccggcgtcggagagtgcgcatccgactgcgcggagacggaaagcgcatcggcttccgattcggcaacggataccgcatctgccgcgaatgccgatacggcggacggaaatgacgcttgacgggatagagcgcgcgctctcggcggcggggatcggcgaaagccgcacggaagcgtatattcttgcggagcattttctgaaaatcccgaaaagcaggctcgtcctcatgaatggagaagaactcctttcagacgggctttcggctgcggtggaacgcaggataaatcgggaaccgctcgcatatattctcggaagcgcatactttatgaatgaggagtatgaggtatcccccgactgtcttatcccgagacccgagaccgagcagcttgtgtgccgcgcggcggagcttcttccgcacggcgggcgttttctcgatctctgcacgggaagcggctgcgtggcggtctctcttctttcactcaggcatgacgcatcgggagaggcgctcgacatttccgacggcgcctgccgccttgcggagcggaatgcgtgccgcgccggagttgacggcagattgaaaatcgtccgcgcggatatgttttcgtggaaaccgtgcgatatgacgtgcggatcgtcggacggcgaaagcacaggcagctttgccgatttttgtgaacattccgatcgcagtcagccgaccgacgaaacggcgcgggtgtacgatatcatcacggcgaatccgccgtatgtgacggcggaggaaatgcgcgatcttgcccccgagctttactttgagccggagatcgcgctgaccgacggcggagacggactttccttcgtccgtgagcttgtgcggcggcacacgcgcttcgtgaagcgcggcggatatctgctttgcgagatcggaagcggcgagggcgcggcttccctcgaaattgccgccgacggcggctttgatgccgaaatacttaaggatttttccgggcgcgaccgcatactttcggttcgggtgtgatcgggcgcgtccgttattcaagccgcctttcggcggggaacggagaatttacatgaaaacgaagcttctcgtgcttttcggcgggcggagcggggaatatgaggtatccctcatctccgcgtcggcggttctgagaaacatagacgctgaaaagtacgatataataagggtgggaataagccgcgacggaaagtggtatcttttcggcggggatatttccgagatcgagagcggcagatggtgcgataacgcgggcaaccgcccctgcgcggtatgtccggactacggttcaaatgcgctgatcgtgttcggagtgaaacccgagcggctgaaatacgacgttgtttttccgatcatccacggcactcagggcgaggacggcacggtgcaggggcttttcgagcttgcgggtgcgcgcgtcgtcggatgcagtgcggaaacatctgcgctgtgcatggacaaggcgatgacaaaaaccgttcttcgcgctgccggaatcgtcacggcgaaggacgttaccgttctcaggcgcgaatggaactctcccgaagcgaagagagagcttatcgcgcatattgagaggaatctgccgtatccggtgttcgtcaagccctcgagagcgggatcgtccgtcggagtatcgaaggcgcacggcagagatgagctctgcgcggcgttcgatgcggcgtttgaatgggacgacaaggtgctctgcgaagagtatatcgaaggacgcgagatcgaatgtgcggtcttcaccgcgcccgacggcacggtcaccgtatccgagccgggagagatcgaccccggaagcgatttttacgattacgacacgaaatataagaacgacaatgcgtcatactatataccggcaagacttgattcggcggtcacggagagagtgcgcgagtgcgcgcgccttgccgcgtcggcgctcgggatcacggggctttcgaggatcgactttttcgtcgccgacggcggagaaaccgtgctcaatgaggtcaacacaatgccgggattcacgccgataagcatgtatcccaagctgatgatacacggcggaatgacgtattccgggctgatcgacggacttatttcggaagcgctcgaacgggtttgacgacgtgatgaaggttacgctgatctccgtcggcacgctctcgcagaaggcgtatgccgatgcgttttccgaatacgcaaagcgcttttctgctcacgggattttggagtgcgccgaaatacgcgaaaagaagatcgacgcttctccctccgaggctcagatcgccgcagctctcgatttcgagggagacgcgatactttcaaagataccgccgcgcgcgttcgtgtttgcgatggcgatagaggggaagagcatgacctccgaagcctttgcttcactgctcgatcggaagatgacagagggagtgccggagttctgttttgtcataggctcgtccttcggactgtcggataaggtgaagcggcgcgcagacgcgcttctttcgatgtcgcccatgacgttcccgcatcagcttgcgagagttatgcttgcggaacagctgtaccgcgcgtcgcagatactctcgggcggaaaataccacaaatagcggcagcgccgcagtacggagcatgcagctttgcagataaatttcggagaaaggaagcttttcggggaaaagcgcggatgtaacgaaatgaaattccgtgacagacttgcagaacggtatgacgccttctgcgatgccgtcgaaaaaataaatctcgatccggtcaagcgcgtactgccgatcgttctgtttgtttttgtgtcgcttgcatcggtgctttacgccgccggtgtctacgatttcaccttcatcgagcgccccgaaaagaaggaaagccccgcgcctgtcgataccgcggtcacaccggagccgaaggagacggagacaggcggcgcggacacagccgaagagcccgatgtcacgggcggcgacacggcacccgagccggagccggaggtgaaggaattttatttcccgatgatcggggataagaacgccgaagggtactatgttacgaacactgactattcggcggatacccatgtcatcgcggcgatgaacgtcgagctaggctcgccgaaggagtacacgctccgccgccgcaacgtctactctccgaaatacgattacgaatacgaaaacggcgaagcgaaggtgatctacattcttgaggatgaggatcgcccctccgtcgaagcctatatgggttatataatggtggacaacggcagcgccgtcataatgtttgatgcatacggacgctatgttgcaaattatgacgagagttactaccttgcatatacgcgggactcttcggggaatccgcttttcttccgtccttcctcgtatacggtgtataccgaggacggggagcgctccgccaccgttgacacaaggatatactatacgctttcctcagccggatatatggcgcagtcggcgtacaacgataggatcgagggtcgcgggcttcatatggattaccccgcgacctacggtgcgcagacggcgccgatcggaaggcgctgcatcgagaatgccgtgtcgttcctcagtctgaaggacaagctcaccgggtggaaccgcaccgtctggggctttttcgaacccggctccgaccttccgttcaccgacggctggtacgatgtcgatgaggaaaagccggatgttgacaagatgactcccgaagagcagaaggagtatctcgagaaagagcgcgaggaagagaaaaagagaatctataccgcgtacaattactcggagggatacgcctgcgtggcaaacgagaaggggcagatgcactttatcgataccgcgggcaagcagacgtttgagaccgagatcgacacatacaacgcatacggcagacgtgttatcgacaatctccttcttccgctcacagacggcgaggaggcgctcggattctattatttcgatcacgggcttgtccgcgtccgccgccagatatacgattactatcagctcaaggatttcgacatgaagatgatcgaatatgataacgacgagcttatatacgccgacggcacgaaattcctgcttgccgagggatacgatatcatttcgtattcaaacgggctcatactgcttgaaaaaggcggaagatacggatatatggactacaccggagcatggcttatcgagccgtcgctctccggcgcgaagccgtttgtcgaggggcttgcagccgtagcggtcaacggcaagtggggaatgatcgacaccgcgggaaatacggtcatcccgtttgactacgacagcgtgcagagcgtgtcgagcggcgtgatagtatgccacagcgaccgcggctggacgatcttcgtgaaaatgaagaaggatgcgtgagagcgccgactacagaacgaaaggacagagaaatggacattcagaagattatctccgaagagctttcggtgaaggaaaaacaggtcgccgccgcggtcgagctgctcgacgcgggcaatacggttccgtttattgcgcgttaccgcaaggaggcgaccggaggacttgacgacgaggcactgcgcaggctcagcgaaagactgacatacctgcgcaatctcgaaaagcgcaaggaggaggtccgcacgctgatcgcggctcaggggcagctcaccgatgagatagacgcggcgatcgacgcggctcagacagtcaccgaaacggacgatatatatcgcccgtttcgcccgaagcgcaagacccgcgcatccgtcgcgcgtgaacgcggactcgcaccgcttgccgagcttatttcgtcgtgcgcgccctcatacgatccgccgatagagaaagctgcggaagaatatattaatgaagagaaggaagtcccggatgtgcgcgccgcgcttgccggggcgtgcgacataatcgccgaagaggtgtcggacaacgcggaataccgccagatgatccgttcgctgacctcggaatggggaagcatttcttcaaagctttccggcgaggacggagacggcgtgtatactcagtattacgagtataccgaaaagatatcagcgcttcctccgcaccgctatctcgccatgaaccgcggagagaacgagggcgcgcttaagatctccgtcgagatcggtcaggacataatactgaacgcgcttttcaaccgcgcgatcgcggactaccgcagcccggctttcccttatatggcgagtgcggtcacggattcgtatgcgcgcctgattgccccgtcgatcgagagggagatacgcgccgatcttttcgaccgcgcctgcgtcagcgcgatcggcgtgttttccgataacctccgccaccttcttctcggcgcgcctctcaagggcaaatgcgttctcggatacgaccccggataccgcaccggatgcaagcttgcggtcgtcgataagacggggcgtgtgctcgatacggcggtgatatatccgacgaagccgagggaggatatcgccggcgcggaacgcaccgtttccgcactgataaagaagtacggcgttgatgtcgttgcgatcggcaacggaacggcatccggcgaaagcgaaaactttatcgcctcgcttctctgcaagcttgactgcggaacgaaatacataatggtcagcgaggcgggagcatcggtttactcggcatcgaaggcgggcgccgaggaattccccgatttcgacgttacgcagcgttccgccgtgtcgatcgcgcgccgcctgcaggatccgcttgccgagcttgtgaagatcgacccgaagtcgatcggcgtgggacagtatcagcatgacatgaaggaggcgcagcttgacgaggcgctcgacggcgtggtcgaatactgcgtgaacgcggtcggcgtcgatctcaatacggcttcgtatatgctcctttcccatgtcgcggggatcaacgccgcatccgcaaagaatatagtgaagtaccgcgaggaaaacggcgaatttgcacgccgcgccgatgtcctgaaggttccgcgtgtcggcgcgcgcgcgtatgagcagtgcgcgggatttctccgcgtccccggctcggcggaggcgcttgacaatacgggcgttcaccccgaatcgtatgacgctgccaaaaagctgatgaagaaatacggatacgccgaatccgatatgcgcgcggggctttcgcgtctccgctccgaggtggagcgcgacggaaaggctgccgtcgccgcagagctcggcatcggcgagcccactctcgacgatatgatcggcgagcttgaaaagcccggacgcgacgtccgtgacgcactgcccgcgccgcagctgcgcgaaagggtgatctcgctcgaggatctgaaggttggaatgacgatgaccggagtcgtccgcaatgtcgtcgatttcggcgcgttcgtcgatatcggagtccatcaggacgggcttgtacatatttcgcgcctgtcggattcgttcgtaaagcatccgtcggatgtcgtgtccgtcggtgacacggtaaatgtcagagtggtcgaggttgacaccaaaagaaagcgcatcgcgctctcgatgaaatcggaataaatccgccgaaaaatcccaaaaaacacgaaaaaacaccattaaaagactaagttgaaccattctgtggcgtaattttgaacatggtgtacaacttgcacaaacgagaaaaactaattttggcgaaaaaaactctttcatttatccgacttttttgatacaatgtaaaggtcaaaaaacagttgtttccggacttgcgttcgtaatacaatttatattcgttaaaattcgggaggaatttttacatggcaagcttatcgtttaagcacatttataagaaatatccgggcggagttactgcagtatccgacttctgccttgagataaaggataaggagtttctgattcttgtcggtccttccggatgcggtaagacaacgaccctccgtatgatcgcgggacttgaggaaatctccgacggtgagcttttcatcggcgaccgcctcgtaaacgatgtcgcacctaaggaccgcgacattgcgatggtgttccagaactacgctctttatccgcacatgacggttttcgataacatggcgttcggactcaagctccgcaagactccgaaggaggagatcaagcgccgcgttgaggaagctgcgcgcatcctcgatatcactcaccttcttgaccgccgtccgaaggcactttccggaggtcagaagcagcgtgttgcgctcggacgcgctatcgtccgcaatcctcaggtattccttcttgacgagcctctgtcaaacctcgatgcaaagctccgtgcaagcatgagaaccgagctcaccaagattcatcagcgcgtaggtacgacgttcgtatacgttacgcatgaccaggtcgaggctatgaccatggcaacgagaatcgttgtcatgaaggacggtctcatccagcaggtcgatactcctcagaacctctatgacaagccggtcaacctcttcgttgcgggcttcatcggaactcctcagatgaactttctcaacgctactctcgagcagtccggttcagatgtttatcttgttatcggcagcagccgtatcaagctccccgcagagaaggcgaacgattccgaagtcaagaactacatcggcaaggaagttatcgcgggaatccgtcccgagtgcatctccgacgacgcacttgcggtacagaacaatcccgaatgcgttatcgaggcttcggttgacgttaccgagcttatgggtgcgcagatttacctctacctcaactttgaggagcagaacatcatcgcttccgtttccgcacgctccgcagctcgcgccggcgataccgtgaaggttgcgatcgacgcttcgagaatccatctcttcgacaaggataccgagcgttacatcattcactgatttttcggtcttcccgctctccggagcgggaagattttcttttttcggcggtgagatgagatcgcggtgcggtgctgccgcggggtaccgcatcagtacgggacgcacggacgtaatggaaaaagcacggggactttgtcgttcggcacggatttatcatatcatgaaatcgcggatgcttcaattatcaattctttgtcggaacggcaacgctctcgttgagctgctcaaaagtacgcagtgactcccggatatatatgcgtatcggaaacgtataacggaaagaaaataatgaaataaattgttaaaacactattgatttttttcgcgcgatatggtaacctatagacagtaatagactgcgagaaccccaatttcaatgatattaagtaaaggaaagtggctatgaaaaaagtaatttctctttttgtctgcctcataatgattgctgccatggcgatttcaagcgtgagcgcggcaggacagatccttttcaaggatgagttcaacagcatggacaacaacgactggatctgggatccggaagcaactcatttcgtggttgataacggcgtactcaagggcgatgacaccgcccgcgttcatcagaccgagtaccgtcccgactacgacggaattcgtctttgggattatttcagctgcaaggtcgatgtaagaatcaccgactacgctgattcttcaagcataggtcccggactgtggtggagagactataacaccacgttcgagcaggaagacgggggcgagaccgaaacaggcgaaatatgggagttccaatatgaccagatctccaacacctgtagcctcaaaagcgactatttcacgaataacaacattgaacctatagtagtcgaagcccccggaaccgtaaaggtcggacccgatgaggagcctaccacgttctctatcggctggagaattcagcccggcaggatcgattgctacttcaacgatcagaaggtaatcacctgtacgaatgttcctgcggatatgggcactatcagaaagtctcctattcttcttaccaatgccgcttgctacatagagtttgataacttcaccgttgcaacctatgattacaatctcttcaacgaaaaacccgacgagaacgtcaacggcggcgataacgtcaacggcggaaacgctaccgagatcgttactgcaattgaaaccgacgagaacggcgagaccgtgatcgttaccaaggtcgttgcggacaccaacaagaacacaccgaacgcaagcaacggcggttccggcaccggtgatatgatcgttgttgttgcggctgttatggcagtttctgcggcaggcgcggtcatacttgcgaagagaagaaaagaaaactgagcttctccgaaacgcaaattacatttgcgccccgccttatggcggggcgcttctttttcggcatcacccgcttgttccggaaaaatttatttttttgtaatcttactattgattttttttgtgaaatgtgttaaaatcatagcatctattggttgtatagaccaaataaccttacggaaaggaacacaacatgaaaaagattttttcgattttgctttgtttgctaatgatcgcatccattgctgcttcttcagtcagcgcagcaggcgcaattctttttgaagacaagttcaacagcatggacaatgaggactggtgctgggagccatctcactttgaagtgaagaacggtgttctcgtcggcgaccccaccgcggttgttcatcagacgatgtacggcgcaaatccgcccgtggatcgtacttggagtcagttcacctgccgtgttgagacaagaatcaccgattatacggattctaccgatctcggtcccggtctttggttcaaggactacaacaccacttgggcacaggatgaagacggcgaagaggataccggagagatctggacgttccagtacaatcactacaacagcacctgcactcttgccagtgactatttcacgaacaacagtatcgaggctatgacgtatccggttcccgcgggaaccataaagatcggacccgatgataagccgaccacattctctctcggctggagagttcagcccggacgcattcagtgctacctcaacgataagcttgttatcgactgtacgaacgttccggcggatctcggcaccatcagaaagtctcctatccttcttatcaacaagagctgctacattgagttcgataacttcgtagttgcaaccgttgattacaaccttttcaatgagcctgacactccggcacctgttggtccgggcaataacggcggaaatcagcagcccggcaacgccactgaaatcgttacggaatatgaaacgaacgacaagggcgaaaccattgtcgtcaccaaggtcgttgccgataccaatgcaaacaatccgagcgcaaacaacggcggctccaacacaggagatatgatcgttgcggttgcagctgtaatggcagttgcggcagcgggcgcgattgtggctgcaaagcgcagagagcactgaattccataaataaaaagcattccgccgatcggcggaatgcttttttgcggttataacaggaatatcactgctgtatctccttccgtgaatgaccaagaaaaagaaaacatttttttaaaacagtgttgcttttttggggtttgtgtgatacaatcatattgtaaatgcctgaataaatctatgtaaaggaacaaaattatgaagaaaatactttcaattttgatctgcctgatcatgattgcggctgtcgcggtttctacggtcagtgcggacggaagaattctttttgaagacagatttgacagttcggataacgatgactggatttgggaccccgatgtaacacactttgaagtgaagaacggcgttctcgtcggagaccccagtgctgtcgttcatcagacgcagtacgatattgatgctcccgttattcgtgcatgggataagttcagctgcaaggtcgatgtacggatcaccgattatgcggattcaacatccatgggacccggactttggtttagagactatgattctacttatcagcagaaggcagacggcgaacccgatgcgggagagatttggtactacgattatgattgtgtaagcaattcgctgatcctcagcggagattacttcaccgcaaacaatctcgaaccggtgaaatatgtgcttcccgagggaaccgtaaagatcggacccgatgagaagccgaccacgttctctctcggctggagaattcagcccggtaagatcgagtgctactttaacgatcagaaggttatcacctatacgaatgttccgatggatctcggtatgaccagaccgtctccgattcttctcgtaaatcattcctgctatatagagtttgataactttatcgtggcaaccgttgattacaaccttttcaacgagactgacattccgacacctgttgatccgggcaataacggcggcggccagcagcctgccggcactaaggtcgtagagaagatcgaaaccgacgagaacggcgagaccagaatagtcaccgagatcgttgccgataccaatgcaaacaatccgagcgcaaacaacggcggctccaacacaggagatatgatcgttgcggttgcagctgtaatggcagttgcggcagcgggcgcgattgtggctgcaaagcgcagagagcactgaattccataaataaaaagcattccgccgatcggcggaatgcttttttgtgattctcgggttacccgtcggaccggacctctgtgcattttgtgaaatgatgcctctgcgatccccgtagtcgtgaaacggaaaatataattattaggacagctgcgtcgacgtatgacacgaaaacgttttgctgaattgtaaagctctttcgagtattttgatttgtttttttgacgcgcggcggatctgttgttcggtttttataaaagtttgcgaggcacccgatacaaattgttaaaaatgtattgcaatttcgattgttctgtgttaaacttacggcagaggagatttgcggaatctcaaatatgaaaattaggaggataaagctatgaagaaaattgtttctgctttgctgtgcctcgcgtttcttgccgccatgtcggtttcctatgttagtgcagccggaggacagattcttttcgaggatcatttcaatacggttgacgacaactgggagtggggcggagatctttttgaggttgagaacggcattttgaagggtgagcctgccgcacgcgttcatcagacaaagtatattagagacgacggtgttccgctgcgtatatggagtgagcttgcctgcaagatcgacgtccgcatcaccgattatgatgattcaacgctggtcggtcccggactttggttcagagattacaacactacatacgatcagcaggatgagggcgaagaagataccggtgaagtatggtggtatgaatatgactatatcagcaactcggtaattctcagaggcgaccattttgaaaacaacaagcttgagcctgtcaaggtaaagctcgaggatggaatcgtaaaagcgggacccgacgagaagcccactactttttcgatcggctggagaattcagcccggacatatcgagtgctatttcaatgacaaaaaggtcatcgattatacaaatgttccgatgacgatcggctctgtcagaccgtctcctatcgttctctggaacaacagctgctacattgagttcgacaactttatcgtaagcactcccgattataacctcttcaatgaggtccccggcgataacggcggcaacaacggcggaaatcagcagcccggcaacgccactgaaatcgttacggaatatgaaacgaacgacaagggcgaaaccattgtcgtcaccaaggtcgttgccgataccaatgcaaacaatccgagcgcaaacaacggcggctccaacacaggagatatgatcgttgcggctgcggcggtaatggcagttgcggcggcagttgcggttatatatgcaaaacggcgggagcactgacaaattaatctgcgaaaattaaaaaaacagtattgattttcgcgtactcttatgataaaatataatcacgaatcataccttaataaaataaaagcaaaggaaaaatgagcatgaaaaaacttattgctgttttcatctgcctggtgatgatcgccggaattgcaattgcgaccgtcagcgcggatgcaaaaatcctgttctacgatccgtttgacacaaaaaaggaaaatgactggctgtgggattcttcgaatttctatgtgaaagacggagttcttatgggcgatcccaccgcagttatccatcagagcgcatacgaccccaaatacggtcagatccgccgttgggatacctttaccaacaaagtcgatatcaaaatcgttgattacgatgagtcgaactttatcggcagcggactctggtggagagactacaacacctcttttgaagaggaaaatgccggagcaaacgaagacggcgagatttggacctacagatacaattatgtgaccaactccgtaattctcgaaagcgactatcttacgaacaagggaatgactgcgaagacatatcagcttccccgcaatgccgtaaagatcggtcccgatgatgatccgactacgttctccctcggctggagaattcagcccggcaagatcgagtgctacttcaataaccagcttgttattacctgcaccgatgttcccgctgacctcggaactcacagagaatccccgatccttcttatgaaccatagcgcttacgttgagttcgacaacttcgtagttgcaaccgttgactacgatctcttcaataacaatccgatcatcgatcccgatgtttcggagagcgagagcgaatccgaaagcgaaagcgagagcgagtcggagagcgaaagcgaatccgagtctgaatccgagagtgagtcggagagcgaaagcgtttccgaatccgtgtctgagtccgagtctgagtcggattctgagtcggtcagcgattccgagagcgacgataagaccgagtccgagagcatcgaggatcccgacaagaccgagaccacaacggatgatatcgccgatacggacacgaccaagcccgacaacggcaacggcggctccaagaccggtgatgtgatcttcgcggttgcggctgttatggcggctgcaggcgtcggcaccatcattcttgcaaagcgcaaagagcactgagaattttaatgactgaatcattcccgcttcttcggaagcgggaatggcttttatcgggaagaaggcggggatttccggcgcatcgggtgcgtttccgcgggaatccgggcggaaaggaaaacataaacgtgcagaacgaggtcacagcgaatgacataactgcggaggttcccgcgggagttgaaaaaacagatgaagaatacatgtcggaagcgctgcgcgaggcggaaaacgcggctgagctcggagaggtcccggtcgggtgcgtgatagtgcgcgacggcaaagtgatcgcacgcgcgggaaaccgaagggagaacgggaagtgcgcgcttgatcacgcggagatcatcgcaatcgaggaggcatgccgcagtctcggcgggtggaggttgccgggatgcacgctttacgttacgcttgagccttgtccgatgtgtgccggtgcgataataaacgcacgcataccgcgggtggtgttcggcgcttacgataaaaaagcgggtgcgttcggcagcgtcgtcgatctcaacgcatatccgttcaaccatcatccggagatcgtttccggcgtgtctgagggcgaatgtgcgtcggcgctttccgaatttttcaaaaaaaaacgcaaaagctcaaaatgctccgaagccccgattttacgggagcaatcgcccgatccggcatattcggactgcggcgggaatttataacataataataaaatatgaaaatactattgattttttcgtcctcttgtgataaaatctaagagaagatcggggactgtatcttcggtctaatctaaagaaaggaatgaatagcatgagaagaatagtttcactcatcggttgtttggcgttgattctgactctcgcagcggcaaccactacagttaatgctgccggttcgattcttttccaggatgatttttcttccgaggatctttccaaatggatgtgggataacactgcatttatttgtgaagacggcgtttgcaagggcgatcccgctgcggtcgttcatcagagcgcttacgtggacggcgatgcggcatggggtgtcaatatagcatataaagtagatgtgcgtgttaccgactacatggattccacggagatcggtcccggactttggttcagagattacaatctgactatggaagaggatgcagagaccgacgccgaggacggcgaggtttggcagttccaattcaactaccttaaccagacattcaagcttacaagcgagtacctcactaaaaacaacttcgaagagcccacctacacgctccctgagggaacgatcaagatgggacccgacgaaaagcctacgaccttcagcatgggctggcgtatccgctccggcaagattgactgctactataatgataagctcattatatcctgcacgaatgttccggcagatataggacttgtcagaccgtcaccggtttgcctctggaatcgcagtgccgatattgagttcgacaattttatcctgtctacggcggattacgacctcttcaacgagggtagcatccccacggacgacaccactaccaaggctcccgacgacaccaaagtggtgaccaaggtcattacggatgcggacggcaatactcaggtagtcaccgaagttgtcgctgataccgataagacgaatccgaacgtaaacaacggcggatcgagcacgggcgatatgatcattgcggtagcggcggtcatgattgtcggtgcagcgggcgcggttgttctcggaagacgcagagaacactgagaatacggcgttctcaaattatgttgattctgcccggtgaaagaatttataaaaattcatggaaaatttcaaaaaggtattgatatttcagatcatctgtggtagaattgacttgttcaaaatgtatgtccgcaaaaggcggcttacataaaagaaataaaaaaaggagaaaaacacaatgaaaaagcttgttacagctcttcttgcagtcatgatgattgcaagccttgccagcctcgctgcatttgcagacggtgagaagacggcattccatgtaatggacactaccgttgaagagggcgctaccgaggttaccgtaaccgttaacatcgagaacacccccgctgccggcatcaccggcgctaagtggttcatcaattatgatgaggctcttacccttaagaaagctgaaaagggcaccttcactgctgaaggtcagttcggaaccagccagaacctcaccgataagccctactctttcctttgggctctcggaaccgatgtagttaaagtagacggttctctctgcaccgtaaccttcactctccccgagggtgctaaggccggcgatacctacagtgtttccgttacctactctgaggctgacactcttgacatgaacctcgagagctacaagggcttcaccatgatcaacggaaccatcagcgttgttgagaagtctgttccttccgataccactgcaaaggctgagcctaccgacaccactgcaaaggctgagcctaccgacaccaccaagaaggctgacgacaacaagtctgccgctaccggtgacatgatcgcagtagttgtagcagttatggttgttgctctcggcgcagctatcgttgttaagaaggttaacgtaaaataatcagtcttaactgaatattttccaaagcacccgaaagggtgctttgtttttgcctattgcgaaatacggcgaaatacggcgaaagaagcagcctcacggtttttctgaaattgggcgataacaagattattcgacgaaaatatttttgaaaactgttgaaaatgtagaaattgtatgatataatatgatcggtatgaagattcatatcaattactccattttaatggatcgggaaatcccgaagaaaggttcgaagcatgaaaagagtaatttcacttgtacttatggcagcgatgctcgtaagtgtcgcagtcgtcggcgtaagtgctgcaaagtatcttgatgacgatttcagcgcaatacacgaggattggtgggtttacggaggattcttccctgaggttgataagggatatttagagggttattccgatgccgtagttcttcagacagcatatgataactctcttggtgagaccaatatgcagggcaacggagttt

SEQ ID NO: 1132 - DNA, 20616 bp, Unknown
  16S sequences of unknown bacteria
gtttcttaggagagaacatacagaccataagaaaacacagaggaatgaaacaacaagaacttgcggacaaaatcggtatcaatatgcagagcctttccaagattgaacgaggtgtgaattatcctacctttgatacattggaaaagataatggacgtgctgggagtaacaccgaatgaattattgtcgggggaatggaaatatattgaccacaccgagccatatatcatggacgttatcaaacgagaacaggattttaatgtttccttagattatttgtctgaaaatgaatttttcaatgacgaaaaagaatgtagattttacatggaaactacattgattagatacattagcaattatctttctagtgaggtagtagagttggaagaacttatggaaatcaagcagttgatacagcgtcagaaattggaacgcatgatgaaagtacataaggaaatgcgagggttagaccgatacagagaacagcccaaagagtataaatatcacgacccttatgatgattggatattccgtcagcttgcagatatagacaacagaaacaacattcccaacacttcgccacaattagattttaatgaaacggactatgaagattatctaaaagagaaatggaatagaggactttaattttcctcttgcatgaaagatacagcaaacaaaaagcccaatcaagagtgcaaagcaccaccaatggtggtaaggctctttacagggttctttcttttctgtggtgggtaatcaagcgaaaaatgaagaagtgttttgtcatgctttatatttttatcccgactttgataattcagattgtgaaaatgattaaatacagaaaagctaaataacacgatttatattagcatcactttaatgataaattagttagagtggtgccttatttttttctctgtacaatcacttaaataggtgctatagtaatgggtagatagtattcgaacagaaactataccacatattttttatttttaaaccatgaggattatatcagtttgaacgagacctcatccatgcagattttcatgattgtcacttcccagaaaggagtgatcgatatgagagcaggatttatcggagcggggaaagtaggattttcccttggaaaatacctgaaggaaaacggcgtagagattacgggttacttcagcaaatcaccggaatcagctaaatcagcagcagattttactaacacaaaactatataagagtatagagaatatcttaagtgacagtgataccctgtttattactgtgcctgatggacagataagcaaagtatgggattatatgaagaatctggatattaaaaataaaaatatttgtcattgcagcggttcgatttcatcaaccgttttttttgatggtgaaaacctcggtgcaaatatctattcggtacatcccctatatgcaataagtgataagtgcgaatcatggaaacacttgaataaggcttattttactgtggagggttcggcagagaatctagatgagattaagagtatctttgagcgagcaggaaataaggtaatcgcaatgggagcggaaaataaatctctttaccactgcggtgcagtagttgtaagcaatctcgtaaacggactttttcaagtgggggctgaaatgcttgtaaaatgcggctttgataaaaaagatgcaaagaaagccttagtgcctttgtttactggaaatgccgacacattggcagaaaaaggggttgcggctgccctcacaggtcctgttgagcgaaatgatttgtcgactatcacaaaacacattgaagctattaaggcagcatggataaacgagtctgaggaaaaggtgggatatgagatgatatatcttttgctttcagaaaagcttctcagtattgcacaggaaaaacatttagacagtgactatttgaagatgacggaggtaattaaaaatgaaaaacacagtatccacttttaaagaacagaaggttaagggcgataagattacaatgctgacagcctatgactattcgacagctaaattgatggatcagtcaggtattaacggtattctcgttggagattctcttggcatggttatgctcggatacgaaaatactttgccggtaacaatggaagatatgattcaccatacaagagcagttacaagaggtgccaaagatgccttagtagttggagatatgccgtttatgtcatatcaagtttcagttgaagaggccatgtataacgcaggaagacttatgaaagaaggaagatgtcaagcagtaaagctagaaggtggagcctctgtttgtccacagattaaagctattacagctgcttcaattcctgttatggcacatattggacttacacctcagtcagtgaacgtttttggaggctttaaagttcagggaaaaagtgaagagggagcaaagaaactcattgaagaggcaaaagctgttgaagaagcaggagcatttgcgattgttttggaatgcgtacctgcaaaattagcggaaattatttctgaaagcattaatattcctacaataggaataggtgcaggatctggctgcgatggacagattctcgtttatcaggacatgcttggaatggtctctgactttacacctaaattcgtaaaacaattcgcaaaggtaggagatgtaatgaaagaagcctttgctgcatatatagaagaaactaaacagggaagctttccagcacctgaacacacatttaaaatttcagaagatgtaattaacaagttatattaggagatagaacgatgaaaatagtaaaaaccgtagatgaagtgagagttatagtcaaagaatggaagaaagaaggtcttacagtaggtcttgttcctactatgggatttttgcacgaaggacataagagtttaattacaagggctgtttcagaaaacgatagagttgttgtcagtgattttgtaaatccgactcaatttggagtaggggaagatttggaaagctatccgagggatttggaaagggatactatgctatgtgaggaggcaggtgctaatttaatatttaatcctgagccggaaaatatgtattttgacgatttttcaacatatgtaaacatagaaagtctttcagaggaactttgtggaaaatcacgaccaatacatttcaggggtgtaggcacagtagtatctaaactttttaatattgtaaatcccgacagagcttactttggtcaaaaggatgcacagcagcttgcgattataaaaagaatggttagagatttgaactttgatatcgaaattgtgggctgccctatagttagagaagaggatggtcttgcaaagagttcaagaaatacatatctaagcaaagatgagagaaaggcggcactaattttaagcaaagcagttaagctcggagaagatatggcaaaagcaggagaaaaagatacagataaaattgtatcagaaatgattaagcttattgaaactgagcctatggcgaaaatagattatgttcaggctgtagacgctgtttcagttaaaccggtcaaggagatgacagcaccagtactagttgccatggcagtttatatcggcaaaaccagattgattgacaactttatttacgaaggttaaacgggggttaaatatgacatttgaaatgttaaaggggaagatacacagagctacagtagttcaagcagaacttgattatgtaggaagcatcactgtagacgaagacttacttgacagtgccggaattttggagtatgaaaaggtaagtatcgtagatataaataatgggaacagatttgagacatacacaattgcaggagaaagaggcagcggaatgatatgtctcaatggagctgctgcaagatgtgttcagacaggtgataagataatcataatgtgctatgcacagatgactccagaagaggtaaagaaaaatccacctaaagtagtatttgtagatgaggataacaaaatatcaagagtcgcaagatacgaaaaacatggtaagctataagacatgtaatttgcaaataaaaaagggcatttcggtaattaaaaaatgtaaaaggtgaagaatatgtcatctgccctcgttgtgagcaagaagtttataaagaagtaataatttatccattttgtaactttggcataatggcatggcttgaaggagaaaatgatgaaaatagcaaaccagtgaaagataaatctaagtaaaatctcagcttaacaatttaatatctatatttacaaagcagttggtcttatgattgactgcttttaaaaaagacaccgtttaggtgtgaggtctttttagtgttatttatagtcatatcaaggctcgtttaattatggtaaattcgtggtaaaatgagtgcttttctatacttcaaaatatttgaaagtatagtgtttatgcggataatcgaaaattagatataaaatttagtaataaataaagggatgataagaatgcttcaatttgaagaattaaaattggctttggacgaattaaaaccggatttgtctgatttggaagaagctttggatttaaaagcggcaggagaagaaattgagaaattagaggctcaggcagcagagccggaattttggaacgacatgagtcattctcaaaaaatattgcagcgtacaagcactttaaaaaataaagtatctaaatataatgctttaaaacagaaatttgatgatatacaaacattaatagaattgggaaacgaggctgaagatgtttctatattagaagaagcacaggctgaatttgaacagtttaaatcagagctggaagtacagagactttctactttgttgcaaggagagtatgacggaaacaatgcgatactgacatttcatgcaggggcgggtggaaccgaagcgcaagattgggcagaaatgttataccgtatgtactgccgctggggtgagcgtcatggttaccaagtgaaaacattggattacttggacggagaagaagccggtttaaaaagtgcatctgtattaatagaaggaaccaatgcatacggttttctaaaaagcgaagcaggtgtacatcgtttggttcgtgtttctccgtttgactcttcgggaagacggcatacttcttttgcttcactggaggttatgcctgaaattgatgataatattcaggtggatattaatccggatgacttgcgcattgatgtttatcgtgccagcggtgccggcggtcaaaaggtaaataaaacgtcttcggcagtccgtattacccatataccaaccaatattgttgtggcatgtcaagtagaacgcagtcagcatcaaaatcgtgatacggcaatgaaaatgctcatttctaaattaatggaaattaaagagcgtgaacatttggataaaattgaagacatcaagggagaacaaaaagaaattggctggggcagtcaaattcgttcttatgtatttatgccttatacacttgtaaaagaccatagaaccaattatgaaatgggcaatatcaacgcggttatggacggcgatattgacggctttattaatgcatatttaaaggcgaaaagtcttggtgaattagcagacgtatagcaagaaatatattgttatatatttgtattatgcggcagtaataacatactgctgcaaattcaaatataatttaacgacattttttgatatatttagtgtttttttgtctatatttcagcaaaagatgttaatttttttgacatgttaagtatttacacatataataggagtcaaccatatttgggttttatttcaagttatagaattaaatacaatcaaaactgattcaagtataaaaataaatgtttcaatatgatgaaaaaggtgttgaaaatatgttgctcagaattgctgtttgtgacgatgaagcgattcatcgattgattattcgtgacaagttagatgcctatgcgatttcaaatgatattgattatgaacttgatgagttcaccaattcaaaagaattgatgaaaatggaaaatatttatgatattctgtttttagatgtgcagttggaagatggtatgaatggtattgaagtgggcaagcgtttgctgcaaaaaggaattgatgccacgattatcattacaacctcttttgagcagtatgcatcggaaggctatcatttgaaggcacatcgttatttaattaaaccgatacaacagtctaattttaatgaagctattgtatcctgtataaaagattttaagaagtctaatagaaaaatagaagttaagtgcgcttatgaaaattgttttatttctattaacagtattgtttatatagaatcttatcatagaaaacgaatgattcatacaaaggaacaggtttatgaaacgggcgcatcgcttcaagaattattagagcaattacctaccgcgcaatttgaaatgccgcaaaaaagttatattgtgaatttagactgtgttaccagtttaaccaaaacaaaagtgatgctggatcatacaattgaaataaaactggctagagatcgtatagacgactttaatatgaagtttcacaagtacttgagaggtttttgtaaaggtgttgacggaaattgttactaaaaatagccgtttgcgatgacgaagcaattcatcgcttaattattcgtgataaactggacaaatttgccatttccaatgatgtagattatgaactggatgaattttgtacgtcagaggaattattaaaaattaaaaatatctatgatattctgtttttagattttcagctcgaaaacggagtgaacagtatagaaattggtaaacaactggtaaaggatggactggatgctaccattattttgacaacctcttttgagcaatatgcggcagaagggtatcatttgcacgcccatagatatttggtaaaaccaattgctcaagaaaaatttaatgaagccattctttcttgtattcaagagtttaaaaagcttaacagaaaaatagcagtaaaatgtgcttatgaaaattgctttatttctattaacaaaattatttatattgaatcttatcaaagaaagagaattatttatacaaaagagcaagtgtatgaaacaggtgcttcattaaatgatttattgtcattactgcctgtagaacaatttgaaatgccccaaaagagttatattgtgaattttgaccacgttaccagcataacgaaaacaaaagtaattttagattattctacagaaattaaattggcaagagatagaatgaccaattttaatatgaagtttcaaaaatacataaggggatagttatgcttgagttactgtttagcgcactgatatgtgtagtggagtacagtatttttattatgtttttacaacactatctaaatgatagatgggaacgatctcgaaagttgttttgttttaaatttttggggcttctcatttgttctgttacattaacttttattaacacgttccaaaattctctttggaatgtgttaactgtttttactttaacttttattctatcatgtattttttatcagggaaaatggttagttaaaatatttctggctgttgttacatgtactttatctctaatatcagaatttattactatggttatggggtcagctatcttcggtgaaaatcttactgttattgtcactcttccgtctgtacaggtacctatgactattattagtaaggttcttttatttaccttagtccggattattttcttgataaaaagaggtaaaaaatatacgagaataggaaaagagtcccttttactgtatacattgccagttgtaacggtagctaacattatattaatggtacaattagaatattatgctccgtctgaagagagtcataaggttttaatggcctttgtgtgtattggtttgattttatgcaatattgcagtattttttatctatgataaaaatttgaaaaaatatgaattggaaaatcaattaaggcaagcacaagaaatgcaaagattacaagctagttattacatgcaattagaaaagagcttgaatgagagcagaaaacagatgcatgactttaaaaatcacattacaacattggaacatttgcatcagggtaaggagaatacaaaggccgtttcttatatgcaggaattgcaacagcaaatgaaagagcaaatgaatttagcaagttttaaggtgaaaaatgcagcatttgatgttatactatatgaacagaataaacgttgtcaggaattaggtatcacctttgagaaacaagttttgtatgatgatttatcgtttctatcttatatggatacttgtactatctttgctaacgcattggacaatgcagttaaagcttgcagtgaaataaaagaaggtgaaagaaaaattgagttgttcttaaaaagaaaaaaagatatgcttaatattgttataaaaaatacaaaacagaatcaaattttggaaagcaataatcgcttttttaccaccaaatccaataaggaacatcatggatttggaatagaaaatattaaaatggcagtagaaaagtatcatggattggtcagcattgaatatacagaagacagctttgttttagcagtgataattcctatacctgtctaacgtatgaagagaagattagatagcttttaaattaaagttatttttgaaggagtattaaaagagtcatgtacgaaattataatgcagtcatttttatgttgctttgattttttgattgtattgatgttatttcatcattttttattggatagatgggagaaatctatcctaggtatcattataaaagcaattagtgttcttgtttgtggtgtcagtttagcttgcattaattttttcggagtattttggcttaacgtaatagtcgctgttatattaaatttatctatggcattaagtttctataaaggcaaattgctggtgaaatttttcttatcggttctggtagccacattatctatattcttcgagttctttgttattattttgacgtcatggatattcggagaaaatttgacaatggtgatacaaatacctacggctaaattggcaatgacaattattagtaaggttttattatttattgttattagaattatttttatatttactaaagatagaaagtatgctaaaagtggtaaagaagttttgtttttatttacgttatcgattgtaactattgcaaatattattttaatggtcaaactggaatcttatgtgccccaaaaggaaagccataaaattctgatgtctttggtttgttttggattaattctttgtaatattgctgttttctttatttatgatagaaacttaagaaaatacgaattagagaatcaattgcgagaggcagaagaaatgcagcgtatccaagcgagttactataagcaaattgaaaaaggtctgaacgaaagtagaaaacaattacatgattttaagaatcacataacaactctggaacgcttatatcatacagatagcaaggataaagcattaaattatatgcatgaattgcaggctcagatgagccaacaaatggctgcagccagcttccgtgtaaataatactgcgtttgatgttattttatatgaacaagaaaaagcttgcaaagagcagggcattacatttgaaaaacaaattttatataatgatttatctatcttaaaatatattgatacctgtaccatttttgcaaatgctttggataatgccgtaaaagcatgcagtgaaatacaaaacggagaaaagaaaattactttagaagtaaagcgtacaaatgatattttaagtattattatagaaaatacaaaacagaaccatgtagtttgtgaaaatgaaaagtttgtttcttctaaagccgataaacataatcatggctttggagtagagaatattaaaatggctgttgaaaaatataatggaattgtaagtattgattatactgacacaatattcacgcttgccatttccattccattacttaatgaacaaaaataagcaaataatttacgaagtttgtgaacagaatatgaacgaacgtgaagttcagtcacactaaaaagcaaaatgcgacgttttttcccaaatgtcgcattttgcttttataatttatgtaggctgaagaaaaggccaatcacttaataaaatatttggaggaaacgagaatgaaaatcacaaacaaaattacaaacaaagttatgaaagcagcaacagacgcagcagcaaaggtagcggtatctaacgttaactctgcatgcacatttatgttgcatcaaccaaaagtaccagcacttccaaaaagattccaaaaataatttctactcatattgaaagtatgaaaattatgtattctccgcttacaaatggtgtaagcggaacgtccaaagaattgatatagcaatctctttggtattcataaaatgtttggcatcaataaggatgttgaacttttgtggaggtatgaaaatatgaaaacgaatcgtaaactttttgagaagattgtaaaaacagctacggatacagctgctaaagatgcaatgtgcaatgtaaactcggtatgtagttttatgctgcaccaacctaaaattccagtaatcccacatcggtttcaaacttgattacgaggcttgctgagaagtgtgtagctgcatccgtaaaagggaaaattattcccgaagatgaatcagctttcttcacttttgcatttggcttgatgctgtcacaagcgttcggtatcgcaacatgtttaattattggagcaatttttcaatgtataattgaaagtatcatctatctcttattctttattcccttacgtacgttttccggtggctttcatgctggcagtcacttgaaatgttacattagctcagtccttttatttggatttagtgtttttctgggtgtttatatcagcaccatactacaattacttattattacaatcctatttacatgttgcactttggccgtgctgtttatagctccggttgaagataagaataaaccgttatcagaacctgaagtgaaaaaatgtaaggcaaaggtaaaagttattcttagcttgtacagcatcatatttgcagttctttgctgcttctctcaaacacagcgttatgccgttttcattatgttagctgtggcaactgtctcaattttagtggggatttctaaaattgtggacttggcaaaaaagagaacagcaatttaataaaaggaattacctatttcatggggatgtaaataggtaattcctttttcttttttgatgtgaaaacaggcagcctgtttggactgcctgcatttattttttacgtcttttctgttgcctgatatctttaccacggaaaaacagaggaatataactgcctaaaatacgggaagcaaaacgctcagtgtaacgttcttccaattctttcatagataaattggtactgataatggttggtttatgtgtcataagccttgtatttacaatgttatagattgcagcagttacaaatgaagtggaaaattccgttccaaggtcatctataatcaataaatcacattgtaacatcagttggttggtatcctgttgttcattgtctttttgaaaacgttctttttctaaattggtaaccatattttgtgcagaaccataaataacgccgtaccctttttcaatggcttcatgtgcaatggccaaggataggtgcgtttttcccaagccggttccgccctgcattaacaaattgggagcatccatagaaaattgagctgcatacgctttacaataacgcaaaatctgttccatttgctgataggcggaaataccgctgtcagaaggctcgtttggatagtaggacaaagaaaaattatcaaaggtacaaagtgcaaggggagtagaagcgttcaattggttacatgcttgtatacgcattaacttttttaaacaactgcacatcctgccgtcaataaaaccttcatctttacaagcgttacaagcaaaggaaggctccaaataggtttcgggaagtcctgctttttgtaacagctgcatgcgttcgttctgtaaggaaaggtttttttgtttcaataatgtcaattgttcttttgcttgtgcaccgtttaatactgctcttgcagcctgaattgccgttgcggccagttctgtttcaatttctgctgcacgaggatattgttcatagaatgctgctttgcgcaaattacattcttcgattgctttggtacggtttgcatttaccattgccatggcttcatcgtaaatctcacggctgtatcccaaaagagtccctccttacataaattcgcttaaatctattttttcatattcttccaaatcataggttggtttgtgtttttcttgttcttttgcggctttctcaccggcttccaacgcagcctgttttggtgtggtaatgcctgctttatgccagcgttccagaattttattcatataatgcaagctcagttttcctgtggcgtttacacaacgttcgtaagcttcgcgtatcatatctgttgtaaagttccattcatgcatccaacggtgagtatattgctcttcttttgcactgggtgagcgatggttaatacccaacacttgttcaatgcagcgccaggactttgcaattaatgataactgatttaatttcacatctgctttttcatgggtattaatttcttcttccgcccagttttttgcaacagcttcaatgtagctggtgttgtctttgtgaatacttttgacatacatcaacagcataataattacttcaacaggcaggccgtagtcgtcatgaatcataagcaaagtggaggacaaagcaggggagatggcacgtcccaaaatttgctgtgcctcctgcattaaaaatccaacttccgcacattgcgcgatgcgctgtgcaatataaaccccatccggctttttcatgcgcggcggagtttttatcggcttttctgccatctttttgtcctctgtctgtgtcagtgtatgtacggaaaccgtatgttcgatgatttcggaatgggacgactcttccaaagcatctgcttgcgtggggacagatgtttctgtcgtaatagtttcagacggcatcgaatcaggcgcaacaggtgtaagggtaatatggtcacaatcgcaggaaaaatccgtaatcagaccggctgctgcccaatattgcattgcgtctttaatatcggcagttccaatgccaagtgtttttgaaatatcggcaatatcaacttcagtacctgcatggcgcaatagccatagcagcacttttaaatgaacgccacccgctaattttaaatgttgatccaccacttgtgtaggaactgcaaaaacagaattccacgtccctaaattaattgaaaatttcatcgaaacacctcgtcaaaattatatcacatttacaatagcaaagcaatttaaagtgatatgcacatcatcattctttctatcatattgtaaaatgagtgagaaatcaaatggaaaaagaattccaaaaaattatggaaaaagtagttgacattttttttaagctgtaatataatagtcatcgcggtaaggaactgcggatgtagctcatctggtagagcgccaccttgccaaggtggaggtagcgagttcgagcctcgtcatccgctccagtctgataaaaaagcgtcggtaagcatgccggcgcttttttgttgaatgaaagaaaaaatgaagtcaattctatacttagtatagattgatagagatatttgtatgttatcaagttaaaagaggtatttacatggatgtaagaacagatttaagaaatgttgcgattattgctcacgttgaccacggcaaaactacattggttgaccagttattgcgtcaaagcggtatcttccgtaccaatgaaacagtggaagaccgtgttatggattccaatgatattgaacgtgaacgcggtattaccattttggcaaaaaatacggcggtcatgtataaagatacaaagattaatattatagacaccccgggccatgctgactttggcggtgaggtagaacgtatcttgatgatggttgacggcgttattctgctggtagactcttttgaaggctgtatgccgcagactcgttttgtgttgaaaaaggcgattggtctggggaaaaaaccaattgttgttgtaaataaaattgaccgtcccggtgcaagaccggcagaagtggtagatgagattttagatttatttatcgagttgggcgcggacgaagaccaactggaattccctgtcgtatatgcttccggacgtgacggttatgcaatgtatgacccaatggaacccaacgataccatggaaccgttgtttgaaaccattgtaaaagaaattccggctccgcaaggagatatgaacggcggaacacaaattttgttttccaacattgactatgaccaatttgttggaagaattggtgtgggacgtgtagaacgcggtgaagtaaaagtaggtatgcctgtagtagtctgcagcagagacggcagcaccaaaaatgcaagaattacaaaattattccaatatcaaggtttgaaaaaagttgaggcagaaacagcaaaattgggcgatattattgcagttgccggcattactgacttaaatattggagaaacagcctgtgcggttgattgtgttgaaccgttgccgtttgtaaaaattgatgaacctaccgttaccatgatgtttatggtaaacaacagcccgtttgcaggcagagagggtaaatatgttacctctcgcaatattcgcgacagactgttcaaggaagtggaaaccaacgttgccatgcgcgtggaagaaacggattctgcggatacctttaaagtgtcaggtcgcggtgaattgcatctttctattttaattgagaacatgcgcagggaattgtttgaattccaagtatccagtccaaatgtaatctataaagagattgacggtcaaaaatatgagccgattgagcacctgatgattgaagtgcctgaaagctatgttggagccgttatggaaaaattgggcggacgcaaagcagagctgataaatatgggtaccagagatacgggaacaacccatatggaatttaaaattcctgcccgcggattgatgggatatcgtcaagagttcttgaccgataccaacggtaatggtattatgaatcatgtattcgattcatacgaaccttttcgcggagagattccgcagcgtgcacaaggctctttggtagcgcatgaaacaggtgaagcaaccgcttacggattgtacaatgcgcaggaccgcggacgtctgtttatcggacccggtgttgaagtgtatgaaggtatgattgtaggcgttagcccaaaatctgacgatattaccgttaacgtatgtaagaaaaaacaaatgaccaatacaagagcttccggttctgatgatgcgctgaagttaacgcctcacagcaacttaagtcttgagcaatgtttagaattcatcaaagatgatgagctggtagaagtaacccctgagaatatccgtatgagaaaacggattttatcgaaagaacttcgtatgaaaaaatctagcaaaaaataatcggagtattgaatgaactttgtaatattggatttggaatggaatggaacgtacagccggcgtttaaaaggctttatgaatgaaatcatagaattcggcgcagtcaaagtagatgaatgtctgcatgtgctggatacttttgacgctttggttcgcccccaagtgggcaaaaaaatcagcgggaaaatcaaaacgctgacaaatattacaaacgaagaactggccaacggtttgcagtttatgcaggttatgagccgttttcgtaaatggatgggggatgctgtccttatgacgtggggtacgtctgacattttagccctcattgaaaacagccgttatttttgcggcagtgaacgtattcctttcctcaaacaatatgttgatttgcaaagttactgcgaacaaatgcttcattacgacgccaccaaacaaatggggttgtccacttcagcacagctgctgggaatcaatgaagaagatattgcgcatcaccgtgccatggatgacagtatgctgtctctacggtgtttgcaaaaactgtatcaaaaagaagcattggttccttttattcaggatgcaagaacagatgctttttatgaaaaaattacatttaaaaccatgattatttgcgatttgaccaacccgctgattaaacgctccgacatgatgttttattgcgatgcctgcggccgcagagcatcccgcgaaggtgaatggcagctgaaaaataaaagctaccgcgcaaattttcgctgcaaacattgtgataaccgttttatcggcagggtacagtttaagttaaaatatgacggcatggtggtcaaaaaatgtattcttccgcaaaaggaagaagaaaccaaagaaaaaacggaaaaagtaacagagttgactgcacaagtaaaacgttttaaaagtgcagaaggccaaatgatatgagagagaagcgatatcgttgtttcatacaattgtatcgcttctttcttgttttatttgacaatagtttgcgcttctctcagaaagggaggaaaatgtcttaaaaatgagaaattttcttgtttttaggggaatgattgtgaaaatagattgaataaagcatcggaaaatgttacaattaaacaagaataaggaaggtgtaggcagtatgaatatcaaaaaatggagtgtatctcctttggacaaggcaagggcagccaaaattgcagaagaaatgcaatatccctcgtttttggctatgatgttggagatacgcggctttcatacaaaagatgacattgatgcattatttgatgtatcgaaatcatttgccgacccttttttgatgaaagatatggattgcgcagtagctcgcattcaaagagcaattgaaaactttgaaaccatttgtgtatatggcgactatgatgcagacggggttacttccactgccatgctgtattcttatttggaatcctgcggtgccaatgtgatgttttatattcctctgagagaacaagaagggtatggtctaaacttagaagctttggaccaattgcatgagcagggagtgcagctgattgttacggtagataacggcattgcttccattgatgaagtggcttatgcttctcaattgggaatggatgttgtgataaccgaccatcaccgtccaagagaaatcttgcccaaagctgtggcagtggtagacccgcatcgtgtggactgtacctatccatttaaggatttatcgggtgtaggagttgcttttaaactgattaccgcactggaaggcgaaatggcagatatgacaacactgttggaaaattatgctgattttgttgcagttggcacgataggtgacattgtatcgctgacaggggaaaaccgtgcgcttgtgcaagcaggtctgccgttattgtcgcacagcgaccgtcccgggatttgtgcgctgctggagcaagcaagtatgagcggcaaggagctttcttctaccaatgtggcgtttaccattgtgccgcgcatcaatgctacgggtagaatcggtgcttcggacagagcggttcgtttgcttttatcggaagatatggaagaggcgcaacgccttgcgcaggaaatttgtcatgacaacgataccaggaaaaagattgaaacggaaattacagaaaaagccttgcagctgttgcatgatgaaccggagcgcatgtatgagcgcgtgattgtggtagaaggggaagattggcaccatggtgtcattgggattgtgtcttcccgcattacagagatgtttggtaagccaagcattgttatatcttataccgggactgaagcaaaagcttcaggaagaagcgtggaaggattttctctgtttgacgctatttgtcactgtgctcctttgctttcaaaatacggggggcaccctatggcggccggtttgagtatgccaacagagcatatcgcagagttccgtagacaaatcaatgagtttgccgcttctttgccaacagatatgcctcctcaaaccatacatctggactgcaaactgaatcctgccgcactgacggttgatatgccaaaacagattgcttatctggaaccgtttggtacagataatccatctcccgtatttggactttacggcatggagctgaaagaaattacacccatcggcggaggcaatcatctgcgtttgcgtcttgagagaaatcatttcactgttcaatgcctgaaatttcgcacgacattgcaggattttccctatcaagtgggcgatttggtggacttagcggttacgttggaagtgaatgaataccgcaatacagaaaatttgtctgtatttattaaagatatgaagttatcacaggtaaatgaggaacagatgcttctagagtaccgtatgtatgaaaaggtaaaacgtggtgaatgcttaacaagtgaagagtttttccatatgactccaaaccgtgatgagtttgcggctctttatcgctttttgagaagcagcaatggttggcagcatcatattttgttattgctggaacatttgcaaattcccaatataacattatccaagctgctactggccctggatgttttaaaagaccaaaatttgattgagaaatcagaggacggagatatttacagagttacactaaaacccgttgcgggcaaagtggatttattttgttctcccatactgcgccaattagaatctttgagaaaggacggttgaacaatatggcataccccattcagacatatgacgatttattaaatttaatcaaagccagcggccgttcttttgacttagagcaaattgaacatgcctatcaggttgcggcagaagcacataaagaacaaaaaagaaaatcaggcgagccgtacattacgcatcctgttgccgcagcttgtattttggtggaactgggcatggatactccttgcgtggttgcaggtttgctgcatgacgtggtagaagatacggacatcactttagaagaaattacaaaaatgtttggcaaggaaattgccaatttaatcaacggcgttaccaaactgggtaaagtgcctttttcctcccgtgaagagcagcaggcggaaaatattcggaaaatgctcatcgccatgtcggaggatattagagttattattattaaacttgcagaccgcttgcataatatgcggaccattgagtatatgaccccacaaaaacaacgtgacaaagcgctggaaaacatggaggtatatgctccgattgcagaccgtttgggtattcgtgcggtaaaagaagaattggaagatttatctttgcgctacttagaccctatgggctatcaagaaattgaacatgctttggaactgcataaagacgaacgcgctgattttatacaaaaaatcaaaacacagatactggaaaaaatgctgcccgttattccaaaagttcatttggaaggcagagtaaaaagcattaacggcatttatcataaaatgtttgtacagggtaaatccattgaccaaatttatgatgtatacgcagtcagagtcattgttgatactgtcattgactgttacaatgctttgggaattatccatgatttattccatcccattccaaaccgttttaaagattatatttccacaccgaaaccaaacttatatcagtctttgcacacaaccgtaatcggttcggaaggaattccgtttgaggtgcaaattcgtacatgggatatgcattacactgcggaatacggtattgccgcccactggaaatataaagttggcgttacttcggaagattctttggaagaacatttggcttgggtgcgtaaaattctggataatcaaacggaaagcgacgctacggatttggtacgtaccattaaaacagatttatcgtctgattcggtctttgtctttacgccgagaggtgaggtcatcagtttaccggcaggctctactgtaattgactttgcgtatgccattcacagtgcggtaggcaaccgtatgattggtgcaaaagtggataagcgcatcgtgcctattgattataaaattaaaacaggcgagattgtggaagtcattaccgccaaagaaggttctcacggaccgagccgtgactggttaaaaattgtacgtaccagcgaagcgagaaataaaattcgccaatggttcaaaaaagaacgcagagaagaaaatattgaagaaggcaaagaagagctggagcgtgaactcaaacgcaatggtatcattgtgccccaggatgaactttataacctgattaatccatttgtcaaacgtcaaaactgtgcaaatttggaagatatttatgctactatcggttacggtggtattcaattatggaaaattatccaccgtattaaagaagagtatgtaaagcagaaaaaggctgccgaagtggtgcaaaaaccggagccgcctaaaactgtggaagcaaagccgaataaagcgtctaacggaattttggtaaaaggcatgggcggag

SEQ ID NO: 1133 - DNA, 4837 bp, Unknown
  16S sequences of unknown bacteria
ttttttgaagaagcagatgtcgtatcattattaatcagatagtccgtcttttttgtcacagagcctgtcactttcccgccccgctcctcgatataggacttcagctcactgcgatttgcaaaatgctccacgctcccggtgatcacaaatgtctttccgatgaatgtcttggcctgccggttcgcctgcggccgctcgattgtcaactctgcaagcagctcgtccactgccgacgcattggctgcatctgcaaaatagccagccaccgacgctgcaatgatcgggccgatcccctcaactgatgcaatctcctcctcgcctgcctcccgaagctttgcaaagtcatagtcaaaaaaccggcagagcagcttcgcatttgccactccgatattcggaataccaagtgcatagactactcttgaaagcagtgtggtacgcgatttttcaatactgtccatcagattcgcataagacttctcaccgaagccttccatctccacgatctctgcccgataccggtcaagatgatatatatccgcaaagctgtggataaagcccctcgcgatcagcttctccagggtcgcctccgaaagcccttcgatattcatcgcatcccggctgacaaaaagcgaaaatgacttgatccgctttgcgctgcaccggtcattcgtgcagtagagtgtctcgacttcattgagccttcggatctccgtccttccaccgcatgccggacagtgttccgggatcggcatatttccgcttttcgtcagattctccgcaatctgcggaatgatcatattcgctttataaactgtaatgctatcaccgattccaagctgcagcgatcgcataatactcagattgtggacactcgcccgacttaccgtcgtgccctcgagctccaccggatcaaaaatcgcaaccggattgatcagacctgtccgtgacgggctccactcgatctggcgcaaaatagtctctcgtgtctcatcctgccatttaaatgcaatcgaatcccgtgggaatttcgccgttcggccaagcgaccggccataggcaatgtcattgtacgtcacgaccagtccatccgacggcacatcgtaatgctgaattttctcctcaaactcagctacgcattttgcgacctgctctgaagtcacacgataatactccacaacatcaaagccctgcgcacgaagccactcaaactgagtgctcctgagattgtcaaactccactccatccgcacgcacaagcgcaaacgcataaaaccgtacgtgacgctttgccgtaatctcattgttcagctgacgcaccgagccactgcagagattacgcggatttttgtactgcccgtctgcctcgccaatctcctcgttaattttttcaaattccgagtaggtgatgaccgcctccccgcgcaggatcagctcaccctgataagaaatatgcagcggaatattctggaatacgcgcgcgttgttcgtaatgacttccccgacctctccgtttccgcgcgtgactgctttttccagcgcaccgttgcgatatgtcagcacaacggtcagtccgtccagcttccacgacaacagtacttcatggcttcctgcaaattctgccagtgccgttacatcctttgtcttatccagagagagcatcggttcctcatgtcgctccttcgggagctgttccagcgactcatagccaaccgtcaccgtcgggcttccggacagcacaatcccggtctccttttccagtgcagccagttcatcgtatagcctgtcatactccagattgctcataatttctttatcttcctgataatatgcttttgaagccgcctgcagcatggcagagagcttccgcatccgttcgatctgtttttccattatcccaatcctcgtttctccatagctcagcctcgggaatgcttcagcgcctctctgagcgccgcatattccttgcggctcacattgcgatatgcgcccggacgcaaatccccaagctcgatgttcatgatccgaacacgccgaagcttcgtcacccgatagtgacaggctttgcacatgcggcggatctgccggttcagtccctgtgtcagtatgattcgaaaactgttgctgccggccttctctgccagacacggcctcgtcttcacgtccagttcttccagataaatgccctccgacatctttttcaaaaattccggtgtgacctccttatcgaccgtgacaacgtattccttctcatgataattgccggcacgcataattttattcagaatatcgccgttattcgtcatcagtaacagaccctctgaatccttatcgagcctgccgatcgaaaaaatccgcttcggatagttcaggagctcataaattgtctgatctccccaccgtgtatcggttgtacagacgacacctcgcggcttattgaccgcgagcagcaccatctcttcctctctggaaatgagccttccgtctacctttacccgctgccccgggcatacccggctgccaagtgtcgccaccattccgtcaatttctacttttcccgtctcaatcagccggtctgcctctcttctcgaacacacgcccgcatcactgatatatttattgagcctcaccgcgccatcggccgtctctttttgtaatccctgtgtcataccatcctctgcttcctgtttttaccatgtagcaacgcagctgcctgtctgacttcgccggctgctttcgctctcacattttgttacattccttttctacgccagagtatcttatcatatccccgcccaattcacaactatccgaacatagaaaacgggtggaatatctctgttctgaaacattccacccatcagtcattttcagcaaatcgatcatctgtcgatcttttctcagttctgtacagcttccagatactgcgtcattgcataaccctcaatcgtcgtcccatctgcggtataacggatatgagaccagccattgtccagattttcaagcacctcgacctgcatgcctgcatagagggaaccgttgatcgctgcattttcagatgcctctgcccgcacattcacaccggtcgtcgcctgcatggtcgtggcagtatcgctgccggtcgcagcttcgcccgtatcaccatctccggtcgtcgtactgccggagttctgactgttcttctgggcctctacataggctgcaagatccgcatccttctccatcgccgtgtcaagaagaccattgacatcctttaccagtgcctgaacatccgcatccgtctgcatcttcagcacataatcctgcagctcctgactgctgtctgcatcgccgaagacaagcttgccatccgcatttgtgagcacatacagctcttcgagccgcggcgccgtcgtctcaatgcccgtaatcttcgcatcgcagtacgcatagacaatgtaagtaccgtctgtcagtcccttcttcgaataaaccacaatattattataggattcgattgaagaagcattctcgaccttttttttatcttcgtccgtaaagctctcgctgatgctctgtaacgtgtcgtaatcctgtgcagctaccgcagtatagtactgctctaccaactgctgcaactcggaatctgcggtctccttcaccagcttattctccgaatcatcctttgctgcctctgttacagtctctgtgattgcctgcgtctccggctcactcgtcttcgggcttccaatcccccgcacaagcttaatcgcaaaaaacgcgataatcagcagtaaaatcactgcgagccccagtaaaatatatcggagattgtccgaaagccattcacggaaattatccatgatctgcatctcccttctgttctgaaatttttataaattttgtataatttcatgtaaattcaaattaatcttagcataatcaaccggaaaagtaaaggcaggctttattaatctttcctaaagaatcatttttggacgcagtttcctgcaaagaaaaaagcggaaggcctgcataaaaacaagtcttccgcctttatatcagcgcacttggagggattcgaacccccggcacgtggtaccggaaaccactgctctatcccctgagctacaagtgcttacgagatactgatatatactagcacaatttttttgaaatgtaaagtgttttctgtcaattttatgcgatttacttataaaattgtctctgccgaaaagacaatctccagccgctgccttttctgactgtaacggtagaccgaatcgccaagcagttcttccggtgccacgtgctcttcgttgatctcctttaccatctcatgcagcgcttccggatccagttgttcgtcagatggaataatgatacattcatgaatgctgctcggaaggacatagtaatcggactgcagacgcgcacggacggcctgcaggattgcaggaaacaggatggcagaagcaccaaagcttttttccgtattcgtcagcacatacatcggtggatcctgccggagcattccggaatccacattggaaatctgacggatcagttccagaatgtctgtgagttcatacggcaacagccgcggcgtattgcgcatggcaagtgcatgtaatgtctccggatcggtatgccagatccgcatgtgatcatttttcactaaaatgcttgcatttccaaagcgttcatcctccacccggtaataatagaccactgcaagatccagaaaagcgcggtgcggtaccttctcaagcagtgtacgattcattccgtaatgaaccagcttacatgcgatgtgatcctgcactttcgaaaaatccgtataaaaggatagatcacagact

SEQ ID NO: 1134 - DNA, 32759 bp, Unknown
  16S sequences of unknown bacteria
gtgcatatggcgtatattcatcatccgttgctgggtgatccggtctacggtccaaagaagaccgttcacggtgtaaagacgcagatgcttcacgccggtacgctgggattcgtgcatccgatcaccggcgaatatctggaatttcaccgggatccgccggaggaatttcgcagagtatgcgaaaaaatcggactcatcccggtaagaggataaaaaatgcggcggcggaaacatacgctgaaaacatcagaaaaaagtatctgtccgtcttttttgtgtgaaacgggcggagattcagaaacagcccggtatggcattgcggatatgtcataccgggctgttttttatggcatttcagagatctgcgctccggtgaagagaataaattcaagccgaactctgtgaattttgtttcgtctgtaactgatttttgtaatttattccccatttttccatggcgtccattacggggcgcatggattctcccagttcgctcagggcgtattccacccggggcggaacttccgggtagacggtgcgggtgacgatgccgtccgcttccatcgaacgcagactgtcagtcagaactttctgactgattccctctaaatttttcttcagttcgttaaaacgccacggacgctgcagcagatttcttatgatcagcagtttccatttgctcccgatgagccgtacggtagtcgctacggggcaggccggcatttcttctttcgtcagcatggaatcgctcctttctgatcgtatcaaaatgaatatcactattcgaattataatatagaagcgggtctgccgcaagaaagggcttggaacgaaatccgctgtctgccggatcggcagccggcgggcgctatgttaccaaaaggtgactgagtaatagatttgtgcgtactttttatctctgacggggtgtcatacaatacagtcagggaacgggaaatgttctctgataaaaatattctggaaatgaaacaggagggaatggattatggcactttcgaatctctttggctggacaatcaaaaaagaagctgctgcagtctgcggaacggcgtgcggcgccggggaccaaccggaggaaccatctgcggcctgcggaacggcgtgcggcgccggggatcgttaggacggcacgggaaattatttccggcgggcagacctgtccgccggagatccatgcagagcaatccggttctgcagatttttcaccgcagcagagttctggcggattttttatcagaatatgcgaaagattttagttcagcgccgggaaatatttctccttccgggttttcatgagaaattgcggatttcatgaaaatccggaaatgaaagcggctggcgtggaaaagaacgccggcgctgtgctatagatagatctgagaatcacgaaaagagggaaacttatgatgaaagaatatttcgcctttcaatggcacattacagaggagtgcgatcagcgctgcaagcactgttacattttctcggaagataacttcaaaaagacagattcgatgagctggaagcagatgcaggaaactttttataactgtctcgatttctgtgaggtttacgatcggcagccctatttttatatcacaggcggagatcccatcctgcatcctgatttctggcgcctgctcgcgctgcttaaagattacgatattccctttgccattttgggaaatccatttcatctgaatgatgaggtctgtaagagattaaaggaatatggctgtcggaagtaccagctctcgctggacgggctgagggagacccacgactggttccgaaaacccggttctttcgacagcaccctcgaaaaaatagactgtatcaagcgtgcggggattcgttctgtaattatgactacggtatccggaacgaacagaaaagaaattccagatctcatcgatacggtggtggagcgcggcgcggatatctttgctttcgcccgttattgtcttaccagcgaggaaaaagatactggcatgacgccgcaggaataccgggaacttttggatatctgtcatcaaaagtttgaaaaatatgaggcggagggctgctctacatatttcaacagaaaagatcatctctggacgctttatgagtatgaaaaaggaatctttaaaattccggaggatgcgcaggacgaaatgatttacggcggatgcaactgtggaaactgccatatgacgattcttccgaatggagatcttctcgcctgccggagggtgaaaaacagctgtgtcggcaatgtgaccgcagaccgtatcgcagatgtctggatctgccagatggagcagtaccggaattacaccgcatttgagaagtgttcaaagtgtgagttgctggcttactgcagaggctgtccggcggtggcaggcggcgcagacggtaatttttacagagctgatccgcagtgctggaaggaggtaagagaatgaatttttttgagctggtaaagtatcgccgttcaatccgcagatatcaaaacaggcagatcggacgcggagacttagagaaaatcatagaagccggattatacgctcccagcgccggcggcggacagaggacgatgatcgtcgcgcttcgcaacagagaactcagcgaaaaaatcggaaaactgaatatcgcagggtttcgacgggacaatcttgccggttcttatgtatcgtcggagcagccgagtattatcgatgatcccgcgatcagcagcgggttttacggcgcgcctgcagtatgtgtgattttcgggccggaaaattttctgtacagcacgccggatgcattctgctgtgccgaaaatatggtgctggcggcagccgagctgggactcgcatcctgtatcgtcgcacggggagaggaaactttccgcagtgaagaaggagaagtctttctgagagaatggaatattccagagcattataccgcccgctgtttcgttctcttgggatattccgaaggggcgtatccgcagagtaaactgcgcagagaggggcggagtctgattatagaataaaggaaggacgttcgggcggggacagatttcaatccggaggggtgattttgcggctggagcgatgcgaatcacggtgtgagtcgtattctgcggtttcaggaatcctgtcggtccgcggcgcggctctccgaaaatatttaggataaccgggggacagatttatgaaaatcaatatagacgcacagatgtgcctgaagaaacttgagtatgtcggcgtactgaatttcgctaccgtcggccttgacgggtcgccgcaggtgcgctgtatcagcgcggttcactacgaaccggatgctctgcatttttttacggcggaaggaaaggctttctgtgaggaactgctggcggacggacgcgtacagatcatggcgtatactcgatataaggagatgatccgcgtgaccgcagaggcggttttggcgccggatccggaacggaagaaatacatggagcttatctttgcggaacagccgtatttggctgacgtatatccgggcgacacgagggagatcggtgtcattttttcggtgagggatatggagatcgactattttcatctcggggtacatccgattttccggcagcagtatgccgtcgggaacgcagaaatccgatcgaaaggatatgaaataacggaccgctgtatcggctgcggaaaatgtgcggataactgtcctcagcgctgtatcgaagcgggcagtccgtatcggatttcgcagaatcattgtctgcactgcggcggatgctataaaagctgcccggttcaggcggtggagaaaagagtcggaagaatgactcaggacttgcgggaagagcggaaataacaggagttcaccatcttctctgcagcggggttctgcatgcatgccgtcggtcaggttcagaccggcgggatgactcaaaaacagcgcggactcccggcactgaagcggaggaatgataatgaggctctgttttttatacgataatttccctgccgtgaaggcggaactatccggagggcttgccgaagaatccgtggatcaggaaaaagacagcgacaacagacggagttttttcagattcccgtgacattgaggggagatatgcggaatctatggaaattattgcgaaaatgatctgtgcattaccgctgaaaaattggtaaaatataagtatccgtttttatgcagaaaatctgaaaattctgaaaggggaaatgagggtatgagaaaaatgatttctgcgatactgtcggtgattttgctgttttctgtttcggttccggtatgggcggcggaaaattcgatggataattttaaaagtattcagacgtatgaaagacagttttcggacgtgccgtcgtcaaactgggcggcttcttctgtggagacctgttacgaatatggtctgatgaacggtgtttctgacacgcagtttcggccgaaaggcagtctgacggtagcggaagcgctggtgatggcctgcagggtgcatcagatctattcggaaggaaagagtacgctggagaacggcagtccgtggtatcagccatatgtcgattacgcggtatctcaggggattgtcgcgccttctgattttaaagattacacggcgaaaattacgcgggcggagatggcatatgtcttctacaacgcgctgcctcagtcctgtttttcaaaaataaacaaaatcaaggatattcccgacgtggatgacagcgtagcgaacgcttatgagatcacggctctctacgaagcgggcgttctgacgggaagcaattcctacggcacgttttatccggatcggaatattaccagagcagaggcctccgcgatcatcgccagagtagccgttccgtctctgcgtcaggaattcgaactggagagttcgggcgacggcggtgattcggaagaaacggatctcagcgccggagaggtatataatcaatgcgcgcctgcggtcgtctatatcgcagtctacgatgcatcgggaagagttctgcagacgggaagcggtttctttatcgattccgatggaaccctggtgacgaattatcatgtcgtagaaggaggcgcttcggccaaagttactacgatggataaccgggtctatgacgtcgccggtatatacgattttgatgagtcggcggatatcgctcttctgaaggtgagcggcagcggtttttccagtctgcaggtcagtactggcgaggtttctgccggggacacggtatatgctatcggaagtcctctgggtctgtccaatacgatttcgtccggaatcgtctcgaatgcgtcgagagtttataaggggatgacttacattcaggtcacggctcctatctcttcgggctccagcggcggcgctctgatcgacgcaaaagggcgggcgatcggcattaccagcggagaattttattcggataccaatatgagtcagaatctgaatatcgcggtgcccctttcttatctgagccgactggaaaggtcctcagtcacttctatggaacgagcgctcgccgattccagagcgacgattcgggcggcaaattcgtcggtcactttgggcgtggggcagacgacttcgatagagatcactcacacgtcaaagaatgccgtctcgctgatcagcaggacggcagatcccaataccgtgatctgcagctggggcaagtggacttctcagggaaccacgtccctgacggtgacaggactgcggcggggaacgacgacgattaccgtcggttttaacgaaggagagtcatccgacgctacggctctgattacggtcaatgtggtttgacgcagaggtctctgccggctttacggggtttcaaaaataaggtataatgtctgcaccttgcaactgaccagcaggcgaagaacggaaagagtacggcagagacctgcgggagcggcggcgcccggctgaaatcgggcaaacgagtctttgcaggttgccgcactgaaagatttgcatagttctgatcaggcgaacgtatggaagtttgattccggtctatacggcatttgtgttttacaatggaggatttttatggagcgcagcagaaaaagaagagcgatcaagtatatctcatttgtcgcagccgctctcatcgcgattgtcgcattcttatattttacagggcagttcggcgtttcgcaggcagacatcgaagcggatgccagagagtcgcagaaaatcgatgaaagctggctgtgtgtcaaagcttcggaggacgatgtgacggcgatgttgttttatgatgagtttctcggcgattataaggtatcgatttacacgaatcctgcggatcgccctttcggcagttttttcctgtacggaggcactactaatgcggaaaacgaggggattgcggagtatcttattagcgacagcggcgaccgtgtatacatgtccatgaatctgcagaatgcggttttaatgaagatcagcggcggccaggagataaaagaagtgacattggagagcggtgtgccgttcgtttatgtgatatcggaagaggaatacagcgtcgctttctatgatgccgaaggtgcagaactgagcacgatttctcagacgatatagcggcaaacgcagcgccggcgttatcggctcagtggcggctgctgttttgccgtttcatgagagttgaatttctcgctgaaaatccggaggaaaatactttcttcggctctgcgccgagacggtccgcacactcttctcaaacgagtctgccagagcgttgctctgatttcaaaccaaaaagaggatgatttcgcctgagtaactgccgcggaatctcctctttttttcggtgaagagcttttcggttgatataacgtggtaaaaaccgttgtagtatttgcatagtgtagcggcaggcgcacagaccggatgtctgttcattcttcagaggagtcggtgttccgctctgtactgatttctttatcctgcggctctttttcggcaaagacgatctgtccgtcttctgtaatcgtgccggaggagacatattcgacgcagtcttcacatacaaagtgacctttaaatatgattccgctgtaaatgtcctcatcaccgcagagagcgcaggaatatttatcgaacagatctttcttgctgtgctttctcgtagtgctggatgatttcataagacctcctgatcacgaagctttcacctgctatcagcatactgtaaaattatgtaatttacaataaaaaattgtaaaaaatgttaaaaatagcacgaaatatgtgttttttggataaaatatataaaagttatttatatattttttaagtatatatagaaaaatggaaaagaagttttattaatataattgtgtttatttgactctataaagaaaacgacgctgttaattaacagcgtcgttttcttttctttggtacgcccgtggggagtcgaaccccaatctcaggagtcggagtcctgctttctatccattgaaatacaggcgcacatcttccgacgtcgtctgcgcacttgccgccgcaaaccgtcgtctctattatattacatccgacaggtatttgtcactgtttttcgatcgacacaaagtgaccgaaacgaagaatgtcatctcttaccgcgccgcgttttaccagacgaaagcattcttccgcatcgtctgcgataaaaccggtgatatgatcgattcctcggtccataagagaagggcagagcgggatatccataccccaaagaagcgtctttttctctaattccgccgcgtaacgaagcatcggcccggctaatttgctgacaaaagattttccgctgactgtaagctggtcacaggaaggcagcaattcgcggtatgcggtgtagaggtaatcgcggtaggtccgatcttcgtctcttctgagtatgtcgatcatgccggggatattccggagttcatcccgttcgtacataggctcggaaaagagcgtacgccggtctttggtgtgagattcgcagaattttgtaaaaacattccggctgcgtcttccgccgggataaatctccgctttgtcaggcatgcggtccggccggttgaaaaatgcgttgaccgccgccagtgcgatggacgcttcgatgtaattccaggatttcaggcccggcgccatgtcgcatatcggcataccggtgaccggttcgatatcgaacggaaatctctgataacgttcacgaatcgaaggcgcgagtccgagaacaccgtcttctgtgagcactgcggtccaataagtacctgcagcgaagtcttttatccgaatactgtcatctgtcgctgatatcagagcgtcatagatttcccacatcattatccacctcccggaaattacggatgaacaaagagattctaacagacattcaaaaaaaatgcaaccttcatagaaattttaaatttaagataaatggattcgatattgttgaattatgttatgatatatgaagatttacagtaagtatgccgcggtaggagggcgaaggcagccgacatgagacgatcattctctgtcagcgattccggcgccgggcgggaaataccgcggcaggacagaaatagtatatttttacggaggttgacatatgaagctgattacaatttccggtcctccttcttccggaaagacatctgtgattctgcggctgatcgagtcgctgagagaaggaggaatggaaaaaatcggtgtcgtgaaattcgactgtctcacatctttcgatcaagtcagatacagagaagcgggcattccggtagagatcggtttttccggcaaggtctgtccggatcatttttttatcagcaatatagaagacgcggtaaaatggggcgtcaagagcgggttcgatatgctcgtcacggagagcgcggggctctgcaaccgctgttctccgcacatcagtgaaattcccgcggtctgcgtcatcgataatctgtcgggaatcaacacgccgaggaaaatcgggccgatgctgaaatttgccgactatgtggtaatcacaaaaggggatatcgtctctcaggcagagcgggaggtctttaaattcaacgtccggcaggtaaatacttcggctcggattctctttgtcaacggtatcacggggcaggggtcttttatgctggccaagcatcttcagaaagcgccggagattaccactctaagcgatatgcatctgcgttttaccactcctgcgtctgtctgctcctactgtacgggagaaacacggatcggcgaagagtttcagaacggtatgatgaaaaagatgacctttacgccctgcgatgtttatcggaaacattcggacagcactgatgcggggccttctcttaccgtggcagccgccggcggaagcgggtcggagacgcacagccgtcagagcggccgggtgcaaatcggtgaaagagacgggaaaacatctgagaaaggagggaagcggtgatggtcgatttttacgatctggcggaaaagaaggggatggccgagatctgcgcgctctacccgatttccgaggatttttttgcgaacatgaatctgtctcagctgaacgctgagattccgctggcagatgcgctggaaaagtgtgatccggaatggctggaggagctgggtaccgatgtggacgacgtgctggaacagttctgtgaatttatggaggccctcacttcaccggaggatgatgcgcttcagatacgtcagattaccatctgcggaggccgggataaaagcggacagccggagaacgcagaactttccgtgcatcccggggatgtcatcagcatcgtagggcctaccggctccggaaaaagccggctgctgggcgacatcgaatgcatggctcagggagacacgcctacaggacgctacatccggatcaacggagcgtacccggacgatgagacgcgttttgagctggagggccgtctggtggcgcagctgtctcagaatatgaatttcgtcatggatctcaatgtcagagaatttctcgagatgcatgcaaagagccgtttctgcgaggatccggagcaggtggttattcagtgttttgaatgtgccaacgaactggcgggagaaaagttttccatcgatacgaaggtgacgcagctttccggcggtcagtccagagcgctgatgatcgccgatacagcgtatatgagttcgtctccggtgattctcatcgatgagatcgaaaatgcgggaatcgaccggcgtcaggccatatcgattcttacaagaaaagacaaaatcgtgtttatgtcgactcatgatcctcttcttgcgctgagcgcgtcgaagcggattgtgatccgcaacggcggcatcgccaaaatcatagagacaacggaggaagagcgggcgagtcagacgatcatagaggaactggacggcacgatcatgcgcatacgggaaatgctccgtcacggagagaggatcacgccggaccggctggacggtttttcgcggtgacggtgcgcgatccgcagagctgcgggccgcaaaggagcggtgaggaagttgttgggcggaaaggtgcgatacagacagagaggtgcggtaaatggtaaaaaaagattataatcagctgtatgacgatcttattcggggcattccggaggatatgcccgcggacgatgtgctggccacccactatacagcggtggtaaccggcggcggaggaatgggactgggtgagtttctggatactttcgatacccggccgatggtggagtcagctgacaagaaaagtctgactctccgtcagttggcagagggcataaaatcctggaatatgacagaggcggcgctgggacaggcagctctcaacgcatattataattctgtggagatggcagccgccaatggactgaagctgacggacagcctgcattccgaggaccggacggcagatccctttatcacttatcagaaagcggtgcggggaaaaaaggtcactgtaatcggtcattttccctatatgacagatctcttcgggccagtctgcgatttgaagatcatcgaggctatgccggagatcggcgattatccgtatcaggcggcggaatatctgattccgggaagcgatttcgtttttctgggaccgctgacgctgatcgacaagtctctgccgagacttctggaactggcggaaggggcttttatcggcatggtcggaccggccagcacgctggcgccggttctctttgagtacggcatcgacgagatggacggatttgtgatcaaggaccgggaggttgcggaacgttccacgagagagaccgagaatctcaagatctatgcgtccggtcagaaagtgagtctgcggaaaacggagtatgaagagtttctccggatgaaaagcagcggagaatcagaagagtgacagaataaagtcagataggagttataacgatgaaagcactcgttttattcagcggcggtgtagacagttccacctgcctggggatggcggtatctcggtacggtgcggagaatgtggtcgcgctgtccgtacagtacggtcagaaacatgaaaaagaagtagaagcggcggaaaaaatcgccagatattataatgtagaattagttcgtctggatctgacgccgattttcgctttcagcgactgtcctcttctgaaacagtcggaacaggagattccgcgggaatcctatgcggagcagatcgctgctacggagggcgggccggtatctacttatgtgcctttccgaaacggattgtttctgtcttccgcagccagcgtgtctctgtcaaagggctgcagtgtgattttatacggcgctcacagcgatgatgctgcgggcagcgcgtatccggactgcagcgaagcgtttaacgacgctatgggccgggcgatctatgagggaagtggcggtcagcttcgtgtcgaagcgccttttgtgggaatgtcaaaggcagacgtggttcgcaccggcctgtcccttgaggttccgtatcaatatacctggagttgttatgaaggcggcgaacatccctgcggcgtatgcgctacctgcatcgatcgggcaagggcctttgaactcaacggagtgaccgacccggcgctggagaaataagaaaacaagaggaaagcaaactgcgctgctgtgcgccggatttcgtctgcgccgtcagagaaagacgaaatcagactctctgccgttgacagctgtacataaaaaatgtaaaaaaaatatttttttactaaaaaatgtaaaaaacttttgtaagttccttctttagcgggtataatttttacaggagaaatagtttcggaaggaggaatggaatggtgctgaatttgatagtgacagaatgcggtcaggtaaaaccggagctcagcaagcttcttcgccagacggctccgccggccgaagtttccgtcagctttgcaggggatgtcctgcaggcctgcgctatatttcgctcaaatccctgcagatacgacgcggtctttctcccggcggattcggattcggagcctggcggtgacgcatcccgggcgatcgcgcaaattcggtcactgaatccttatgttcagatcgttctgattctttcttacaattatataccgccctctgcggcggaagtcgggagcgtatggctgcttcgcaggccgatcgatctgccggggcttgagcgtctgatccggggacttcgcgcggcggcttctattcgaagtaaagaggggcaccggcttttgtcccttcgctgcggaagagagcgttattatgtggcgtcagattctgtcttatatgcgaaaaaatgcagaagagggacggcggtgatgacgacagcgggagagaagattcacaccctgaagttagacgaatttgagcgggagctgccttggactttctgcagatgtcacagcagttttgtcgtcaattttcggcatgctgttcagtccgggcctgattatatcctgttggacgatggccagagaatccccgtcagcagagctttccgcaaaaatgtggaaaattttatcgaatgtttgacgaaaacgccgctgttccgcccgcaaaagtgaggaaaatgtttctttcatataaaaaaatcttgaaaagtttgtacaaatcttgtattatatatagcgcgtgcaattttgcatgtaagtaattcacacgctttcggactcgctgccggtgctggaatttgaacgattacagacgtttttcagcagcattcggggatgagggaagcggaggtattgaaaaccaggaggaaaaattatgtcagttatctcaatgaaacagttactcgaagcaggcgtacatttcggacaccagacaagaagatggaaccctaagatggctccttacatcttcacagaaagaaacggaatttatatcatcgaccttcagaagacagtaaagaagatcgacgaagcttactctttcatgatgcaggctgcggctacaggcagaccgattctctttgtaggcacgaaaaagcaggctcatgctgcgattcaggaagaagctacgagatgcggaatgtacttcgtaaacgagagatggctgggcggcatgctcactaactataagacgatcgctacgagaatcaagaagctcaacgacatcaaggcgatggaagaagacggcacatttgacgctctgacaaagaaggaagttatcaagctgaaggcggaagaagctaagctggaaaagttcctgggcggtatcaaggaaatgaagggaatgcctgctgcgatgttcgtagtagatcctaagaaggaaaaaatcgctgtaaaggaagctaagattctcggaatccctgtgatcggtatcgtagatacgaattgtgatcctgacgatgtggactatgtgattcctgcaaacgacgatgcgatcagagcggtaagactgatcacttccaagatggcagacgctgttatcgaaggcaagcagggcgaatccatggacgattccgttccttccgaagaagcggaagaggaagttcaggcagaagcttaattctaatacgtgaaagacagataaattgcatatatttaggaggcacacaaaatggcagtaacagcagctatggtaaaagagctccgtgaaatgaccggagcaggtatgatggactgcaaaaaagcactggtagaggctgacggcgatatggaaaaggcagtggaaatcctcagagaaaaaggactttccaaggctgcaaagaaggcaggcagaatcgctgctcagggtctcgtcggtatcgcgttcagcgacgacgcaagcaaggcttccatcatcgaagtaaactccgagacggacttcgtggcgaagaacgaggagttcatcacatttgtagataatctcgcaaagctgactttagagagcgatgcggaagatatggacgctttcatggcattatcttacggcgacgaaggtaccgttcaggacgcgctcaacaataagatctccaaaatcggcgaaaacatgaacatcagaagattccagaagatcgctgagcctggaacagtcaatgtcggttatgtacacggcggcggcacaatctgcgttctcatcacattaaagacagaagcttccgcagaagaagtagctgttttaggtaaggacgttgcaatgcaggtagcttccatgaatccgaagtacgtcggcgaagatgatgtagatcctgaattcatcgagagcgaaaagaagattctcatccagcaggcgctcaacgaaggcaagccggctgatatcgtggaaaagatggtcgtaggcagactcaagaaggaactcaaggaaacctgcctcctcgaacagaagtttgtcaaggataacgacgtgacggttgctcagtatgtagcaaactgtgcgaaggaaatcggcaaggctgtcgaagtcgtcggtatggttcgttacgaagtaggcgaaggcatcgaaaagaaagaagaagatttcgcagcagaagtagcggcacagcaggcagcagctgctgctaagaaatagcaaagcggataaatctgatcagttgtttaaaactccttgaatccccggtaaacggggattcaaggagtttttgtttggtcccgggcttgtccgggcattagggcataacaatccttcagcagagctcccttttctcataagagtctacagagggaagattgtattatattgctgttaagagtaaaatgaaaaaagaaaatataacagattctatttttagaaaagagcattcaacagggaaaaggtgaaaaagcgttttattttgccggcggcgatactggcggtattactgttctgcggtgcgattttcaaagcggcgcttctgacgacaggagaaaacgggcggccgctgttttgcgaatgccagagaatgaaagttatttctgatgcaaaaataaaaggactgccgttataatgaggctgatgtgaaggaggaacggaatggaattcagagttttgagatattttctgatggtcgccagagaagaaaatattacaagagcggcggctcttttgcatatcacgcagccgacgctttccagacagctgatgcagcttgaggaagaactgggcgtcagactgtttcacagaagcaaacacagtatcgttttaacggaagaagggatgctgttaaaacgccgcgcccaggaaatggtatctctgtccgataaaacagttcgggaactctcgcataatcgtgagatcctttccggtgaaatcgctattggctgcggagaaacgaaaagtatggaattcctctcggagcgaatcagagattttcagcgggagcaccctctcgtacagtttcacattcacagcgccattgcagacgatattaaggaacggatcgagaaggggctgctggatatgggattgcttacagagcctgtaaatgtcgggaaatatgagtttatccgtatgccgcaaagagagaagtggggcgttttaacacgccgggattccgccttggctttgaaaaaggagatcagaccggaggatctgctccacatccctctgctgatggtgagacgggaactcgtaagaaatgaactggccagctggtttggcgattgctatgaagaattaaaaatcgcggccacttataatcttattatgaatgcggcgtctatggtcaaaagcggaatagggacggcgctgtgttttgatatcggagcgaatttttatgatgatttatgttttattcctctcgttccggcgatggaaacgggctctgtgttagtctggaagaagaaccagatgttcggagcggcggcctcctctttcatacggtttttaaagaatgcttttcaagcattataataaatttaatatgggtattagatattttttgaagagttgattacaatgtaggtgtccaaaaaggcgcctgctttttttattctgcagaaaggagtttgtgaatgacgatagatgaggcgagtgagcggtaccatatccccgctgaacttcttcgggaatatgagagctggggattgtgcggcggcgtaaaaaaggtcatgggagcgcggaggtacgatgaccgtgacatggagcatctgagtatggtgatgacactgtacgatgctggttttagccgggatgaagcggaacgctatatgcgattattgctggaagaaaagagtacggaagcgcagaggctcgaaatgctggataaaaggagagcgatcgctctcgatgaaattcattttagagaaagacagctggaccggctggattatctccggcataaaattcggagcgcagataaaaaatgaagcgggaaatgaaatgggtggagaaggcgctgtcagacggcagagaaggaatgcctctgttcagttgcgggttttcgatttcaggaacagggcatgtgaggaaaacggacgggaatcggcgtatgatattggaaatacgggattcagctgagaaatcccggttgcgttacattcgatttcaacggtgaggaggttaaatatgaaaaaattatttgcagttatgatgtcggttgcgctgatatttgctgtaactgcgtgcggaagtgcaggagaccgcacagaagagtcttcgtcttcaggacagaacgcgccggaaagaacggcggcagaagccaaaggactggtggtatatttctcatggtcgggcaacaccgaaaatgtcgcaaactctattaaagaccagatcggctcggatatctttgaaattgttcctcaaactccgtacagtgatgacttcgatacggttgtagatttagcccgggaggaacagcgcacggatgcgcgtcctgaaatttcaggaagtattgacaacattgcgcagtatgatgtgatttatgtgggctatcccaattggtggggcgatatgccgatgattctctataccttttttgatacctatgacctgtccggtaaaatagtcgttccttttgtaacgagcggcggcagcggattttctgacacgatcagcacgatacggcatctggaaccggatgcgtcagtccttgaaggactctctctgagcagttcccgggcatcagatcctggcagtgatgtcgcagattggctgactggcctggggcttgtgaaataagcggagaatgatgaaatgaattatgcgaataaattaactgggctgaacctgaaacgcagctttgaggcgttggtgcagctgacagagggcgcgcggataccggacggatccgcggccggccgcggaatccggaagtgattcgtcggtgagaaaagagaggaaccaaatgagaaaaagcatgtatttttttctgctcgctttggcagcgttggtaattctcggcggttgtaccgggagctcccggcagacagaaaatgtctcacaggcagagagtgaaacaaaagaaacggaagcaggagagaatgaggagacggtagagcgaactgcggaggttatgaggatcagggtcgaagcagatggaaaggaaatcatttttgaattgaatgacagtcaggcggcggaagatttatataatcaattgccgctgacgttggaaaatgaggacttcagcgataatgagaagacattttatccaccccaaaagctggacgtcagtgatgcgccatttactgatgggagcatcggaacattagcgtattatgagccgtggggagatgtcgttctgttttacggaagttatcaaccgaacagcgcgctttattccttgggaactgcggtttcaggaggggaattcatttcggaaatttccggtaagatggtaatttcccaggagaaatgaagcgtgagacgaaagatgctgactgagccgcttggaatattattctgacataaaaggctgccgccgggctggcggaatggattacacaggaagcaggcggagatttcagaggttcgccgaaggtgcggaaaacggcggaatattctgagatgtatacggtaaaaaaggagtgtgaaagtgtgaattatacaaaacttggaaattcagatcttatggtatcccgtatctgtatggggtgtatgggttttggggatgcgaataacggacagcattcctggactctggatgaagaacgttcccgcgagattatcagccgggggatagaattgggagtgaacttttttgacacagctgtcgcctaccagagcgggaccagcgagcggtatgtgggacgtgcactgcgggattttgcgaagcgtgatgaagtggtgattgccacgaagttcctgcctcgtaccgatgcggatatcgaagcggggatttccggacagcagcatattgaacgcatggtgaacaagagccttgaaaatctgggtgtggattatatcgatctttacatttaccatatgtgggattaccgcacgccgttgtatgatgtcttagaaggtctgaacaatgcggtgaaaaaaggaaaggtacgttatatcggtatttccaactgttttgcatggcagctggcaaaggcaaacgcactggcagagcgggaaggctttgcaaagttcatatccgttcagggacattataatctgttgtttcgcgaagaagagcgggaaatggcgggactttgcgccgaagacaatatcgccatgacgccgtacagtcctctggcaggcggcagactttccaggcattccggggagacttccaaaagactgaaagaagacagttatgcgaggctcaaatatgatgccgccgccgaacaggacagcgtgattatccgccgcgttgaacagctggcggagaggcgtgaggtaacgatgacggagatttcgcttgcctggctgctcacaaagacggcatctcctgtggttggagcgacaaaattacagcatattgaggaaatggtcggggcggcggagctctctctttcagaagaggaaattgcttttctggaggaagcttatgtgccgcataagcttgtgggcgtaatggcgcagaatacgatggcggcttctgcggcccctcatgtatggtctgtcggcaatcagaaaatataatggaggaacagatgccgcacgtcgatattacgatgatcccgggacgggatgagattgcgaaaaaggaaatggcattgaaggtgcagacatttcttgcagaagagctgggaatggggaaggcgcatgtttttgtgtccatcggggatatcccagaagagaaatgggatcggcatatgcggggatgcaggataaaatcaggcttgtctaaaagaatggaggcgtgaaaatgaattattacgaaacagatccggaatttatggaacggtttgaacatttcgcttttgatgaggtagtcaatgaagagagccggcagttggaaccgaagacgcgctatctggtgattctggcggcgctgatcggttgtcagggtgaagccgcctacagagaaatactcccaaaagcgctggaagcaggattgtctcccgtcgctgtaaaggaaacggtctatcaggcagtggattatctcggaatggggcgaatgtggcagttcttaagagccgcaaatgaaatttttgcggagaatgagatcgggcttccgctctccgcgcaggcgggaaccaccatggaagaccggctggaaaaaggcgtgcaggtacagaccgctattttcggagaacagatgaaagaagcctggaaaaacggacctatcaatcgctggcttgcggacaactgttttggtgattactataccagaaccggtcttgatcttgcgcagcgtgaactgattactctttgtttccttgcggcgcagggcggatgtgagccgcagcttatcgctcacgcaaaggggaatatgaacatcggcaatgataaggactttttaatcagcgtcgtgtcccaatgcctcccttatatcggttatccccgcagtttgaatgcgattgcctgtatcaacaaagccgcggaatgatttgaaagggacggtgaaaaggcgaagccggaagagactgtcaaaatcgggatcggtctgctgtgatgaccgcagcgctcctgtttgtatcaggggatcagatatggggagatatcacacatgaatgggcgggagcataaataaaagagccgtaatcgcacggcagaataaaatttcgcatggagatcggctcttgctgcaatcgcaggagcaaagaggcccgataatcctcaaaaaccgaagaagcggacggtcagccgccggccagcatccggcaggcacaacggaatcaataacatattccttgtgatggagaaccggcggaattccggaaacgtcagatctctcaccgcaaggaatgagatatatgtacaatatctgtgaagataatccttgactcatcgcccaatgaaaggtatatttcatatggatcataatgaaaatgcagttttgcatattattatgagtgaattttagaataaatgatctcaggaaactacgtcacaggagaaaaactatggaaatgaagcgcgtatacacaggcaagacaaaagacgtttttgcactggaaaatggaaattatctgttgaagttcaaggatgactgcaccggaaaagacggtgtattcgatccgggcgaaaatgcggtaggtttaactatcgacggcgtaggcgacgttaatttacgcatgtccatctattttttcgaaaagatcaatgcggcgggcatcaagacgcatttcgtaaatgctgatttaaagaataccacgatggaagttcttcctgcaaaggtgttcggtcagggactggaagtcatctgccgtcacaaggcggtaggaagctttatccgccgttacggacagtacatcgaaagcggcgcggatcttcctgcttatgtggagatgacatttaaaaatgacgaattgggcgatccgctggtgacaaaggacgctctggtggctttaggagtcatgagcgataagcagtacgaagatatcaaggagatgacgcagaagatcacacagatcgttgcggatgatctgaaggaaaagggcttggtattatacgatatcaaatttgaattcggctatgatgcagacggcaatgtaatgctgatcgacgaagtggcgtccggaaacatgcgtgtgtataaggatggagaatatatcgatccgatgactctttccgaattattcttcgcttagccaaacggaatcgagcggctgaaaaaagacaaaaaagacgcaggcacttgtgaagatttattcacagtgcctgtttttctgtaatcggatgcagaacaacagaaaaaaggatgatctgaatcctgtttatgaaaggtcttctgacgatgaaaaaggggcggattttttgtgagaaggatgcttttcatctctgcgcaaagaatggccgatgaagaaatgaagtcacagcaaccgcgggttgcttgtttttcccggcgggagatgatatgttttaggcgaggtgatgataagtatggaagaaaaaaatattattttcaggctccgcagagaaaaaggtctgtctcaggaagatctggcagagaaggtttttgttacccgtcaggccgtatcccgttgggaaaacggggagacggtgccgggtacggagactttgaaactgctgtcgaagctgtttgatgtttcgattaacacactcctgggatcgccgagacagctgatctgccagtgctgcggcatgccgctggatgatgcctctctgagcaaagaaatcgacggagcgtttaatgaagattactgtaaatggtgttattctgacggcagattcacatatgaaagcatggaagagctgatcgactatctcgcagaacacatgtcggatgaaaaccggcctccggctcaggtccgcacctattttgaagagtggctgccgacgctgcgctattggaaacgctcggagaaatgaggcgcgcggtctggaggaaaatacggacaagatacagcggaccggatcaccgatctatggtccgctgttctttttgtcttaacttctttttatgcccacgattttctccgcttttttcagagcgtatcggtagaccagaaacatgacgaggcatgcggccgcgataatgccgaggaggatcgtcagcgctgtgatttccgttccctggattctgccgtcattgaaatagtccatggccagggagaacagaaaacctgtgccgcagccgatgaccgcaggatattgaaagattctgctcagctgttttttgagcaccttttttttgtacgtttgatcggctcccagtttatccagactctcaaagagagcctgattgtccgacgctgcggagacgcttctcacataagtcatgacggcgatggcggccagtgagatgatgcagatgtacagacacagcatgacatagacgctgatgagctgcatcttgtcctgtacgatgaggatatcgaactgaggagaatatctccagtcgctcagcagcatattgttatccatggtcatatcgatctggtagtcgtacccgtattcttcaccggattcggcggcgagtttctgctcccagagatcccagtaacccgcatgattggaaatgtctgtggcgcgatccacatactgagctgtgagatccttggcaaagctgtaagagttttcagggtcgttcacgttgaaaaatatcgtattttccagatattctgcgccgagtccttcggtcatcacagcgtagtcagcgtcgttcagcacataggcgtaaggctctgacatcgaagaaagggccgtgaattccaccataccggcataagtgaccagaagctgtctgccggtgttcggattggtgattttatccagaccgtcttcgtaggagaaaaaatctccgtcgaaatccacgggaaccactgtcctataggtacccggttccacggatatcttctgatccgacaggacagaaaaatcattggcggatacgaagagcccggttttttcttcatcgccgtaaagttccacatagcggcttccgtcatcgctgaaatctttataatgataagacatgaccagatttgcggcggtgctttcgctgtaatctgtgacggtcagatcatatttctccgcggtgtcgtatatctcttcccggccgatctgattttcctctgcaggggagtggagggaaaatgctcttccgcctttttccccgagactgtccggcgtcagggaatactgcattccgtagaaagaggcgaaacagcagacgaagagcagcaggacgataacgcacatgcttttcgtagtctgttttgcggtaaagcgcatcatactgatggagaccagatttttgtagtacttttctttcttttttttcgccttgctctgggctacgatgttcagcagcaccaggtaaatgccgatcagcgtcagaatgtaaaatccgttagtgagcagtccggagagattgacgcggaatacttttgcggcgatctgcggtacgccggctccgaggaggattcccgccgcgataagaaacagacctgcagggaatgtccagctcttgatctctttgatgatttctgtcttctgtcgggtacgcaggatatccatgagatcggaacgccggataaatcttcccgcggcgattccgagcatgacagcgagtgcgagtgtgaagagaatacccggcagaaagcccgagacgccgaaacggtacgtcatctgtgcattagatatgataaacaattcaaacagtttccagatgagataggaaacgggcgccgcgcacaggagccccaaaaaggaggcggagacggtaatcagtgagagctctttgaacagcagagcgcgcagcgtttttttctgcatgcccagtgccatgagaataccgtattcccggcttttattccgaaaaaacaggctggatgcgtagacggtaaataggaagcagccgcaggcggtagttagaagcagcagagaagccatttttctggtatctccaccctccggcagaaaattctgtaccgtcggcccgaagtacatcagagcgaaggatgagatcaggagaaccgaaaggaaggtgcagaaagcgagaagaaggtactgacctctgctgccttttctgagtttggtgtaaattttactgattgtcatggccgtctccccctaaatttctcagaatgtccagaagctgatccataaactggcgtctgctgcccgtctttttaatctcctgataaatcgttccgtctttcagcacgataactctgtcgcagaaggaagcggcatagctgtcgtgggttaccataaaaatcgtagcgcccacctcttccttcgcccggagaaacgcttcgatgactgcggtgcaggatttgctgtccagatttccggtaggctcgtctgcgagaatgatgtagggattgttcatcagagaccgtgccacggcggtacgctgtttttctccgccggaaatttcagcgggatactttttcatgattttatcgataccgaagagcctgcacagtttttcagctttcgcttccatctgagccaccggttttttggcgataatctgcggcatacagatgttttccagtaccgtcagaccgtccagcagcataaagtcctgaaagacaaatccgagattttcgtttctgacccgggccagctgtctttcgtcgagagcgctgagatctgtaccggagaggcgaatcagcccgctgtccgcggggataaagcaggaaatgcagttgagcagtgtggtcttgccgctgccggaaggtcccatcaccgccacgaattctcctttttccacgcggaaattcacatcctgcagcacaggataagtcctgccgccactttcgtaactcttatttaaattttttacttccaacatattttgtttcctccattttctctgatttcttttgacaagcttattttagaggagacagcgggtattttttagttgcggaaatgataaatttggcgttctttatgtaaagtttgacagaaggaattcccgatgttagcctattaaggtagttctgaaacaggaggaaaccgatgaaaattgccatatgtgacgacgagaaaaagctgcggaaagatctgcggtctctcatagagattcagatggacctttccggcggggattataccatcgaagaatttgaagacggaagggacctcgcggctgccgaaaaaaagaaagatattcagattctgtttctggatatcgagatgcccgggatggacggtatggagacggcaaaggcgctccgcgctgccggatgcaggatgctgattatctttgtgacggcttatccggattttgtctttcagggttatgaagtgcaggcttttcactatatcctgaaaccgtatcagccggcgaagataaaggaggttctcacaaaggctctcagagaaacggaacagacggagcggcggtattttatcatcgagaacaagtcgggctctctgcgtctcaccctgcaggatatcctttattttaaaagtgaacggcgaagcatatgcgctgtaacggaatgcggacaggaggtcttttacggcagacttgacgatacggaagaagaacttcgcggatgttttcagagagtgcacaatcgttatctggtaaatatgaatcatgtgacgagagtagagagtacccgctgtctctgcggaggggaggaaatcccggtgagcagaacttacaaacagcagcttgcagtggctttcgcccggatgatgctgcgataggagcggtctatggagtggataacaagaatcatcagttatattttttcttttgccgcagggtattttttctataaaatcgagtgctgttttctgacgccgaaaaaaggaaagctgctttttcttctgacctgggttctcctttccgcagccgtgactctggtgatttttcccagagatccggtcaatatcaccgtggctctcgtcagtcttttgctggcgaacgggctgttttttaaagggaaatggatcgtcaagttctccgcggtgacagtgctctatcccatcgctatgtctctcaataatcttcatatggatatgggcgttcacctgtatcatctcctgctcccgggaaaatccgatgaggaaagcgatatttatgccagtctttcttatgggctcgtggttttattctggtatcttttttaccggctgcagaagaactctctgcagaaaatctatcagattttagatgcccgggcgtggctcatggtcaatatcatctgtgcggcgtccttcgtatcggtgctcagctgtacttattttgcgccgacgcctacgtattttatatggccggcacttgcagcctgcatcgtcactaatgtgggcagcgtccgcctcgcggcttcctatctggccgacggcatttatgcggatatggaacggagaaatctgcagctgcagcagaactattaccgtgagctggaggcgaatcagaagcagattcggaaactgcgccacgatctgaacaatcatctgatggtggtaggcagactctttgaggagggaaaaagagcggaagcgcagaaatattttgaacaactgtccggcagggcgctgtccagcagccgtaccttctgtaagaacagtgtagtcaatgcggtgctgaactccaagtataacaggatggcagaggcggagatcgacagtttttttcatatcagcatcgataaaatgatgatgattgacgacgtcagtctctgcacgatctttgccaatacgctggacaatgctgtcgaagcctgccagaagatagaagacaaggcggcgaggcggatctcggtgaaagccagatacaccgaaaacggttatttcagttatgaaatcgtaaactcaaaatgcaaccggatcaggatgcgaagagagcgctttatcaccgataaagccgactccgcgtctcacggagtcggtatttcttctgtaaaggaaatcgtggaaagatacggaggaacgatggacatctcttttacggagggagagttcaaagtgatcatactcatcggatagcagagcggatttctgtgtttttatcccggcgcacagcatggatatattcctaaaatttaaatttatgacagacaatattcccggccgcagtgtttcactgcggtatatttttttcataaaatgaattgttagtaattataaaagtaataaattcggttcagttcctttaaaatcatggtaggaaactgcaggtttcaaatcggagcaaagctttaacaagttcgcttgattagagcttgcgaacgatttcaacatcgtgccgggaggtatcggcatctgacggttttcgcaaaaagtcgcgggtttttcggaaatcagcggagcacgccgcctgcagagggcggcgatatcggcgctgtgttatgtacgggagaggaattcgtgtgaagcgacgcaagaaggaagaattttttatggagcatatcgcagcgaggtatgcggatatttaccggtatgttttttcgaggttgcaaaatgagagcgatgcaaaagatgcggcgcagaataccatggaaagggcgtggaaatctctggatcgtctgcgaaaaccggaaagtgtaaaatcctggctgtttcagattgcgtacaatgaatcgataaatgtgatcagaaagcggtggcagacgtactcttatgatgatcccgattcgggatatactctggacaaaatcacggaggttcacgaggatctgatggagatactgctgcgcagagaagagcggggcctgctgatggaggctatggctcttatgagacctcattaccgggaaatcatacagctgtgggcgataggggagttttcgcagaaagagatttctgagatgttagatctcaattacaatacggtcagagtaactttgtttcggggaatggagcagctgagagaaatttatcgtgctctggagcggggtgaaaatcctaaaaaattcagatgaaatgatcaagaattccggaacgtcaggagagatgaaccgggattttatttttgataggagttccttcgtcagatcgacgcttccaatcgtttgatgagcataaataatggaaaatggtgcgcgggtggctgagcgcaggaggttgggccggctattttcatcatctgctgtcaaacccgttttcctcgtccgttctatagcttcagcagcccgggaaatgaattgttttcgccggcgccgccggattaaaacggattgtgtctctgtaattcacaatgtcggaatgaaatgccggcgagttcttctcgggtgaccgccctgcggccgcggccggtagacggcatgtttttccttgcctgtcggatgcgatttctgtatattttaaataagaagaaaaagatagggggaaaagatggaactcatcaatcattatgaagaggcgggggcgggcgagcctctgatcctccttcacggaaatggagaaagctgcgaatatttttcacgtcagatatcgtattttaaagaaaactaccgggtcatcgccgtcgacacgagaggccacggcaaaagtccgcggggaacggcgccttttaccatacgccagtttgccgacgacctgtacgcttttatgagaaggcgagggatcgataaggcgcatattctggggttttccgacggcggaaatatcgcgctgacctttgtactccgttatcctgcgtgtgtagaccggctgattttaaatggtgcgaatctgtatttttcgggaatgtacgctgttgtatgcattcctgtgtatctgcggtatcttttctggcggatgttccggaagcggagcgaaacggcgaggaaaaacgcggaactgatggggctgatggtcaacgatcccgcgctgaaaccggaacagctgtttcagatccggcagaaaacactggtcatcgccggaacgagagacatgacgaagaagtcccatacagaactgatcgcgcggagtattcccaacgcggaactgaagtttctgaagggagatcattttatcgccgcaaaaaagccggatgagtttaaccgggaagtggaacgctttctgagagagcgggaaagcggccgtgactgagtttttctttttttatcagaagatatgagataccttttgaaaacagtgttttttacagagaggatgggtgattatgtgcggagaacgaaaagacaattgtgtcctctatgagaaggaccggcatgttgcgcggattactctgaataagccggaaaaaaggaacgcattggatgaagagctctcccgggagctctgcgcggcgcttcagaaagcgagggatgacgacgatgtgcgggccgtcgtactgacgggaaacggtaccgcgttctgtgccggcggcgatgtggcgcggtttccggaattcggcctggaggaaagcatttctttcgtaagagatggccagaaagtggtgtctctgtttacggagatgttcaagccgattgtcgctgctgtcaatggcgctgcggtgggcgcgggactctcgatcgttctgctctgtgacatcgtgatttcttctgacagggcgaaatatggcgcggcgtttgtaaaagtgggactcgtcccggatctggcggcgctgtatctcctgccgcgggcggtggggctgcaaaaagcaaaggaattgtcttttaccggaaagagcgtcagtgcggaggaagcctgcagcctggggattgtgaaccgggtggtgcctcatgaggagctggaatctgcggtacagcagctggcccggacgctgacttcggggtccgcctcggccatcggcgcggccaagcgtctgctgaatctgagtatggatatggatctgaaaggactgctggaggcggaagcgctgacacaggggatctgtatggtgtctgaagattcgagggaaggagtagatgcctttttgaataagagagaagcggtatttaacagaggacggtaaaaaggctctggtctcagaatggagacagtgatataaacaaaagagcgtgtggaaagaatgcagaggatcctgtgacaggagctgtactgtggagtttcctgcgctctttttatatttgtttgataaagaggaaagttccgtcaagtcagcccggtcagagcaggcggcagccttgtgcgcagtgcgatgggaattgggattcgtctgtttacacatataaatctaatgtcttgtcatatgtaatattctatgttaaaataggtcatattttatcggagaactgcgggatgcaggaaaggtacaggtttacagagatgacggcggcggagcagatacacagatggaaagcggaaaaaaacgcggtgattctggcacattattatgtcagaccggagattcaggagatcgcggattatgtgggagattcctattttctcagcgaaaaggcggcggagctgaatgcggagatcatcgtgctctgcggtgtttcttttatgggagagagcgcgaagattctgaatacagataagagagttcttcttccggagccggaagcggactgtccgatggcgcatatggcgacgtcggagcaggtggctgaagtgcgggctggttatgacgatctggcggtggtgtgctatgtcaattccacggcggaactgaaagcggtcagcgacgtctgcgtcacatcctccaatgcgcagaagatcgtgaaggctctgccgcagaaaaatattttctttattccggatcagaatctggcgcattttatcgccggtcagctgccggagaagaattttattttccatacgggttattgtccggtccatcacgatgtgagagcggaggatatcgctgaggccaaagcagagcatccggaagctctggtgctggtccatccggaatgccggccggaggtggtctctttcgcggactatgccgggagcacggcgggcatattgaaattcgcttcggagagcagctgtgattcttttatcatcggtacggagcagggaattttttaccaactgcagaaaagaaatccggaaaagaaattttatcccgtgggcggcggccagatctgtccgggaatgaaagaaatcactttggagaaagtgcttcgggcgctggagagggaaaagccggaagtagaaatggaagaccgcctgagcgtggcttcccgtcgttctctgctgcgcatgctggaattatccagatgagagggggagtccattggatatcaggactgacgtagttatcgtgggtaccggagtcagcgggctgttttccgctctgaatctgccgcgggatcgaaagattgtcatgatcaccaaatccgatgcggagagcagcgattcctttctggcgcagggaggtatctgtgtcatgcgggatgaggcggactatgatatttattttgaagataccatgcgggcggggcactatgaaaaccgcagagaatccgtcgatatcatgatccgcagttcccggcagattatttccgatctcatcggatatggggtgcggtttacgcaaaaggacggagaactgatctttaccagggagggcgcgcattcccggccccggattttatacagagaagacgagacgggaaaggagatcaccggaactttgctgaaaagggtgagggagcttcccaatgtaaaaattctggaatacctgacgatgacagatatgatagaagaagacggccgttgctgcggcgtgctggccagaggtgattcgtacggcgatgtgaaaatctccgctgattacacgatttttgccagcggagggatcggcggaaactacagccattccaccaattatccgcacctgacgggggacgctctgcgcatttgcgaaaaacacggagtccgtctggaacatctggattatgtgcagattcatcctacgacgctgtattcggagaaaccggggcgccggtttctgatttcggaatccgtacggggggagggagcggtgctttatgacaggacgggatgccgctttgtcgacgaacttcagccgagagatgtggtgacggcggcaatccgggagcagatgaaaaaagacggaacggattttgtctggctttctatggaacctctgggggagaaaacgatcctggagcattttccgaatatccgccgccggtgcttggaggaaggatatgacgtggcgaagcagtggattcccgtagtacccgctcagcactactttatgggcggtatctgggtggattccgacagccggacttcgatgcagcggctgtttgccgtaggggaaaccagctgcaacggcgtccacggagccaatcgattggccagcaactccctgctggaaagtcttgttttcgccaagcgggcggcggaaaaaatcgcaggagatcgaaaaagacagttccggtgc

SEQ ID NO: 1135 - DNA, 32759 bp, Unknown
  16S sequences of unknown bacteria
atgaaatccggaaggcaaacggatacgatttcgtcatcgaagtggatggcggagtaaaccttcagaactacgaagagctgaactccgtcggcaccgacatcctggttgccggatcggcagtattcaaggcggaaagccgaaaggaagccatagcggttctgggcaagtaattcggaatgtaccggcgcgaaagaaagaggcgataacagggagcatcacacgaatatgtggtgctcccgttttttttggttcttcacttttttctcggggattttaacaaaagaggcccttgtatagaaatgtgtacatatggtaaacttggagtagaaagacgtagcccctgaagccccgaatggagactccacgatgccacatgcctattcaagaagattaaagtctatttcattttttttaatttttattcttacttttgaaattttgttcagttcagcagagtggttcgcctatggcgatacgaatgcaactgatacgaaagagtcttccgaaactcttccaaatgatttgtcaaaatccgaagttttggaaaaaggaaccgattacacgattttcaagaatcccgatggaacccgaagtatggatgtctatcaagcagatgtgcgtacgcaagatgaaaatggtgaacttgaggatattgacaactccattaagaaaacggatgaagagggaaaaacagtatataggaaccagaatggttttgccgatatcactctcccagagactattacgaaagaaaatccggtacaactagaggaaaagagaaataaagtttctttttacccagttggaaatgaagagaacacgatcttggaaatggataaaacaatccaagagaaaacagagaatctgtattataaaacgcaggaagaaaccaccggcattaggtatgtgggaggagatgctgcagtccagtatgaatattttccaacggatttcgggctgaaagaaaatatcgttttaaagaggaaaccggaagtgaatcaattccggttcatcttgcagtgcagaggaaggtaccttgaaaaagaacatcgtgcaattctgattcgagataatgaaacgaagaaagtaaaaggggtgctgtcggaaccgtttatgacagatgcttcggatagtgagaaccaaggatttagtgaggatgccgagtatgactatacggtcatagattctgataaaggaatttatgaagtgatattaactgtatcagaagactatttgaaagatgataacagggtatatcccgttactatagatcctacaataacactgaacgattctgcaacaattaaggatgtatatgtactcagcaaacatgcaaattcaaattattacagcagtggaattattaagatgtgcattggatatggacccaaagatggtgtttgcagaacttatgtaaaatttccgaatctacagtctaagatttccaaagcatatatttctagtgcaacattaaaactaaatgagcggaataacaccaaaccatatcctacggtaggagtttatcgagttaccggaagttgggacttgggaaaaataaaatacagcagtcaaccttcatataacggaacagcggtggcaacggcgaaattaaccggaggaaccgcaagtcatacattgaacgtcacttctctggtgcagggatgggcgaagggaagttacaagaattatggaatgcttcttagagccacatcggagagcagttcttccgcaacattctgtgaattctatggagggcggtatggaactgccagcaaacggccgaaactgaccgtaaattataccgtaccttcaccagcagttccaagcaagccaaccgtatcggtggatcgaaatgcaataccaaagggaaccaagaacattacagtgaagtggagcggcctggaaagcaacgtatttgccaatgcgcaggtcaaattagtaaagtacagtcagcagaataatacctatgctttagccaatgcgaatggcaaggtgtttgcatacaaagatatcagtggttccggaaaaagtggttcttattcgatggatacttccggattggtcgaaggaaagtatgcggttgttattcgtggaaaagacaaagtggggaataccggggacggaacgctggcattgttttatgtggacagtacgtctcccgatgcaccgatactgggcaaacttcaatcttcccgaatggaagcaacatcagaaaacgcgaaagtggaagttgctgtgcagaagggaaaagattatccgacctattatccttctgggattgcgaaaactgaagtaactttgtacaatgcggacaacaatgaaaaaattggagaaactatatccttatcaccttcagatagtacagcgacttttaaaaatgtggagtccgggatagatgtgtacgcaaaggcaacaaatgaagatttaaccggaaatcggagtgtggaaggaaagtcggaaacgtttaccgtgaagcctttgaatcttccagaatttgtcggaaaggaggactttaatagttcactgaagaagaatccttggatttcgaaaggaaaccatcatacggatacatcatggaaggtgacatacgatggaaaccttagaaaaataacagcggaaattacaaagaaagatggaacggtagtagcaggatacgaggagaaaaatattctttctgatgaagaatatctgaaggtagtgaagcactatagtatcgaaaatgattttgacatcgaatcgctgaaagacggggagtatgaggttcactggagattctatgcagacgatgaagattccggttatcgggagcagacagtatccctcaatatggataatcggaaaccggaggccacggtagtgtctccaacagatgacgaagaagtatcaggtatggtccaggttgccttgacgattgctgatcagccggagaatcaaggggacctttccaacttagaagttcgactaattggaaaggacgtggaccgcgttctgtctgaatccaaagagattattaatttcaacagtacggaatatgaagatggagaatatacgattcaggttactgctaccgacaaggcgggaaacaaaagtgagactgcacagcgagtgattcacatttcgaatccggtaaaagcaccgaaaatatcggtggataaagaaatcggaacttctgaaagcaacctaaatctagaatggaattatccatcgggcgatgcaacggttaagaaaatttcagccttacagtatgcccttattagtaagggtgaaaccgtatcagattccgattatgagacatttgcggaagaagaaacagcacagaaagaagggactacttcgattcaaaccacagatctccctgatggagaatatacaatttgtgttagaagtctggatgcaaaaggaaatccgggaaaagaacggaccttgacgtatactatagataatacggatccggaaatcgaacaggtttcgcctacagagaaatctgttgtattcggaatgctgtttgttcgcggtatcataaaagataagaagttgaagaaatatacgctggcagtagcaaacggggaaacgacggacaaagcggcttttcaagttaagaaaacggagacgctgaatgatggtgctacaaatgtaggtccatatcttggaatgctcgatttaagtgacgaaactgcatatccaccgaatcagatgtatacccttcgcattcaaggagaagactgtgccggaaataaagaaacgaggtatataacggtcgaaaagaaggatgcgcaggaagttcctgcggattttgaaattgataaatccggaaagaatgagctgaccatttcagcagaaaaaacgagatttctgttgaaaaaggaaggagaaacctatgtgccggaaaatccaatttggtatgtcgatggaaagcaagtggatggatcaaatggaatcgattgcagcaatccagaaatctatccggaaggatccaagcattcattagtcgtatatgataacaggacagatggtgttctatacggtgtaactaccctaaaatacgaactcctttcctctgcaaagaaagaaattacttcgtcgattacagatacgccggaacttttggcactgagcctggatgtggaaaaagattcggaaaaccattactatttgtcttacaatggagcgaaagaacaggagattataccgggcagagaaattttattggataccctaagaaacagtgagaaggcgaatattggaaaaattgaactgcttgcccgggattctgagggtaaccggaagtcacttgaagagagtggaagctggcagctaattggtagattttctcaaggagacgaatgtatcgtcgacatgatgggagattatacaccgaagaatgttacggcaattccatctcttaattcaaaggtgaaaataacttgggaaacggataaagatgcggagaatgtcagctatgaaattgagagaagtacatcaccggattttgatgagaacgagacagaatgtgttcaaagtcaggtaaaagaacactactggtgtgacaattatgccgtagtagatgcgggaaacaacatgaatgatcacgagggcacccgggcaagaatgcggaaaatccgagatgcagacttatattaccgtgtacgtgcagtgcataatcaagaaaaacatgttcgaaagagcgggtttgatgaagactgggtaaaacttcctgcgatgaacgaatatgcaaaaagactggggaaaaaagattatttgggttactccagtgtagatatcggtatgggagacggatatgttgaacaaagtaccggaaaccttgtgtatcaggagacggatgccaatgtaaaaggcaaagtcctggatttatccatggaaagaacctataacagtatggctaccggaatgacagcattggggtatggttgggattttagtttttcgccgactctgttatcgacttatgaccgatatggagatgaaacgggcatgttattcaaagatggttccgggaccatctatacattccggtccattgaaaatgcgacagattcggagaatggaattacgcattatcaaagcccgattggtgtgtacatccatttgaagaaaatagagaaagatggagaaacaacctacgagatagagactatagaaggggatacgtatgtattcaatggaagcagtcagctgaaagaatttcgggattccaatggaaacaaagtgttctatgagtacgattcggttggaaaattgaagtcggtggagaatccgaacacaggaagcagcgggaaggaaacggaggcaaccggaaaaagccgaattatatttcactataaggatagtcaagcggaattagaaagcgaactgattcagagtgtagaacttccgggcggtcaaacggtgaagtatgagtataacgaagacaaagtcttggtaaatagcatattgtacaagaaagattcgaaagattcagagaaaatagaaacaaagtatcaatatactttcggcgacacactgttaacgggaatccaagatgcaaatggaaacaaatcaagcatagaatacgatatggattcggtaaatccaggccgatgccgaatgataacttatccaaatggagatcgagaaaaatttgcatatatgaaatcagaggaagaaaatgatgtgcttctatacgattctatggaacaaaccagctatcgtgccggtttgcttaacgtgccgaaagaaattggatcttccgaatatcgttttaatgcagatggaaatgttatttggagccgagatattgaaggcggtgaagtagaatccaagtactctttgggtcttgaaattgaaacaactggaacttcttgtacctaccggattgatgaatcgggggttattcaaaacggaactgctgaaaccaccagtgagattcaatatgatcggattccggatggcaataccattgcttctaaagttagctccacaaagggaaacgtaactcaggaaacagatgaagaaggaaacgttacgaaatatgaatacggtgacaagtctgctgcaaatgcagggaatccaacccgaatacagaccattgctaaagatggaacgaatagtgaagaacgctttacgtatgatgacaacggaaacattctgcgagcagaagatgaaaccacaggagaaagcatttcattccaatatgacgcagacggtcaacttcgggaagaacaagagtatttgaaagacggaacaaagggtgagaaaacaacgtatacttatgacgctgtcggtgaagagctccaagaaaaggaaagttcagaaggggatacctcttcttcttatgacacaattaatgatgaatatggaaaggtgcgatttgaaagaaacggagagaattatgtaacggaacatcgttatgacgtgttgaatcgtgaaactatgacattgtattatctcgagaagtgtgatgtggatatttcggaaaaggaatctgcgtctgaacggcttcaggcttttgaaaactggtgcaaagaaaaaagctcagtgtccgaaagtcaggaatacgatgccaatggaaatcttacaaaagagacagatcgagaaggtcgtgtgacgacttatcagtatgactgcatggacagggtgactaaaaaagaagttcgaaaagatacagagcacatgtcttggaagtatgtgtacacggtagaagatatcgaccgctattttgaaagtggaaatgagccaatcaagaacgcacttgtcacaaccgaagtgaatgaagagggcgtagtcacttctatcagctgtcaggataaggcaggaaacattgtaaaaacattcaataagggaattataacatccttccggtataaccgagacggaaatatcacggaggtatattctctggggaaggatgaagaacaaaatgcaggaattggaaccggtattacggtgcttgcgaattacgacaagtacggagaaaatacggcgaatattgtcgcaccaggatatgatgaagagaaaaagttgtattttgttcgagaggatacttcggtattgaaatacgagtatgactcccttggaaatattcgcaaaaagatagatccatcggggcataaaacagagtatcgatatgatgtaaatggaagaacaacaaagacgataaatacctcggatacaacggatgcttcagacatatccattactcgtgcttcatatgatattccgggtgaaaatggaaatacaattacgaagattacgaatgcactgaatcaggtgtccgaggaggagaaggatgcttctggaaataccgttcgcattacagacaaaggaaaaaacactggaaagaaaatagaaatccgatatacttatgatgccaatggaaacatgttaaccgaggagaaagcaaaaggtatcatttcctatgaatatgatagcatgggaaacgtaactcggaagattactcgaaagcaagatgggaaagcacgagattacagtgagtatacttatgattatcttggaatgcagacggagcgaaaggattatacagatggagaacttcagagagtagcccagtatcgatatgacggaatgaagagactagttcaatcctatgaagggaaagaaaaagcgaatgaaacagatgctgcctggattcgttatgactacgatatagaaggaaatctggtgaatattcgatatcctgaaagtaccggaatagaaaacgtagaatacgagtatggagtatatgaaaggcttcttaaagtatcctatactgcggatggtgaaaaacgaaccgcccgtgagtacagttatcgagcggataacagagtgcaatccgtcaaagattacacatcggcaaatcattctgtaatcaaaacttacggttacaatcgccgtggacaatcaacggatattgaaataagggatagcaaaaccggtcttcaagagaagtataattacacctatgatgtgtgtggaaatattacatctgaggaaatcttgaggggaatcgaaaagaaaaccatagcggaagaggatcttacggataagggaagttatcatattctcagaaagtattcctataacgatttggatgaacttcgaaatctgaaggaataccgcattgaaggggaaaattccgatggtatcggaacgttgacccatgaaacatcctatacatatgatgccctggggaaccggaaatcagagaccaaggatggaacaaaatatgtctatgggtacgatgatttgaatgaattgctatgggtagagaaagaaggagaatccgaaaagcagaaaaaatatacgtatgatgaagacggcaatcaagtatctgaaattaatgctgaagccggtacagaaactacttatgcgtatgatttggaaggaaacatgttaaagtccgtttccagggcaagaaaaaatggcgagactgtggaaactgttacagaaaatcaatataatggagatggaacgagagtgaccaggagtgtgaatggcgaaacaacccatttcctctatgccaacggaaatctgattggttcctatacgctggattcgtcgaaccgggagattgtttccaagcataccgtcaatgtttttggcatcaacggtgacattatattgacgatgcggacaggaacgaaatcttatgtctataatgcagatatccgtggaagcatcatgtccattacggatgataatggggatgtagtgcaatcctgttactacagtgtattcggagagccttctgtggagggaacattctataatgaggttctgtatacaggggccgtgtatgattctagcactggaatgtattatctgtccacaaggttctatgattctgaaagtggaaggtttacgagccgggatagtgttcgcggaagtgtggataatccgctaagcctgaatatttatgcatactgtgtcaacaatccattgaaatacaccgatgaggaaggcgaaatgccgaccgtggttgcaggtgcgataatcggtggatcgatgggggcgatttttgaaatagccgatcaatggtatagtaaaggcgcaaagaatattaattggaagtctgttgctgcacgagcagctggtggagctatcactggagcttatgcttcgatttcaggtattggtttgcttaaaccaataggtatggatgcctttgttggaactgtggaaaatatggttgtaaccatgacagaatcaggaaaaatgtcagaccatgatgtggtggaatctgcggaatatgcagtgatagattcagtaggtggtgctactgttatgaaatcggcaggggctgcagtcaagttaacttcgaaaatgacaaaaggaaaatggagcaaactagttggttctaaaagaaagaatcatggaggtgttgttgtaaagaagaagacttctcaaaaacaaattggaaaaagaatcagagcaataaagaaaagtgttaaatctaaggtaaaatctgcgaagaaagctataaaaagactcgcaaaagcaacatttactaaggcaagaaaagcctatcatgcagtgaaacggagagtaaaaagaatggttcgaacctgccgtgttttaaaggcatatgcaagcaaaaaaatatctacaacaattgataggttccatagaaaatatataaagaaacaaaaatctatgcgtgtaaatggatttcgacgcaagttacattggatattttaaatatggagaagaagggagaatactatgatactaaaatgcatttccttaattaatctagtgctgtctataatatgttgcatgaaaggacttcaagcgaaagatatatatgatgcggagcattttgttatacgattaccgaaggcagcatgtttcgcaggggttggatgtgctatagtggctacaatattgccattcttattgaacagtaatcccccaatgaaattttgtattatgttaattctgatgcaggtattggcgatatatatgagcgcgtcgcgaattccggggatggatcagcttgaggtggatgatgatgtgattcgtaagacaaaactctttgttattcaaaaggagtggcgtttccaagatattgatcatttcgagagtatactgacggttgaagacaaagtacccaataaggcaatagctgcatatctcaaagaaggaaatcgaaaagcgtttattgtgtattatggtgtgaaagggtatgatctattttgtcagcgaatatccgaagaaaacatcccaatcctagaacaagaggacgaggatgatagtcctgtttctcggtaacaggaaaagagaagttggataattattttctgagaagcgacatttaaagctaaatcttaaatcataattcataattcaaagaagggaaaaaacattatgaaaaaaggaaatgtactggcggtccttttggcgaccgtaggaatcatgctttttggtactctggcggtatcggcggatgcacacgccggaatccaatccgcatccggaaagagcggtgtgccaaccgcgattgctgagaatgaatccggcgcagtcacctccgcaaaagcaagtgtggggaagtccagaaaggcgaaagcttccgcaaatacagtggcggattccggtctgtaccaggtgaagattgcgtgagatatatgtccaagcgccggaagccgggcaatggatttgattaatcagtaccgtaaagcgaacggaaaaagcagcatcgaacgggacaatactcgtgagcttatggcaattacccgtgcgggagagatttcggtatactacaatgccatgcgtccttccggaacggcaggatcggatcttatcattggattctatgatgaagataaggatgcgaccatcgacacctggttcaacaaattaaatccggatttgaagaaattacttctggacgatcagtggaaatccggatgggttggcgttttccgcaacgaagccggatattgctatgttgccgtggatttctacccgacggcaacgcagggaagcacatactccaaatattcggaaggagagtatacgctggcattcaatatgatggacaagtgcctgaacgtgaagggcctgctctgcgacaagaacgttaacctctacaacaagaacaccttgacgaagggggccacatactattacgtagtgatgaactacaaccaggttgaggatgtgaatctgttccactctcagaccaccaagtcctccaacaccaaggtgatttccgccacccaggatggcatcctgaaggcaaaatatccgggcgtcgcgaaagtaaccgtcaaaccggcggccggttccggactgtccatgtccaaaacgctggtggttctgccgagcaaggtgaccggcgtgaagctgaccgcgaagaaaaaagccatgaaggttgcgtggaagaagacggcgggagcatccggatacaaggtataccgggcaacttccaagaagggaaagtacacatgcgtcaagaccgcatcttccaaaacaacgtccttcaccaacaagaagctgaagaagaacaagaaatactactataaggtatgtgctttcgtaaagtccggcaaaaagacgtacaacggtgcatactccaccgtggttatgaagaaagcaaaatagcatacgtgaatccaccgggagcagccaaaaggctgctcccggatttcatttggcggaggctgctgcatcgagtgtccatccgggaattagagttttgcaattgtcagaaattgaatatgcctagaatttcggagcgacttcacgctaatcttacaatttcggcggattagcgtgaacggatttctgacttagcacgatttcgccattcaatttccggtgagcaaagaagcttcttgaaaaaagttcacgctttttgaaggagaataccctttgcagcgtgaacgcaaggttcggattcttctagaatcctgccaattcggagattttcgttcacgctaaatccttcttttatgccaaaaagcgtgaactgccctcgaaaatctaggcatatgggaataaatcaaaacgatgcagataatacaattagagcaaagcgatttttagctcagatgtttaatgaggaagatgaaaggaaacattttttctttacaatgggccgaaataatgggaaaatagtcagcggatggtattctttgttgaaactataccgaaaggagaaaaaatgaataacaagatgtccaaaagtgaaaaggagaaacagatccgtcgggaagcgaaagcaactattatcctctttctgatctgttttgtgtggaatgtgggctgcgcctacggcctgtccggctgcagcgtccgggtactggggctccccctgtggtgggtgctcagcactccgggggtgttcgtaattgccgttgtgggagtaatcttcttggtgcgcaaagtcttcgtggactttgacctggatgaagaatcggagggaggtgcccatcatgcagagtaagcatttaatcgtgctggcaattctgagtgcctaccttttgattaatctgggaatcggaatttatatcaaccgaaagacggcgggggaggaaaatttcctcagctcttatttcgtgggatctcgaggcatgggcggactggtcctggccatgactttagtggctacctataccagtgccagctctttcctgggaggaccggggttggcttccaccttcggcctttcccagtcctggattgccggggtgcagattggcgccacgttcctgacgctgggcgtgctgggaaagaaatttgcgctgatttccaggcggattcagggggtaaccatttccgattacctgagggcccggtatcaatccggggcggtggtggtcctttgcggcctggcgttggtggtgttcttcatcacccagatgattgggcaatttatcggcggagccaccttgattcagacggtgacgggcgttccctattgggccggactccttctgttcggcgcggtggtggttttatatactgcttttgggggattccgggcggtggtgctgacggatactctgcagggaatcgtgatgacatgcggaacgtttttgatgctgttctttatcattcgccaatgcggcggcatggaggacatcgtgaatcagctgaacgtgtccaatccgggctgggacctgatggggaagggtgcctacgggaaggacattgcggtccttcagccggggtatatggtttcctactgggtgctggtgggcattgcggtgctggggcttccgcagacggcggtgcgctgcatggggttcaaggatacccgttctatgcaccgggcgatgatctacggaacggtggtgattggcatcctgatgattggcatgcatttggcgggaactctggcgtatcccctggtggagaacgcgaatctggccagcacggatcaggtgattccgtacgtggtgatgaaatacatgccgggatgggccgcgggatttttcctggcggcacccttggcggcggtgatgtccacggtggactccctgctgattctttcttcggccacgattctgaaggatctgtatttgaattacatcgtgaagcggaaggtgtgcccggaggaagaggatgttcgggacgtttcctcagagctgatgaaaacgcatccggcagcggcggccaacgtgccgaaaatcagcttcggcattacggcggtgattggaattcttacctgcttgattgcgctgaacccgccggacgtaatcgcttggatcaacctcttcgcattcggcggcctggaggccacgttcttctggccgattatcggcggtctgtattggcggaagggaaacagcaaagcttgcctggcatccactaccgtggggctgattacgtttgtctttttcaaccgggtaaaaatactgccgctgggtattcacgaaatcgtggcggctctggtgctgggcggaatcgtgtatttcgcggtgggcagtgcgactgcgcaggaagtgccggacgaggacatgctggaaaagtgtttttaataattagaataggattataacgatgaatttaacactgtttattccatccaaagaatatacggcggcgggagagcgctgggccgaaatgctgcggctcccggtggttacggatgccgaagcattgtctccggaccggctccacctgcaggcggatgaagggggcctttccctggttcagggaaagctgtcggtgcgaggagatttcacccacatgattccgcggcttcgtccctccaatctgaaccgggagtttctggtaaaagcaggccgaatgaagggtatagagcgtccggtggccatcgacgccaccgccgggttgggggaggattccctgctcctggcggcggccggatttcgagtacacctctttgagtataacccggtcatcgctgctttactgctggatgccatggagcgggcccgggaggtgccggagcttcgggagccggtttcccgcatggagcttcacgtaggggacagcatcgaggcaatgaatcggccggaggattccatcgggagtattccggacctggtgctgctggatcccatgttcccggaacggcagaagagcgccctggtgaagaagaaattccagctgattcaccggctggagtccccttgcatggaggaggagaccttgctgaacgccgcaattgcggccggcccgcggaaaatcctcatcaagcggccgctgaagggaccgtggctggcggggcgcaaaccggggtactccatctccggaaaagccgtgcggtacgactgcattcttttacctcgagattagtccgaatcggaaaatcaataattgttatttggaaaattatagtaatcgacttgtttatttgtataaaaaatgtataatattgttgatgatttattccaaacggaacaaggaggattatggtaatgagtgatgtaagtatgctggagccaaaaagtgtattccagtactttgatgagattagcgcggttccgcgtgcatccaagttcaacgcaaagattagcgaatatctggtgaattttgcgaagaaaaacaatctggaatactaccaggatgagctgggcaacgtgattatttataaaggcgcgactccgggatatgagaccgctgaaccggtgatgctgcagggccacatggatatggttgccgctgttgcagaaggttacgaacacgatttcgaaacccagccgctggaaatctacgtagacggagattatgtaaccgcagcaggaacgaccctgggtgcggataacggtatcgcaatcgcaatggcactggctgtactgacttcggatcaggtgagccacccggcattggaagtattgattaccgtggatgaagaaatcggtatgctgggcgcagaaggcctggatccttctaagatttccgctcgcagaattatcaacatcgattccgagtccgaaggtgttatcaccgtaggctgtgccggtgcggtagattgtattacaacatttgagactccgagagtaacgaagtccggcgtttgctacaagtacgcattggacggactgcagggcggtcactccggaatggatatcgataaagagagaggcaatgccatcgacctgaccggccgtgtattcctggattgcctgaaagaagcaagaatgaatatcgttagcctcaccggcggtgccgttaccaacgcaatctgcaataaggtatccggtgaagttctggtacatccggatgactgcatcgcattcgagaaggcaatgcgcgaagttgcggcagagctgaaggcagagtacgaaattgccgatccgggcctgaaaatcaccatggagagagtcggcgagatggaaaccgaggttgtggaagacgagtgccagatgaatctgatgaagtatctcttcgtgattccgaccggcgttcaccacatgagcgtagcgcttccgggcatcgtagagacatccatgtccatcggatttatccgtctggaaggcgacaccatgcagaccggtgcgatgatccgttcttccgtagacagccgcaagaagaacctgtgccagcgcgtagagatggtttccgaagcatacggcggcaagtgcgagttctccggcgattacggcgcatgggagttcaacaaccactccacactgctggacatctgcgtggacaccttcaacctgcacttcggcagaaagccggaagtaggtgcggttcatgccggactggaatgcggaaagtgggcggagaagtggggtgccatcgacgcggtatccatcggaccgcagatgatggaagttcactccccgaacgagaagctgtccatcccatccaccgcaagaacatgggaatacctgaaggcaatcctggctgcctgcaaataggatttcgacaatacgaatcggataaaataatcgagagtgcatcttcgcgatgcactctcttttcatgtgtctagaagtgggtgtggcgcacgatggtgtccatgaagacctgcatggcctgggtgaggtaccggcccttcttccaatagaagtacagatttcgggtgatgttctcacccgccagcttgtaatacaccaggttgggatccggggtggctctgccgatcaggagttctccggtgaaggcaattcccaggccggagccggccacgttgtaggcggtgagctgctgatccagttccagtgcaacgcgaggcttaaatccgtactcctggcagaggagccgggcgcggtttccggtatcgttgaaggaatggagtaggatgaaaggctccttttggaacagagcgagatccacggccggatattgttcttgccggaaggatccgtcctgaatggccttctggggaatttgatagtctcgcagtcccatgttgacggcgaaatttttgggcaccaccaggaccagatcttcccggcccacctggtgccggtcaaagatcttcaagtccagttccttgttgtccagaataaagtcaatctgagagtcctgaagcagcttcaccagttctcgagatttcgcttccaccagggagatttccaggtccggatacttggcggagaatcgggcgagcaggggtgggagcacccaagaggagaagaagttgctcccgccgaagtgcagggagccggtgcgaagttctccaaagtcattgatgaaggtttcgaattccgtggtggcggtcataatctgatgcaccgcgtggatatactgcttgccgcattcggtgagttccaagggcttggtgctgcggtcgaaaaggggatagcccaccttcttctcaatccgcttcacattggcgctcagcgacggctgagagatgtacagcttggccgctgccttggaaaaactcttctgtttataaacttcatatacgtattccattccctgaaacatgacttctccttatataacttcaaaactatagtttatataaaaatataagtatttgattataatacaatatttacatatactttacaagtgagccggcacagcgaattcttcgcattgtcggaaatggttggaagatataaggttttttttataggagaagagagttatggaaatgtacggaatcgatcagctgggtattcaggcaagtcaggtgcaccacaatttgtgcgcggcaagactggtgaagaaatccctggagcggggggaagcgaccctgtcctcgacgggcgccctttcggtggaaacgggaaagtataccggccgatctccttacgataaatacattgtagacagcccggcggtgcacgatcggattcattggggaagcgttaatcgcccgattgaccgaagagtttttaaccggattaagggggatatgatcgagtatctgaacgggaaagaagtgttcgttttcgatggttttgccggtgcagacaccaagtacacccggaaaattcgggttatcaacgagaaagcgtggcagaacctgttcattcacaacctgctgattcgtccgacggaggaacagctggaggaatacggcgaggcggatttcaccatcctggcggtgccggggttcaagtgcgatgcgaagaagtacggcattcattcggaagcggcgattatcatcgattacgaggcgcactttgtcatcattgccggaaccagctatgcgggagagattaagaaatccgtattttctatcatgaattacgtgctgccggtggaagacaacgtgctgccgatgcactgctcgtccaatatggatccggagaccggggagacggcggtgttcttcggattgtccggaaccggaaagacgaccctgtcggccgacccggcgcggaagctgatcggggatgatgagcacggctggtccgacgacggtgtgttcaatattgaggggggatgctacgcgaagtgcatcgacctggaagaagaagagcagccggaaatctatcatgcgattcgattcggttcggtggtggagaacgtgattctggatcacgagacccgggaagcggatttttccgaccgggagctgacgccgaatacccgtgtgggatatccgattgattttatcgataatgcggagattccgggaaagggcggaatcccgaaggtggtaatcttccttacggcggattcctttggcgtactgccgccgatttccagactgtccaagaatgcggccatgtaccagttcgtcaccggttttaccgcaaaggtggccggcacggagcggggcatcaaggaaccgcagccgacattctccacgctgttcggggaaccgttcatgccgctgagagcggaatgctatgcggagatgctgggcgagcgtctggagaaatacggcacaaaagtatatctggtgaataccggctggaccggtggtgcgtacggtaccggttccagaatgaagctgaagtacacccgggcaatgattcatgcggctctggaaggaaagctggacgatgtggagtacgttcacgacgccctctttaatctggacattccacagagctgcccggatgtaccggcagaaatcatgaatccgagagatacctggaaggacaaggaggcgtacgatcttcaggccagagagttggcgaaaatgttccaggacaactttgaaagaaagtatccggacatgaagaaagaaatcgccgctgccggaccgcatgtggacaacattgaggatgaagcggccgcaatgtaacgaaaaaacaaatggtggataaggaaaggggaatccggtgcaaatcggattcctttttctgttggagaattactcttcgtcgattgggtagttttcctatgaagagttggtgaagtcgtggaattacggcaatcgatgtgttattatcagtctcatacgtagagtgctaattcacacagaaaatgaggtagattatgaacgaggtaaaaacaccgaagaaaccggtgattaatttctggattagtgcattgatggtacttctgtgcatcaatatttttctgaaaccgtatattcagaagatgcagattcaagatgtgaagtacagcacctttatctcccagaccgaaaagaagcaggtgaaagaggtggaggtgcaggaaaataaaatcgtgttcactttgaaggacgacgacaagatctacgaaaccgcaaagatgaacgatccggagctgatcgaccggctgtcggaatccggcgccaagttctccggagagattaacgaaaccatgtctccgctggcaagcttcctgttgacgtggattttaccaatcttgttcttcatgtggctgggcaagcggatgcagaagagcctgatggataagtccggcggcggtgccggttccatgatgttcggaatgggtaagtccaatgcgaagatatacgtgcagtccaccaacggcattaagttctccgatgtagccggggaagatgaggccaaagagaatctgcaggaaatcgtggattatctccacgacccgaataaatacaagaccatcggtgcctctatgccgaagggcgtgcttctggtgggccctccgggaaccggtaagaccatgttggcaaaagccgtagcgggggaatccaatgtgcccttcttctccatttccggatcggaattcgtggagatgttcgtgggcatgggtgcctcaaaggttcgggatctgttcaagcaggcgaaggagaaggctccgtgcattgtttttatcgacgagatcgataccatcggtaaaaagagagacggccaggttggcggaaacgatgagcgggagcagaccctgaatcagctgctgacggagatggacggattcgaaggaaacaacggcgtcattattctggcggcgaccaaccgtccggattccctggatccggcactgacgagaccgggacggtttgaccggagagtgcctgtggaacttccggatctgaagggacgagaagcaattctgagggttcacgccaagaagattaaagtggagccgaatgtggattatgagaaaatcgctcggatggcctccggtgcttccggtgcggagctggccaatatcgtaaacgaagcggcgcttcgggcggttcgggacaagcgtcactttgccacggaagcggatctggaggaaagcattgaagtggttatcgccggatatcagaagaagaatgccattctgacggatcgggagaagtggaccgtctcctaccatgaaatcggtcatgctttggtggccgcaaagcagagccactctgcaccggttcagaagattaccatcattccgagaacttccggtgcgctgggatacaccatgcaggtagaggaaggaaatcactacctgatgaccaagaaggagatggagaaccgaattgccacctttaccggcggcagggcggcagaggaaatcgtcttcggggatgtgaccaccggcgcctccaacgatatcgagcaggccaccaagatggcccgtgccatgattacccgatacggaatgagttcggacttcgatatggtggcgttggagacggtgtccaaccaatacctgggcggagatgcctccctggcatgctcggcggagacccagaagaagatcgacgaaaaggtggtagcgctggtgcgtcagcagcatgaaaaggcggccggtattctgctggaaaatcgagagaaattagatgagttggcacggtacctgtatcagaaggagaccattaccggcgaggaatttatgaagattctaaatgaagatggggctcctgcagccgaaatttagaaacgctttcaaatcgaaaatgggcggattgtttcaaaatcgaaacaatccgccctctttttgaaaagaacaaaatgacggaggtaaaggattccaaatctgtggaaaacttttcttgacaaaagaaaaaaagacgctcaaaggcgaatatcaaaggatatccgaggttttagttatcaacaatcagttgttcacgagattgtatacaatttttcgaattcttgtggaaaattcccaatccgttgaaaaaactgactttgcggaatgttaataaattgtaaagaacaggtaagagcaaaaaagaacagccggggtttttgacccggctgtgaaaaaaacaatggaaaacaatttccgttgaaaagcatttttttgtaaataatttctagtcgttcggagaggcattttcggcggcggagccctctcggaaccccatcaccagttctaggtatgttagaggctcgatgaccggacggatgaatgacagctcagaaagaaattcccggaggagattttctgtggcagattttgattccgtttccggaagaacaacctcgagttcaatgtaatttcccagtccgtccagttcgtccagacagacggtaaggtcctctttcttgtattctttccggcgcttcttcacctccgcagcggagcgaaaacctagcgccagcagaatctgtcgcattttgtgttcgtcttccacccgggtttccagctctcggcggctctgaccgatgagggaatcattggcacctttgtaggtgatgcagcaatgggaggttccatcgttacgctgttcccggcgaattcgcaaggcttcatccgtcttctgaaaatcccgttccggatggttgaagtattcgtcttgctgagtgaaggagcggacttcttggaagccttgctccttcagatattgttccagctccaatcgtttcaagctgtcgtattgtgctttcagttcgatttctttcattaaatgcagatgatcctttcttgaattgcggagaatgcggcttcccgcaaacccatcaacatatataggataaacggaaaacccggcggattcaatctttcttttatgggaaatgggtgaaattacggtagaaattgtatactgctcatacaatttttaaatttcttgtgtagaattatagacaaacaaaaaaaattcatgtaaaatggacatgtcgttttttacaatttatttcgaaattatatgtgaaggagaatgattttatggaagcaattaataacgtggttttggcggtcagcaattttctgtaccagccattcattcttccggtgatcctgttggtgggcggactgtatttcacgattcgtaccggcggtgttcagattcggatgttcaaggagtgtcttcgggtggttacggaaaagccgaagacggagaacggcatttcatccttcggggcgctgatggtatccaccgcatctcgagttggtaccggtaatattatcggtgtggcaacggcggttatctgcggcggatccggtgcgattttctggatgtggctcagtgccttcttgggcggagcgtctgctttcatcgagtccacgctggcgcagatttacaaaaagaagaatgcggacggctccagctatggcggaccggcgttctacatgagagatgcgctgaacgcgagatggctgggcgtgattttctccgtactgattatcttcacctatgcgattggatataacatgctggcggcgttcaacctgcagtccaccttccaggtgttcagcttctacggggaccgcacaccggcaatcatcggtgtcatcctggccgcactgttcggtgccgttgtcatcggcggtgcacaccgtctggtaaaggtaaccggcgttctggttccggtgatgggcattatatatgtggcaatttctctgattgtgctggtactgaatatcggaaacgttccggcaatgttcgccggcatcttcaagaatgcctttgatttccaggcaattttcggcggctttgcgggatcctgcattatgttcggaatcaagagaggtctttactccaatgaggccggtatgggttccgcaccgaatgcggcggcaacggcggacgtttcccacccggtaaagcagggcctggttcagatgctgtccgtattcatcgataccatgctgatctgcaccgctaccgcattcatgtgcctcagcaccaacatcattccgcagaattatctgggtgcggatggaagtgcggatgcagcgggatacgttcaggcggctaccgcatccacacttggaaaattcggcccgattttcatcgcatttgcaatgtgcctgttcgcattcaccacattgatcggaaactattcctactgtgaaggatgcatccggttcatcattcagagagacatcaagccgggcgagctgctggcattccgtctcttcgctaccgcactggtattcgtgggttccatcgcttcggcgggactggtatggaacaccgcagatatgatgcagggcctgatggttatcacgaatatgccgaccatcctgctgctgggcggaaccgcggtaaaatgcctgcgggattaccagaagcagaaggcggaaggaaaggatccgcatttcgtggctgcagatatcgagctgaagcaggatacggatttctggaaataggaattccgggataataaaagaaataaaaaataaaagaagacggttgcccgagggtgaccgtctttttgcatatatagttagaattgacgacgaaagggagaagaaggagagttcgtcgtcaattctttctttccatcgtcgcggggcaccacgtcctcggccccggataggacttcgaccggtggggcgtggtgcttcacagcctgcaaacccttattctttcgttgctgggcaccacgtcctcggggccggagaggacttcgaccggtgggacgtggtgcttcaccacccgcaaacccttattccatcgtcacggggcaccacgtcctcggccccggataggacctcgaccggtgggacgtggtgcttcaccgcccgcaaacccttattccatcgtcgcggggcaccacgtccgtggccccgaacgggacttcgagcggcacgacgtggtgcttcaccgcccgcaaacccttattccatcgtcgcggggcaccgcgtcctcggggccggataggacttcgaccggtgggacgtggtgcttcactgtccgcaaacccttattccatcgtcgcggggcaccacgtcctcggccccggataggacctcgaccgatgggacgtggtgcttcaccgcccgcaaacccttattccatcgtcgcagggcaccacgtcctcagccccgaacgggaattccgacaacacgccggcaatgaagaaccaaaattaacagcgggacccttcgaaaaggatcccgctgttttgaatggagtgtaaatatatcgatgacttagttgttgatcagcttctcatcatccttgttccagctgtacagcttccggatatcttcacccaccgattcgcaaggatgctccgatgctctctgacgcatcatcttgaagtgaacctgaccgccggccatgtcgtccaggaagcctcttgcgaaggaaccgtcctgaatgtcgtggagaatatccttcatcgccttcttggtgtcttcggtgacgatcttcggaccggttacatagtcaccgaattcagcggtattggaaatggaataacgcattccggcaaaaccgctttcgtagatcaggtctacaatcagtttcatttcgtggatgcattcgaagtatgcattccgagggtcgtaaccggcttcggtcagtgtctcgtatccggcctgcatcagtgcacatacgccgccgcagagaactgcctgttcgccgaagaggtcggtttcggtttctgttctaaatgtggtctccagtacgccggctcttgcaacgcccagacctgccgcatatgccagcgctctgtccagtgcctttccggtggcatcctgctgaacggcaaccagtgccggtgtgcctctgcctgcctggaactcggaacgaacagtatgtcccggagcctttggcgcaatcatggtcacatccacgtcagccggtggattgatcagaccgtagtgaatattaaatccgtgagcaaacatcagcatattgccggcttccagattcggtgcgatgtcctttgcatacattgcagcctgtgtctcatcgtgggtaagaatcataacgatatctgcccatttagcggcttctgcggtggtgagaaccttcagaccctgagcctctgcctttgctttggacttggaaccttcatacagaccgacaacaacgtcgcatccggattccttcaggttcagtgcatgggcatggccctgacttccgtaaccgataacggcgatcttctgtccgtccaatacgctcagatcacaatcagcttcataataaatcttgtggttttcgtaactgctcatctctaattttcctcctaatatattatcccaataattaatctgcgaaccatactcagttgtatgttgtatgacaacataataaacttgtctgaccacaatgtcaatagttttttgttgcttttcacataaaaacaatatttttttagattaactgttccgtccaaagcgcacggtgcaggtgaatcgtcatgacgctgcgcatggcttccgcatctctttttcgcagaaagtcgataatcatgaagttgtcgttgtaggccccttccgctaccgcatcccatttgtactccagctcaaaggttttctgaatggtctgattcaccaccggcagaaaatgatcgaagaaccggttgtgggatgcccgaatcagggcatcgtgaaaagcgatttcccgctggatgatttcttcattgttgaagtcatgggtgaactgttcttgggtggctttcaccaggcggacaatctcttcaatctcttcatccgtcgcccgttggcaggccagagcggccgcggcgggctcaataatcagccgtgcttcgtagaggtctttcagggtgacctttttttcatcgaaggagggaatggtatcggccaattggtcttttcgttccgtgacgaaggttccttttccgcgctgaacctgaagcagtccttctgcgaccaggattcggatggcttcccgcaaagtggttcggctgactcccagctccagtgagagatggttttcgttgggcagcttactgcccggtgcgtaatcctctccgcttcgaatccgggctcgaagggtatccgccgttcgctgtgctaagttggttttattctgagacatggtattctcctaactctgttccgtaaaaatatattgcgatgtatgatgttatacaaatatgacgagttgtcatacaataatttatcaccgagaaaacggattgtaaataggaaatccggaaaaagtctctaattccgaaatcggcatccatcgaaaaacagtagaaataaccggctataggaagaacctgattgaacccctcttcggaattatttatactaaaatgaatagtgttataggattcaagaggtgaggttgaaatcatgaaggaacaattgattattctggacggcggcatgggaaccgatctgcagcattccgggctgaaggcgggagaaaatccggcggtgtacggcatgacccatgcggcagaaattcgagacatccacatgaaatatatcaagaaaggcacaaactgtatctacaccaataccttcggtgccagtggcaacaagctgaagggcagcgggtattccgtggatgaggtggtgcagcgaaacgtggaaacagccgtggaagcggtacgtttgatgagggaacagggccgggagtgcatggtggcgctggacgtaggtcctctgggtgagctgctggaaccgctggggacacttccctttgaagaggcctaccgggcctatgcggaaatcgtggaggccggtgagaaagccggcgcggacctggtggtatttgaaacctttacggatctgtatgaaatgaaagcagcggtgctggcggcgaaagagcattccaatctgccgatttggtccaccatgtccttcgaggctaacggccgtaccttcctgggaacttcggcagccgccatggcgctgaccttggaaggactgggcgttgcggcgctgggcatcaactgttctctgggaccgaaggaaatccttcccattgcggagtccatgatggagtggacaaacctgccgatgattatcaagcccaacgcgggtctgccggatccgcgaaccggggaatacgacatcaccgcggaggaatttgcggaagaaatggtgccgtttctagagaagggcgtaggcatcgtcggaggatgctgcggaaccaatacggattttatccgtgccctatcccataaaagcagccattacaatccggcaggacggattccgaaatcccggaatggcgtatgctccgccggttcggtggcggaatacggaaagctgaacatcatcggggagcgaatcaatccgacgggcaaaaagaaattgcagcaggcgctccgggatggcgacatggactacatcaagaagctggcggtggaacagtacgaatccggtgcgcagattctggacgttaatgtaggcgctccgggcgtggacgaagtggcgctgatgccaaaggtgattcaggcggtgcagagcgtgacggacattccgctgcagctggattccgtggatccggaagtgctgcgggccggccttcgggtggtgaacggacggccgattgtgaattccgtgaacggagaacgggagcggctggattccgtgcttccgctggtggcgggctacggcacggcggtgttgggcctggccatggatgaggacggcattccggaagatgcggagggtcgaattcaggtggcggagcggattctccgggaagcagatcgatatgggattccgcgggaagacgtgattgtggattgtctgaccctgacggtatcggcccagcaggagcaggcgctggagacgctgcgggcagtccgtcggattcacgatgagttcggcctgcactgtgctttgggcgtcagcaacatctccttcggcctcccgatgcggcggtacatcaccaccagtttcctcacccaggcgatgggggcgggactggatttcccgattgtcaatattaacgagaaggcgattcgggatgccgtagcggcgttccgggtgctgagcggggaggatgcggacagcggaaattacattcgggattacgcggcggaagaggcggaacggaaagcgaagctgaaggcggcaaaagaaaataagagcgatgccggagggactggcaagagagaaacggaatccggcgtgtccggcgccaaaagcgattcgaaggaagatccgctgcaggcggcggtcatcaaggggttggaacaggagacccgggagattacaaagaagcttctccttcaggaagaggcaatgagtattatcagcggacgaatcattccggcactggataaggtgggagcgctgtacgaaagcggagaattcttcctgcctcagctcctcaatgcggcgacggcggcatgcgccggactggacctgattaaagaggaaatcgccgcctccggcacccagcaggtatccaaaggacggattattctggccacggtagaaggggatattcacgatatcggaaagaacatcgtgaaggtggtgctggaaaactacggctacgacgtactggacctgggacgtgacgtgccggtgcagacggtggtggatgccgcggtggaaaatgacgtgtacctgatcggattgtcggcgttgatgaccaccacggtaccggctatgaaggccaccatcgaggcccttcgagaagccggtcacccatgtaaaatcatggtgggcggtgcggtgatgacgccggaatatgcggaggaaatcggcgcggattactattccaaggatgcccagggtgccgtggcaattgcgaaggaagtactgggctagagaaggatgggatgagagaagatatggaacaattgacttttagagaggaactgtcccgggggacgatggtattcgacggaggaatgggcacctatttctccgcatcggagaagctgccgggatttcggctggccgtccggacggcagaagcctatggcgcacatgtttttgcggatatcggtccggtaaccggtctggatgaggtgcgcacgaaggaagaatatcggtatatcatcgatgcgttcctggaacagggagcgaaaaactttctgttcgagaccaattccaataccatcggactcctggagagtgcccgatacattcgaagtcgggtgccggatgcatatgtgattatctcctatgcggtgctgcccggcggatatacccgtgacggactctttggggaggatttgctgcaggaaacaggtgcatcgcccttcgtggatgcggtgggtctgaaccacgccgaagcacattgcagcgctgacggaagagttgaagagcgtttcagccgacggaacgctgcgttcggttccgagagcggcggcaccggaaatgaaggagagcgcgttctttcgaaagctgcgtcagggggagaagcccattgccgtggaattcgacccatcgggatatgcggccataggaaaatacatagaaaatgccaaggggctctgtgatgtgggtgccgatgtgattaccattgcggactgcccgacggcaaaggcacggatggattccagcctggtggcctgcatgctccggcgtgagggtatcgagccccttccgcatatgacctgccgagaccgaaatctgaacgcctctcaggcactcctcatggggctcagcgccgcagaggtgcagaacctcctgattgttaccggagatccgattccaaccgcggagcgagacgaggtgaaaagcgtctaccaattcaattcccgaaagatggcccattttattcgcggtctggaaaagaaaggggaaattcatcccttccacgtgttcggcgcactgaatatcaacgcgattaatttcgacgcggagttgggccgagcggaaaagaaaagcgaaaagggcatgcagggcctgttgacgcagccggtgctgagccgccggggattggagaatctgagacgggcaaaaacatctttgaactgctatattctgggcggaattatgccggtcatcagcgaacgaaatgctcgttttatgaacagcgaggtgaacggcatcgatgtggaagaggcgctgattcagcgatatgtgggtttgaaccgggaagaggcggaaaatctggccctggaggtatccgtggaaatcgggaaagcgatagcgagttcggcagacggattctacgtgatcactccttttaaccgggtcagcctggtcagccgaatcgtggaagcgattcgggacggacatgtcatttcctagacaattatagagttttcccatagaccgtgttataatacaaatactcaatttgtacgttatgattatgttaggagatatttgtatgaaaaagattggtgtactgggtgccggaacgattggcatgtctctggcgcggatgctgtataacagcggtcacgatgttttggtatggtctgccgtggaggcggagctggtggcttgtgagacgacccggaagcataagaatctgccgggaatggtaattccggacggtgttcgttttaccagaagcttggaggaagtgtgcacggataaggacgtgctgatgttcgccatcccgtccgtattcatccgttccaccgcagcgaaggcaagggattacatcgtggacggacagatcatcgccgatgtgggcaaaggcgtggaggagagcacgttcatgaccatgtcccagattctggaggatgagctgaacaaggacggaaagcacggaaacgtgaaggtggtggctttgtccggaccgacacacgcagaggaaattgcgctggatatgccgaccacaatcgttgcagccagtgaggatatggatgcggcgaaatacgtacaggacgtcttcaccaatacctgcatgagagtatataccaatgcggacgtaattggcgtagagctgtgcggagccatgaagaacgtcatcgccctggcttgcggaattgccaacggcatcggctgcggcgacaatgccaaggcggcgctgattacccgcggtatggcggagatttccagattgggtatgaagatgggctgcatggagcagacgtttaccggactggcaggaatcggtgatttgatcgtcaccgctaccagcatgcacagccggaacaaccgttgcggcaatctgatcggacagggcaagtccgtagaagaagcggtaaaagaagtcggtcaggtcgtggaaggactgaatgcgcttccggcagcaatggctttgtcgaagaagtatgatgtagagatgccgattaccatggcactggacagcatcgtgaaccacggtgcaaacccgattgatgtggtagaaaagctgatgagccgggcgaagaaatcggaagtatccgaggatgttctgattcagttcttcgaaaagaagaaggcggaacggaaatagaatcaggggaaaatcggatttgatcataactcgatagcaaagaaacaggactgtcgctgggcagtcctgttttcttatgccttttttattggccgtcgttggcggcatcgccgccaccgccgccaccggtgttgtcaccgccgccggtattaccgccgccgccggtgttgtcaccgccgccggtgttaccgccgccgccggtattgccaccgccgccggtattgccgccgccaccggtgcttccgccgttgtggtttccgccgttgtggtttccgccggagctgctgccgccggaaccgctgccaccgccgcttccggaaccgccggtggacggtttgttcgcggaggaaccggaatccggtttcttagaagcggtgttcttcctgccggaacttgttccggaagaattgttgtaggaggagccggagttggtttccgttcctttgatgtagtattcgctgcctttctgaaccacatcggccggcttgctcggataggagccttcttttgccgctgcgatgttgttcataatccgtccccacagtgccgctgcgccggaggaatcggaggacagttggatgttgtagtccgtaccgatccaaagggctgccgcgtagtgcggtgtgaaaccgttgaaccagatatcgtagttgttcgatgtggttccggtcttaccgccggcctgaacgccggacagcgccgcaccggtaccggtaccctgagaaacaacggatttcatcatatccgtcaggatgtaggcaacgccttcatccaatacctttgtctccttggattccgaagtcagaaggagatttccgttccgatccagaaccttccggtatgcgatggaggactggcgggttccgccgttgggaatggcggcataagcctgtgccatttcaatcggctttacaccgctggagaggccgcccagcgccaaagccgctgcgttctcatcgttgttgtcgccctctcggttcaaggtggtgatgccgaattt

SEQ ID NO: 1136 - DNA, 32759 bp, Unknown
  16S sequences of unknown bacteria
agctaatcagacgcgagcccatctctcaccggattgctcctttgacccctctctcatgtcgggagcgtggtctcatgcggtattagtgcacctttcgatgcgttatccccctgtgaaaggcaggttgctcacgcgttactcacccgtccgccgctagaattaccaaaatccatccgaaaacttcattcgataatccccgctcgacttgcatgtgttaggcacgccgccagcgttcgtcctgagccaggatcaaactcttatgtttaattcctgttacgctccagattttctctggctcgcattttcactcaattcattgactgcttgcgttcttgctttccttgctctgtatcgttttcaaggttcgttgctctcaagcgagcttgtacataatagcacggttccccttccctgtcaacaccttttttcgaattttttgacttcttttttagaatcttgtatttcccgaaccttttgatttataagcatttccacgtccaggtattaccccggatgttctcccctccgaaaatgccgaacgttcgtggtcgtctattgccgaagcgttttgcatcaaaaccaaattgcatttttgcccaaatcaggctatactacctgttgaaaaacgcatatactgaggaagtggacgagatgaagctgggcattgtgggactcccaaacgtaggcaagagcacgctgttcaacgccattacacgcgcgggtgcgcaggcggccaactatcctttctgcaccatcgagcccaacaccggcgtggtacccgtgccggacaagcggcttgacgaactggcgaggatgtatcagcccaagaaggtcacgccggcgacggtggaatttgtggacattgcaggcctggtgaagggtgccagccgcggcgaggggctgggcaacaaattcctttctcatattcgcgaagtggatgccatcgttcacgtggtgcgctgctttgaggacgaaaacatcatccacgtcgatggcagcattgatcccaggcgcgatattgaggtcatcgatctggagctgattctggcggacctggagaccgtggaacggcgcacggagaaggcgcgccatctgctgaagaacggggacaagctgagggcattggaagcagatgtaggcgagcggctgaaggctcatctggaagccggcaagcccgcgcgcacctttgccatgaccgatgaggagcgcgagatcgtatccggctggttcctgctcaccgacaaaccggtcatctacgccgccaacatcgcggacagcgaaatcggtcagccagattcggcccacgtcaaggctgttcgggagattgcacaggctgagggatcgcaggtctttaccatcagcgcgcaaatagaggaagaaatcgctcagatggagccggaggaaaaagacgccttcctgaccgagctgggcctgggacagagcggtttggaccggctcattgccgcgtgctacacgcttttgggcctgatctccttcctcacggccggtgcggacgagtgccgggcatggaccatcaagcggggtaccaaggcgccacaggctgcgggcaagattcacacggactttgaacgcggcttcatccgggccgaggtggtggccttcgatgatctgaaggcccagggcggcatggccgcctgccgtgagaagggtctggtgcgcagcgaaggcaaggactacgtcatgcgcgacggcgacgtggtgctgttccgcttcaacgtataaggcagggaggccgggggtatgtcgaagttttccttctttctgaaacgcctggtgcgcatggactggaaggccatgtggaagacggcgggcatgctgcgcaagcccagcggcaaaagccgtctatggctcttggccgacatgctgcgctgcgccctgaagtacaacgccggatatgtggactataaaatcgcccagatgtaccgtcttaacgacgcgcagcgcaaaacccagatcacgcgcggcctgagcaaccagatcgtgaggcggatgaacgacaaggcgtattggtacctgtttgatgacaaggccaccttcaatgagctgtttaaggaagaagtggggcgcggctggatgaagctgagtccggacacggacccggaggccttcaaggcgtttctggccgctcaccccgacatcatcgccaagccactggaagggagcagcggggtgggcattgcccgctatacgcaggatgactggcagggccgggaggacgattttctcaaggagctgctcgatggccaaattggcatcatcgaggagcgggtcatccagcatcccaggctgatggccctgtgccccacgtcggtcaacaccatccgcatcgccacgctcctgggcgataaaaagcaggggatcgtatatgcctttctgcgcatcggcaacggcaaggtgatggacaacgtcgatcagggcggcatggccgcgcgcgtggacttggaaagcggcaagctgctcaccgtaggcgcggacaagcagggcaacacctataccgagcaccccatgacgcatacgcccatcgtgggctttgaggtgcctttttttgaggaagccaaggccatgtgcctcaaagccgcacagaaggtgccgcagatgcgctttgtggcttgggatgtggccgtcaccgagaagggccccgtgtttatcgagggcaacagctttcccagccacgccgtgccccagtttgcggcgcactacccggatggcatcggcatcatgcgggagtttcgggagtttatcgacatctgaaccaccggagatgcgaaaccgcggcaggacgaagatccgccgcggttttctctttcactttgcaagggacttctcttccttcttgctttgtggccagcagctgtcctggactgtaaaatctttgacgaaacgcagccacaggcaggaaaaggcggctcgcagagggaatgaatgtcatagcgcagctttgcgcttcggccgcctggcaagcggcaaaaaaacaacaaaggagcattcccatgagcaagcatctctcccccgcctatcagctgtactccgcgcgcgaggatgccagcaacgacctggagggcgtattggaccagctttcccgcatgggctacgagggcgtggaatttgcgggattctttgaacgaagcgccaaggaggtgcgcaagctgctcaagcataccggtctcaaggccgtgagcagccacgtgcctctgcagcagatccgggacgacacgcagtccgtcctggattaccacgaggagctggagtgcggctgcattgccgtgccctatctggccgaggaggaccgcccgggtcagcccggctttgcccgcgtgctggaaacgctgtataccttcggccggcagtgcaaaaaacgcggcatcgtgttgctctatcacaaccacgactttgaatttgctcagatcagcggcatgacggccctggacttcctctacgcggcggtgcctgcgtccgtgctcaaatgcgagctggacacctgttggattcgctatgcaggagccgacccggccgactatctccgccgctacgcggagcgctgccccgtggtgcatctcaaggactacgtgggcgatcccggcgggcctgcgccctacgcgcttctgggccaggacgcgcccgcgcgcgaggacggcgggcagcctttcctgttcaagcctttgggaggcggctgtcaggacattcccgcactggtggaggctgcgcgcgaagccggcacgcgctggctggtggtggagcaggacgaaagccccgagcgccccgctctggaggatgcccgcctgagcgccgagcacctgctgccgctgctgtgaggccttgcgggccccggtggacagcgggcgcccgaatagcgcggcttttctgaaaacgttcttgggcggcggcgaattttttcgccgtcgcccttgctttttgccgaaaacaggtctatcctgttggatggctctgggaggggcctattctgagagaatgtaggtgattgcatgcaggttttgacattggttctcaaccgcacggagtgcctggaggaactgctggaggcgctgctgaaaagcggcattcacggcggtaccgtcgtggacagcactggcatgatgcgcgtaatcgaccagagtggcgatgatcttcccatgtttgccgcgctgcggcagctgttcgatccggagcgcaaaagcagcaaaaccctggtcatggtgcttgatgacgcgcaggtggcggtggcgcgcgaggtaatcaaccgggtgaccggcggcctggaccagcccgatacaggcattctgtttgccgttccggcgctgtttgtggaggggatgaagccatgaacacgctgctggcgctgtccattgccatcgctgccgggctggcggtgagccgcctggcgcggctggtgcggctgccaaacgtgacggcctttctggtgggcggcctgatcattggcccttcggtgctgggcattcttccccgcgatatgctggacggcttctccgtcattacggaagccgcgttgggcttcatcgcctattccatcggcgccgaattcaagatgagttatctcaagcgcatcggcgccaagcctctgaccatcacggtctttgaaggtctgggcgcggtcgttctggtggacgtagtgctgattggctgctctctggcgggcgtgccgggatttgatctgcccatgtgcgtggcgctgggtgccattgccgccgccaccgcgcctgcggctacgctgatggtcatccgtcagtacaaggcacgcggcccggttagcgatatgctgttgcctgtggtcgccatggatgatgcgctgggtctgatcgctttcgccatttccatgaacatcgcccagacgctgcaaagcggcgcggctatgacggtgcagggcatgctcgtctctccccttctggagatcgtgggctcggtcgtgctgggcgcggcgttgggcctgctgctgagtctgctggcgcgtttcttccggtcgcgcggaaacaagctggcgctgaccatcgcctttgtgtttctggcgctggcgttgtgcgatctgtggggcctgagcaaccttttgtgcattatgatgatcggcgcggtgatgaccaacctctgccccgccgccagcgtcatcatcgagcagacggaccgcttcacgcctccgctgttccttttgttctttgtgatttccggcgcagagctggatttgtccgtcctgcccgcggtgggactggtgggcgcctgctatgtggtggtgcgcgtcctgggcaagtggctcggctcgttcctgggttcccgcctggtgaacgctcatcccaatgtgcaaaaatacctgggcttcacgctgattccccaggcgggtgtagccatcggcatggcgcagctggcgcttacgcgccttcccgcctacggcagccgcatccaggccgtggtgctcgcgggcacgctgatttatgagctcgtcggcccggtggtgaccaagctggccctgggccgcgcgggcgaaattcccgcagctgcggtcaaggcgggcgcggcgacgaaaggatgagcgttcttcgcctgttttcccctgtataacgcggtgcattgcagccttgcaaaatcagacagacggaaaagcgggacggcctctggaccgtcccgcttttccgtctgagaaatccccggcttcccgaaaggaagggagcgcatcgaagcggcgctgcgcctatcgcttgtcgcgatcgatcatctccagcgaaagggtcgacagcaaggcgaaagccagcgcgaacaggaccagcatcatccagtttcccatcacgttgtccagcgttctctcatagtcgggattgtagctggcatcggccgtcttttcctcaatcaccgtcttgacgttttcctcaccaaagaagtcaagtaattcaccaatggtcgccttgaaggtaaactcccggtctctgtgcgcctggagggcctcgttttcaaccaaaaattcggtaatttcacccagcgtaacgggctggttgctctcctcgtccttcctttccatcagggtttccctgactcccaacgcatccagcgcctctcccagcgtaaaggtgtaggtgacctcctgatccagaacctcctgcgcattttcatcctccagaaggtttttaagcatgtctcccgctgtgatggcggcagtgctctcggaggccggcaaaagcgtctggctccagagctgctgcagtccctccatttgcagcatggccgtaagcagctcccggagggacagggtctggacgatttccttgtcgcttacatgcagaatctcatccgccgcgctgaggatttcagccgcctcacccacggtgaagggcctgatgacctccatgtcctgacggctggcaaggaacgtattgtcctcatcccccagcagatccagaatctgccccagggtgacggtgcctcccacttcgttgtcccgcatcttggagagggtgttccaggcagttaccatgggcgcttcgttgtatcctgactgggccgcgattaccttgatgccgtaattggaaatggtataatccgccagcggacgggtccagtccggaaggggcagcagtccgcccgagaataccagctgaaagatcagcacgaagggcatcacggtcatggcgccggtggttgtatgcgccacgctggagataaacaggctcatcatgtccgacgcataggagatcagcagtatggaaatccccacatccagaatcatccaccgggtcatgaagcccggtacgggaaacgcaacccccatcatctccatcacatataacgagaggcctgtctgcgccaggcacagggcaaactgatagatcatatgggacgccacataggaagagatgtgcatgcccgaccggtgctcccgcttgatgatgggccgctcgcggcaaacggactgaatggaattgaagcagccgttccagatcgccacgcatgtcagcgcaaacgcgcccttgaggtttccctccatcgtcaggaaaaaatccttgcggattaccatgctcaccagcgcggcgataatcgccgccatgggcagcaccttccagtcgctctggtagatgaaaaagcgcagctgttttcccacatagatgggaatctgactggcacggcccctgtggcggattcttctgctgatcggtttgttgacgcgtacttcagccatgctgcacctccgcatacttcaaaatgaactcatcggcacggccttcgccgccctcctcctgccggttgaccgacttgacgatctcctccatgctctccttgccaaaaaacgcacgggcctcgtcaatggggccgaaatatgccagccgcccggtgcgtttggcatccttggcgagcacgatcacatcgtcaaacaggtctatcacccgatccggcgtatgcgtaattacgatgatgatcttgccctggtcggcaatcaaccgcagctgctcaaacagctcacgcgccatcacaccgtccaggccggagtccggctcatccaggataaacaaagacgggttggagatgaattccatggcaatggaaagccgcttgcgctgcccgccggacagcttggccaccatatggttttccaccggggtcagcccgaagatcttcatcacatcttccacgcgtgccttgcgctccgcgccggtaaagtccttgggcagacgcaggctggccgcgtccatcagcgtgcggaacacgctgtccgatccgcgcatcagatccatctggggcacaaagccgatgttctactgcatttccttgtaatgcttgtacatgttggtgccattgagcaccacttccgccttggccttttcataaccgttgatggcgttgagacaggtggttttacccgcgccgctgccgcccagcagcagcaccatatgcccgggctgaatgtacatatgaatatcccgcagaagatatttttttctgaaaaactcccggacggaccgctcctccaggttgaccgtcaggcccttgtccagcacgtccgccttttttccggagaaaaagttggcggcctcgcttttgatatcctccaccttccacaggggctgataggccttgcggaatccccacagcagcgcggggatgaagcccagcagcagccacaggacgacccagcccttcctgcgtccgtatacttcgctcagtccattgtagacgcgaatctggtaaatgatatcaatcaatgcggcgatcagccctaccagggcaaggaacatttcagtagcagagtccagctgtagatacaggccgggcaggcttgtagcgaccatgaggaagtccatcacagccagcattcgtccctccggttcccgacccgcgcacaagcccagcttgtactggcgcgcgcaggggatcagtgcccaccagcccttaacgccgcttttgcaaaagaccgcccacaatcccatcaggtacagcagcgttggaatgatgcttcccagctcaaaggaggtatccagcaacaccaaggtaacgccctccgcaattttcatcatcaacacccgtgtcttttaaatctcatccgacacgcgcctgacggcggcaaccatgattccctcccgcgtccgtccatttgtatacatttcgcctttgcctgggaaaaatcttgtcttttctctaaaaaacggcgcatccggacgggtcggaagaggctccagcgcgcccgtaacgccggatgttgcgcaccgcctgccggggttcccccgggctccattgtggggagaaccgtgaatgaaccggggaggcaactgcgggcgctggccttgcgctccggctgtgaggcggctgcgcgcacgatcagggcccctgccgagggaacctctccggcgctttccgcgtttttctcgccccgcatgcctgtcaggccgttcggttgagtttgacgatggacatgttgaaaatgccgtccgtcgctcggacgggactgctgtaaaacaggctcagcgtcgtttctgagggtgcatagataatgaagttcgcagatcctcccgccgaggttccgttgacgcttgtagcaaaataaacggaggtttccatatgagaagtgccgttgtaggaaggcgtaacctgcatatagctggcagtgcggtagatcgccgatatgctgtagcccaccaggtagtaacccggctgaagcgtgatgcgggaaaaatccgtctggacgatgttgcccgtgggatcggtcacatcggggaacatggtaatcaggctattgttatcccatacggcctgaacgttggcaaaggatgcaaacacatcttcaggcgccgcgcccgtagccccggtcgcgccggtggcgcccggcaggcccggcaaaccatctgcgccggtggcgcccgttgggccgtccgcaccagtggcgcccgtggcgccggtaggaccgtccgcacccggcaggccgtctgcgccggtggcgccggtcgctcctgtagcgcccgttgggccggtggctccggttgggccgtccgctcctgtcgcgccggttgagccggtggcgcccgtggctcctgccggtcccgcaggcccggtggcgcccgtatttcccgtagcgcctgcaggccctgtgggtccttccgcacccgtcgggccggttgcgcccgtaggtcctgtcggaccggtcatactggcggagccggccggtccggtggggccggtagcgcccgttgggcccgtagcgccggtaggtcccgtaatgccactgatccctcgtggtcccatcgagccgtttgatcctgccggaccggtggctcccgtcgggccagttggaccggtgggcccggtcggcccggtcgcaccgtcggtgccagcaggtccggtaaaccagataggatacccatgaagcgcgcagttggagcacatggagccaccgcatcttatgcatgaaggtcctttataaatgaacatggctcgcaccttctttctatgttcacaccatcctattccgcatttatggttctgtgcgcaaaaaggcgcgctgtgcaaacagcgcgccacagcttgtcggaaaaactcgcctgcggcgatcttttccgacagaacgcgtttcccctgcgctttcagcgcggccggggaaacgcgcagggaaaccttgctgcgcaaggcttccgaatccaccgcacatgtcgctggattcggatttcactcggagggctacggccctccgaacctctcaaaagggtttttggcagactgagcgcgctgtgcaaacagcgcgccaaacttttcccatctgttcccttatggcggcggcacgatccacgctcgccgcccgtttgcgtatcagcagattccatctctttgcgctccggcagggaaagcgcccgtcaggccgccatacgtcccccaacgctgtccaccatcatcagcacctctgtttcttcgcccgtcagcgcatcgatgtatacacggtactcgcgcccctcgtagcggcccggcacctcgtagcacaggcgctctccctcgcggtagggaatcacgcacagccgcgccttaccggcctccagccgggagctcaccttctccagcgcctcctgcgcggaaagcgcaggcgcaagccccgtgcgccgggtgtggttcatcagatagttgtttgcctccagacctaccacttctccggtgtccatgcgtatctgtaccttgaccagatcgggatacagcagcaccccgtcctgcacggccacaaaattgattactgccaggccgtcgtacacctgatagtggttggcctccatctcgccatagccgcggtccagcagaaagccctgtgccgcttccgcacattcctccagcgtcagcgcgggggcaaaggcagcatgctccggcaccatccacagcatctttcccccctgacgggtcacttcggcattgagcaccacaccgtcgttcagggtcagggtcacaccgtagctggccagtgtaccgccgctgtccggggccgcctccacacgttcgaccctctcctcccccacaaaggctctggcgatttccagggcccggatctgatcgatccgttcctcgcccagtgccttgggcgtgccgtaatgccgcgcatcagaaaaggcgccgtcatagatcatgctgggatagtccatgccgttgtcgggatcggccacctgctccagcgggcgctggcccgcctgcgcctcggcatagaacacccccggctggactgtcagacgcaggctttcggctaccatggtctcccgcgcggtagcaaactgccccagcagcagcgcgcactggctttccagggcgctcagctccgtggtttgctgctcggtcagcggctggcctgcggataccgacagcgccagtaccatggcatattccgacagctgattgcaaaacttcaacgtgtcgctcatggcgatatgactcagcggcagggccgacaggccgctcaccacattgtccgcctgccggctgatgcccgcgagcagctccacctgggttcgcgcgtccgtcgctaccggcgctttgcccagtttgagcccgatggcctgcaagtgctcctgcgtttccagcacgcgctgcgcataggcgtcctccagggcctgggcgcttcgctgggcccggttgccgtaatccagcgtgagaaaaatggatatgagcaccgccacacccaaaaaggtatacaaaagaatgtgatgcttcagccgcatgcgcgcctcccggtcaaatggcgaagttgtgcttgccgatgctcagctgcactgtgcgcgaccagatccacccattggtggcggttgcggggttgtagtaatacaggcacccgccggtggggtcccagccgttgagcgcatcgcgggcggcgcgcaggctgtcctcgtcgggggtgaggttgatctgcccatccgataccgcgtcaaacgcgccggactgatagatcaccccgctgatggtattgggaaaagaagggctctttacccggttgagcaccacggccgccacggccaccttgcccacgtagggctcgccgcgcgcctcgccatgcaccagcctgcccagcaggtaggtttcactttcgttatagctggcggcggatacgctgcccgtcagggtgatgcccagcgccgcggcagtgctctcccccaccgcgccgtccaccttcagcccgtttttgcgctggaaccataccaccgcgtcataggtctgcttgccgaatacaccgtccaccgtgccgctgaaatatccgtactgcttcagcttctgctgaatcaacgtgacctgatcgcccttatccccccaggccaccacggccgcatcggcccgtacaaaggaaaaaaacagggcaaacgtcatcagcgccgcaatcagctgcagcgccagctccatccgattgggtctccgccgcattcaaaaaaccctcccccacaagcatcgcttcgtgaggaagggtttcccatgaagaaaaaaactatacgcctgctacgggcttctcctgcgccgtatacagggtgtaaccgttggtttccacgcaggaaagatcgccggtaaagctggttacgtacgcatcggcggtgagggtccagcggcagccctgcgcaagcgtcacgttcacttcgccgccctggccctccggattgaccgtgccctcaaaggtagcgccgtccgaaagcgtcatgtcaagcgaggagctctcatccacccggatggttccggacagcgcctgcgcgatggcgttcagcgtgcagcgtccaccgttttctcccggcgtgccccagccacgctcgcccgtattgccctctacccgcagcaggcatccgtcagccagcgtgagcgccacgccgctgagctcaatggcgcagtcggtgttggtcacataaaacagatcccccgacagggtggtaagctcgccgcccgtcatccggaaaaggctctgcccttcctgggcatcgccgctcatgctttggtaaagcataacgccgtgcaggttttcgccgctgtccgggccataggtgccctgcatgttgcccgataccgtgcagtccgttagcgtcacgctgttgcgtccctccaccacgatggcttcggagcggttggccgtcagcaccgcgttggtcacggcgatctgcgccgtgctgtaaatggcgggcgagccggtgccgttggtcacatagctgccgtcctcgacagtcagggttccgcctccccggtcgctgcggatcgcggctgaggaattgccctgcgtttccacatccacattccaggcggtcaattctccgccgcccgtcacatggatacctccggaatggtcgcccgtggtgctgacggtgctgtccgtcacggaaacagcggttccttccccatagctgaccaccgcgttgccaccggtcgcagccgtggtcacgctcaccgccgtgagcgccgcctgcgcgccgtcggtcgccagaaagcccgcgttctggccgtaaaaatcgctgttttccgtgcttgatgtatctccttgcagcttttggatggtaacgcccgtcagcgccgcctgtgccgtgtttgtcacccgaagggcgttttcatccgccttttgggacagaaagctgccgccgctgatggtggtatccgtttccagcgtagtagcggctgtgccctggctcaccgttcccggcgcgcctggcaggtcgcccggcgcctgcgggggctgaccgtccggcccctgcggaggaaggcttcccggctccccctctcctccgggcggttccggcggacgttcgccctccggcggcgcctgcgcaggctgcccgtcagacgcctccgcctgcacgggtgcgctttcttcgggcagcgcagcgccctccgccacagccgccgcgtataccacccatacagccatgagcagagccgtgatccgtaaccatgtcctgattctcacagatttcttcgctccctttccaaccagattgctcacagccatcatgctactccacgcgtgtgacgattctgtggcgcaggtgtgaacgcccggtcattttacaaatttgcagcgaaaaaaaacctcaccgccctcaaaagcgtctatctcaataagcgctacaccaaagaacggaggatgacgatgggaaagaaaacgctgtatgcagccgtgctgctgacatgcctgctgctgtgcacgggcgccaaggggcaggggctgtcccttgatctgccggacaccgtgcgtccctaccagccggcggaaatcaccgtggaagcgccccgaccggggcagctgaccattcagctccgaagcgaagcggggcccgagctcccgctgtgcgagaacctgcccgtggaggcgggccgcaacacggttcgatggaacgcgacctcctatggcggcatgccgctgcgtgcggggcgttaccatctgcttgcgcgcctcacggacgaggacggcggccacagcacggcgcgcgccttcgttacggcggaacgtgccgccgccgcgctgatctatgcgctgcccagcggcgagaccctctatcaccggcggacggagccatggtttgtggactgcgcggtcacgggcgcgggcgtcgtacatctggaatgctatgcggatgaaagcctgacgcagcgcttcgcctccatccgcaaaaagctggagggcagcgggcgcttccgcatcgcatggaacggagcctgcgacgggcgcaaagcgcctgccgggcagtattggatgcgggcctacctggacggacgggaggaggaggctttcgtctttccgctggagatccgcgacgggagcgaaccagtgcccgaactggcccccaccggtccgcttctgcccgatatccgcagcgatgagaacctgtgggaagccatcctggcccctgccgccgtggtagacattggggcggaggaccaccagcgcctctacctctccccggaccccgacagcgacgttgtgggacaggtgcacggccagtctcaggcggtggaggtggtggagcctggcgcgcgctatacgctggtgcgcgcctggcggcatgaggacggagcctacgtcgaaggctacgtgcccaccaaaaagctcaagatggtgctgcccggcacgcgctacggcgtagtcatcgacaagacggcgcagaccctgaccgtgtacgaggcgggaaagcccgtgggccgcgcgcgcgtgagcacagggctcaaggccccgggcaaggcgttccgggaaacgcgcgccggcgcctttctcaccaccgaccgtctggtgagctttgacagcggcggctaccgatgcgattatcccatccgtatcgacgggggcaacctgctgcatcaggtagggtatcaggagcgcgcggacggcatggccgacttttcggatcaggcctcccggctgggcgagcgcgcctcggagggctgcgtgcgggtggattggcgcacggacgatgaatataccatcaacgcatactggttgtggacgcacctgccctggcgcaccaaggtgctggtgctgccgtaagcgcaggaaaagcatggcggcgggcccgaacgggtccgccgccaatcgtcagtttccgcactccacgctgatctggttgaacagccccagcacctgctccagcttgagggcgcgcttttcttcgccgctcttgtccagcacggcgcggccctcatgcagcatgaggatgcggtcgccgtattccagcgcgtatcgcaggttatgggtcaccatcagcgtggtcaatcccttctcccgcaccagccggccggtcagctgcatgatgacctccgcggtcttggggtccagcgccgcggtgtgctcgtccagaatgaggaactcaatgggggtgagcgtactcatcaaaagggccagcgcctgcctttgcccgccggagagcgagcccacggggatattgagcttgtcctccagccccagccccagcgagctcagcagctttttataataggaaacgcggcggcggttcacgccgggggtaatgttgtagggacggtttttgttgtcggccatggccatgttttcaagcaaggtcatcgtgccgcaggtgcccatggcggggttctggtacacgcgaccaatgttgcggtagcgcttgtgctcgctcattttggtgatatcgcgaccgcccatgaaaatgctgccctcgtccacggggatggaaccgcagaccaggttgagcatgctggttttgccgctgccgttggagccaacgacgctgacgaactgcccgtccgggatggtcaggctgaaatggcggaacaggcagttttcgttcaccgtacccggagcatataccttgcttacatcacgaagctcaagcatggaatttcaccttcttcctgcgcacattgcccagcacaaggatgatgaggaacagcgccgccgtcaccagcttgaggtcctgcggcaccaggcccatggacagcgccagcgccacgcaggccttgtagatgatgctgcccacgatggccgcggtggagctattcaccttctgacggtttttgaagatgttggtgccgatgatgaccgccgccagaccaaagacgatggcgccggtgcccatcgagatttcaaacacgcggtttttctgcgccatcaccgcgccggagagcgccaccagcgcgtttgcgatgatcagcccctctatcttcaccagccccccgtcgcgcgccagcgtggccaccacggcggggttgtcgccttcggcgcgcaaaaggaagcccgccttggtgttcatgaacaggtccagaagcaccttcaccaccagcacgatgaccagcaccaccagcaccttggaccacggtgcgagcgccgcgggcaggctgtccaccagcgcgttgtcaaagagggtatccatgttgaaaaagggcaggttggcccggcccgcgatgcgcaggttgatggaatacagccccgtcatggtgatgatgccgctgagcaggtcgcgcacgcggcatttgacatggatcagtcccgtgaccagccccgccgccgcgccggcgagcgtggccatcaggagcgtgagcacgggatgcatgccgttcaccgtcagaatggcgctgaccgccgcgcccagcgggaaggacgaatccaccgtcaggtccggaaaatccagaatgcggtaggtgatcagcacgcccagcgccagaatggcgtagatcagcccctcctccaaaatgccgatgaaaatgcccatgaaaccggcctccgtttcgctttggttcctttgcccgctcaggccgccaaaggcccgctcccgacacgcgggagcgggtggccaagccggcggggtgcctgcttactgctgggtgacgtcgatgccgcgggccaggtccgcttcgggaatcgtcacgcccagcgcctcggccacgtcgggattgtagcacatgtcgccgccctcgctgctcacaaaggcgatgtctccggcaaaggcgccctccagcacctgcgcggccatgcgcccggtctgctgccccagggagatatattcgacgccctcggaggcgatgcagccgttcttgacctgctcaatctcgctgccaaagacgggcttgcccagcgcgttggccttgtccagcaccacggccaggtagctgaccacggtgttgtcggtcaggttggtcaggcaatccacctgcggcaggagggtgtcgcacgccagaggaatgtccgcgccggtggaaatgcccgacgccacgatctcaaagccataggcgcccgccagatcctgatagagcttgagctggctctcggaattggtctcgctggtggtgtagagaatgccgatcttcttggcctccggcaggaatgagcggatgagcttgagctgcgcctccacgggcagcacgtcgcaggtgccggtcacgttgtactcgctcttgccctcatcgttggccagcatggcggccacagggtcgctcaccgcggtatagatcacgggcttgccgctgtccatgcaggcgttgaaggccgcctgcgccatgggggtggcgatggcgcataccaggtcgcactcctgcgccatctgctgggcgatctgctggcacaggcccatatccgcctgcgcgttctgcacgatgaaggtcacattttcaccttccacatagcccatctcggccaggccctgaatgaagccctcgcggcagttgtccaggctggagtgctcggcaaactgcgcaatgccgatggtgtaggtcttgtcggtctcggccacggccagcgcggcggtcaggcacagggccagcgtcagtaccagggcggtcagcttcttcatcatggttcatccatcctttctgcttgtgggggaaatgaaaaacgccccaagcaacctaggttgcttgaggcggtatttccgcggtgccactcaatttccccgccatgggcgggctcatctttcgcgtaccaacatacgcgccgcccggataacgggtgcgggtcccgtcagcggctacggtccaaacgggctttcgccgccgccctcggaagtccattcaccgccctgccgcgcgccgtggtcacactcttcacggctccctttgccgcgccctgtggcggttactcctctccctcaacggtttgattgcgtgtatcatacgccacccaagccccattgtcaagagggtagccgcatgttttttgcatgtttttttctttgccgctttttgtcatccggtggtaaaaaacgcgttcttcgcaaattctaatgctgctttcagcatttccaaagcagctttgagcgcgcctttcttttcagcctccccgttttatggtataatgcattccgttaaagcgcgcggagcttccgggcatccgcgcggcataatagaaggagcaagccagatgagccatcctaaaccgtccgaaaagcgcaaggggctgggcgcggggatcatcgcgttcggcgtggtgttcgcgctgttttcccttttgttccgcccgcacacggtgggcgcttttgcgctggctacggcgctgagcctgtttgcgggcgcggtcatccgcgtcatggcgcaggggctggacgtgagtcccaccgtcaagacccctgaaagcctgcaaaaggtgcagggcaacaccggcgatcccgatgtggacgcgctgctggagaaggggcgcggcatgatcgcggaaatccgcgcggaaaacgaccgcattcccgattccgccctctccgataagctggagaagctggaaaacctgtgcgccgaggtattccgcgcggtatacgacaaacccgccaaggccccgcagatccgcaaattcatggactattacctgcccaccaccctgaaaatggtccggggctttcgcacgctggacgagcgcggcatcaccggcgcgcaggcacaggacgcgcgccggcgcatcggggacgcgctggacgtggtcatccacggctgccagcgcctgctggagaacctttaccgcgacgacgtgctggacctgaccaccgatatcgacgtgctcgagcagatgctcaggcgcgacggcctgaccgaaagcgacctggagcgcgccgcggcgcaggcccgcgaggccgcccgcatcgacgccgaggcaaaccgcatctcccgcgagcgtgccgcgcgcggcaatgtctccgcgcagggaggtcaggcctccgccacggccacccgcccgaacgaccgcacctgagtcctttgccagacaggaggttacgcatcatgacagagaatcaaaaccaggcccccgccctcaccctggaacccgccatgacccgcgacaaggtgatgatggaggaagccgtcaagcagctggaagccgctcccgcggcggccgaagccacggcggagatggacacctccatgctcagcgaggctgaccgccgggccatcgaggaattcgcccagaagatcgacctgaacaacaccgaccacgtgctgctctacgggtccgacgcgcagaaaaagattgccgatttcagcgacagcgcgcttgccaccgtgcgcaccaacgacaccggcgaagtgggcgaaatgctggtcaagctggtcaacgaaatcaagggcttcggcgatagcgccgaaaagcccaaggggctggggggcctgttctggaacgccaaaaaggccgtgagcgacatgcagaccaagtacgacaaggtggaggtcaacgtcgacgccatcgcctcgtcgctggagggctatcaggtccagctgctcaaggacatcagcctcttcaaccacctctacgacatgaacaccgagtacttcaaggagctgaccatgtatatcctggccggcgaaaagcggctggccgaggtgcgccgcaccacgctggaggatctgaaagcccgcgccgcccagagcggcgacgccatggacgcccagcgcgccaacgacatggccgccaactgcgaccgttttgaaaagaagctgcacgacctcaaactcacccgtcaggtggcgctgcagatggccccgcagatccgccttctgcaaaacaatgacagcctgctggtggagcgcatccagagcacgctgtccaacacgctgccgctgtggaagagccagatcgtgattgccctgggcctgcaccgcagccaggaggcgctcaaggcgcagaccgccgtgaccgacatgaccaacgagctgctgcgcaaaaacgccgccgccctcaagaccggcaccattgaaacggcgcgcgaggccgagcgcggcattctggatttgaacacgctggtggaaaccaaccagagcctgatcgacaccatcagcgaggtcatgaagattcaggacgagggccgtgcccagcgcgtggaagcggaaaagcagcttgtgaccatggaaaacgagctcaagcaaaagctgctggaactgaagcactgagccttcggaaaggaacctgaacccctatgaaacgaaatctgcccaccggcgcctgcgtgctgattgccctggccctggtggcgtttggcctgatttacggcactttgaccggctacggcgaggagcgtgcgcaggtggaagccctctggtcgggcgaaaacggcctttcggacgtgctctcctatcggggcgcggacggcctgaacctgtgcgtggtggcgcgccgccacctgccccaggatgatccggctgtgctggccctggaagagagcgccggtgcgcttcgttccgcgggaggaatcgccgccaaaaaagcggcggacagcgcgctggaggccgactttgcggccgtggcccgcaaattggaaagctccgccagctttcaggccagcgaacgcgatcagcgctacctgtccatgctggaggcggatttgagcagcctgggcgcaagtcaggcggtcagcacctacaaccgggcggcctccgccttcaacgacctgctcgccgcgcccctgacagggtcgttggcccgcctgctgggcgttacgccctgcgagctgtatgagtgagggggcggagacggtgcgtttgaaaaacatgctttgcctttgcctgtgccttgtgatggtgctggcggggccggcgctggcctcggcccgcctgcccgtccagcgcggcgcggcgacggatgacgccgatgtgctcagcgcgcagacggtttcggacttttccagctatgcgcagcaggtggaggcggagacgggcctgcgcctgcacgtggcgctggtccacttctgggacggactggacgcccaggcctacgccgacgcgctgtttgaggcgtggaatctgggcgatatggacattttgctgtgcggcgcggcgggtgaggatacctttgccaccgcgatgggcgatggcgcggcggaccagctgggacggcagagcgccgaaaacctgatgtatacctcctcccgcttcggcacactgtttgcctcccagcagtacgacgcggccctcgcggagtactgccgggccttcaacgcgcttgtgctcaagcggacggacgcggacatctccctggacggcctgttcggaaccgcgcaggctacgcccgcccccacctccgagtcccgcctgtgggacgaggtgatggatgccatcaacgacagcagcgaggcgtaccaggcgcgccatgacagccgccgccatacggagaacggcttgagcgcgggtggatggattgtgttggcggtgctggtgctgatcgtgctgaaaagcggacggcgcgggcgcgcgggccgaatgcgcggcggctgtggctgtgcgccgctgggctggctgttcagcctcctgggcctcaacgtactgatcgacacgttccgaaggcgttcctagatcaccgcagggaggatgcgtcatgcttgccagttaccaaagagggcttcgccatgggctgcccatcgccctgggctatctgtcggtttccttcgcctttggcattcaggccacgtcgctggggcttacgcccctgcaggcggtgatgatctcgtttttcaacgtgaccagcgccggccagctggccgggctgcagctgatggccgcgggcgcgggccttacggaaatggcgctcacgcagctgaccatcaacctgcgctacgccctgatgagcctgagcctgagccagaagctggatagcagcatgacgctgccccaccggcttctcctgtccttttgcaacacggacgaggtgtttgtggtggcctcgcagcaggcgggcaaggtgggccgcgcctatctgtacggcctgaccaacgggcccttcctgggctgggtgctgggtacgctgctgggcgcgctggcgggcggcttcctgcccgcggctgtgaccgaagcgctgggcatcgccatctatggcatgttcatcgccattgtgcttccgcccttccggcgctcgcgcgaggtgcgggcggtggtactggtggctgtgggcctgagctgcctgatctcgctgtggccggtgttgagcttcatctccgacggcttccgcatcatcctctgcgcggtggcggcctcggcgctgggcgcctggctgatgccccgtccctttgaggaagaagcagccgatgaacaggaggcgctgtaaatggactggtcccgttttcttacgtacctgctggtgatggccggggtgacctacctcatccgcatgctgccgctggcggccatccgcggccgggtgcgcagcgtgtttctgcaatcgtttctctactatgtgccctacgcggtgctgggggccatgacgtttccggcggtgttttccgccacgggcagctggttttcggcccttgcgggcacgctggcggcgttggttctgggctggatggaaaagggattgctcaccgtggccgccgtggcctgcgcggtggcgtttgcggcgggctttctcccgctgtgaaagaaaaatccgtgcgggtattgcatttttccccaaagcatggtacaatcatccttgcgattttaggacccaaggaggtgaaccacgttgccgaacatcaagtccgctatcaagcgcgtgaaggtcagcgaagccaagaaccttcggaaccgtatggtgaagtcgaaggtcaagaccgccatcaagaagtttgagacggagatcgccactgcccccgccaacgctgcggcgcagtacagcctcaccacctccgctatcgataaagccgccgccaagggcattctgcacaagaataccgcgagccgcaaaaaggcccgtctggcgaagcagatggccaaggcccagtaagtgggctttcgccgccggcctgcgcgttgcgtatgccgcggcggcaggtcgaaacagagtggaaagcaatgccgtgcgatggtttcgcgcggtttttgcttttttatcacgcaaacgccccggcagcctaccggggcgtttcctttttgacgggatagggctccgggcaggacgtgcggcccagcagataatccgtgctcgtatgatacagatcggccagcgccgccagatggtgcaccggaatttcgcgcttgccggtttcatagttgctgtaaacgcgctggtcgattcccagcttggccgccacctgcttttgcatcagctcatggtcctcccgaaggtccttcagacggggatagcgcatgcgatcacctcacgcacaggctaatctacacccgtttgatagtattgactatactattgaacgatagtaaaataagccgaaggggaggggatgcgcatggagctgttcgaggagattcttttgcatcatctcaaaaagaaccaaggtgcccaagggtttcccgcagatccgcaggcgctggtccacgccacggcttatcaggcgctgaacgccatccgcctcattctggagcgggacgatctggaggacccgcaatgcttctggcgcattgaaaaaatcgtgcggatctttgagcgcatcgggagcgactgcggtacgcggcacgattttggctgagaaaaggacggcgcgcgatgggcttccatcgcgcgccgcccggcttttccggcctgcgaagtccaagccggttatttcaccttcaccgcctgcgtcagatccgccttgccgtccacaaagggcgccaggtacagttcctccggcaggtccccgatacacgggtagaggaactccgcccactcgtcgctgtagccgttgttgccgtagcggcccggaaacagctccgtgccctcgccgtccaccagccgcaggctgcaaatccagtccccgaacacgtccatgccgctgtactcccaaagcaggttgccgtcctcgtcatagtatcccttgccgttttccgcctgataggcctccacggcgccgggcgcggcctccagctcaagggtgatgtaggtcatcagcggggagtagcacacctccgtggcccgcgcggtcacggtttcgccctccgtggggatgttgggatattcacagcgtaccttggagaggatgtcgtccgtatccagcgtaaaggtgacgatgcccttctccggcaggagcaggtttccgtccgcgtcgtacttctccgggtgctccgcccacatgtactcctccagcggctggcgctcgccgatgggcagggagatctccaccgtgcccgacagcgtcacgccctcgttgtccagccgccagtattccgtctgcacgatttcgccggggttgggcgttccggtggtgacgccgccggagtttcccggcatatccacgcactgcccgtcaatccagagctggtcgatccaccagcccacgttatgctcataaaggaggttgctgtcctcctccagaatgccctcgcgctggtcctcgggatagccggcgaattcctcccggtacaggcccagcggcgtgtccacgtccagcatgcggtaggcgtactgaatcagcaaggtccgcccgtcgtagcccgcctcgcgcacggtgatctccacgttgttgatcgtggtctgatacaggttgcgccgcatcaccagatcggcgttggtgggattggcgccggtcagaaagctcagggcgtcaaagaggttccaatgggtggcggccaccgccgcggtggcgatgagcagcagggccgccagcgcaaacgccagcgcgcgccgcgtgggaagggcgggacggaccttggcggcccgctcctgcgcgggagcctgcgccgcgatggcctccagcgtccggctcatggcctgatgaaagaccgggggcgtttgaggaatgcagcgttccaccgcctccgcgtactcacgctttttcatgactgagtcctccttcttccagcggagagtgaaccagatttttctgaatatggacccgcgccatcatcaggcgcgttttaaccgtgccggcggggatgccgagcattgcggcgatctcgcgcaccttgtacccttccagatagtggagcaccaccacggcccggtgctcgggggacaggcggcccagcgtctcgtccaggtcaaagccgctgtcctggggagcatccagcacggccatgtcctcctcaagcggcacccagcgctggttgagccgtttgcggagcatcgtgttgcaggtgttgaccatgatgcgggtgatccatggccggaaactgcggaggttgcgaagcgtgtcgcggctttgccaggcccgcatcagcgtttcctgtacggcgtcggcgcagtcgtcgctgttggacagcatcgaccaggccacgcaatacaaaagcctttccagcttggtcgcctcctccagaaaggtctgggtgttcacggtatccctcctaagcggttatcttgcgcaagccccgattgcctggggtacttataaagacaacgcaaaacgtcaaagggttcatctcagaagaaaaaaagccggaaagcattcctcgcttccagctttcaaccggtccgctcccgcacgcagggcgcacggctcagcccgcatcctccgtaaaatccgggtccaccgggggcatgtcctggcagaccatgaggtaggcgtcctcgccgttgtcctcatagtagcgcttacgcaggcccagcttgagaaatcccagcgactggtacatcttctgcgccacgaggttgctcctgcgcacctccagcgtaaggtactgaacgcccatgttggcggcgtactgcatcagcgcgcgcgtcacctccgtgcccacgccccgcccgcggtacggctcatccacggcgatgttggtgatatgcccttcttcaaaaatcagccacgcgccagcgtaggcgatcacgcgcccgtcctcctcggccacgagatagcgggcgcacttgttggtggtcatctcgtccacgaagctctggtaggaccatggggtggcgaaggtcctctcctcgatggcgtgcacctggggaacatcagcgagcgtcatgcggcggcagacggcgctcatgccctgcctcccagccggcgggcgcgttcgcgctccgcctgcggcgcgcgaaggtacaccggcatcagcgcaagataatccacgctccgctcccggttgagccaggccagttcgcccacgctggccggacgcagatagcgcatgtgggcaggcgcaatcacggcccgctcccccaggcgctccacgatggcgtcccgataggtgctcacaccgtcgcccagaaagcacagccggcgctctcccgccacggccagcgcccgatccagatagacgggcagcgcctcggccatgttgggaagcatgcgcacgggcggcatgcccgcaaggaatgccgcgccgtacacctgtcccgcgcgcgcatcctgaatgggacagatcagcgcgtcggtcaggcaggcgcctgcggccagcgcctccagcgcgtccacgcccacgcagggcttgcccgcgccgtgggccatgcccttgacggcgctcaccccgatgcgcacgcccgtaaacgatcccggccccgtgaccgcggcgtacaggccgatctcgctcacgtccagcccggcgcggcccagcgcctcctcgatcatgggcatgaggttgaccgaatgcgtcaggcggttcaccgccgcgccctcataggccacctcgccgtccttgagcaccgccacgcccgcaacaggccccgacgtatccaccgccagcaaattcatgaaatccatccttcccagtccagctcccgaaacccgcccacgggggtaaaacgaagcgcccggtccgtgtcgcccaaaggggtgatctccacctccaggcggcaggccgggacggcctccggtgcgcggcagggccattcgaccaccgccacgcctccgttttgcaggtactcgtccatggccagctcgtagagctcctccgcgctttccagccggtaccagtcaaaatgatacaggggcagccgcccctcctcatgcacctgcaggatggtaaaggtggggctggtcacatagcccgtgacgcccagcccgcgcgcgatgccgcgcgtgagctcgctcttgcccgcgcccatatcgcccagaagcagcacaacgtcgttggcccggagttgccgggccaacgacgcgccgatgcgccgggtttcttcggcgctgtggcttttgaggatcaattcgctttcgcctccgtcctggcgcgcttccgtccgtgcagaatgggcgaaagcggcttgtacatcaggcccgtgagcgcgctgatcagcacccacttgagcacgttaaagggcgcggtgatgagcagcacgaacttgagcgtgctatccaccgcggggatgatggccgtgcccatgcccacgatggcttccaccggcatgccgtaggccgtgccgtagaacgggatcatgatatagaggttgctcagaaccgccacgatggtggccaccaccgtgcccacggccatgccgatgagcgcgcccttgcgggtcttgttatgctggtaaatcaggcccgcgggcagaagcatcgcaaagcccatcaggaaatccgccagttcacccacgccctgggaggaggagtgcagcaggcccagcaggctcttgaccagcagaatcagcgtgcccggcaccgggcccatggcgaaggtgcccagcagcaccggcaggtggctcaggtccagcttgtagaagagcacgaccggaatctcgatcatgaacagcacggccgagatggcggccaggatggccacggtggccagctcgcgggtggtgaggaagggtttgcgctttgcattggtcatgggaaatgcctccttgaagtgaaattgcccccgatggctttttcgcatcaggggcaaccgcaccaaaaggcggcaggctgctcttctcgtatccggactttggccgaaaggccgttcaccgttggtcccggagttgcaccgggtcggggaggcgccaaggcgcctccttcgcggactgtaccgccagtagggaatttcaccctgccccgaagaagccatctctattgggtttacggctgcatcatagcacggcatgcgacccgtgtcaagaggattgtgaaatttgcttcaaaaacgcgcatttcgtggtataataagcatgcgcgtttcgcaagggcgcgctttcccggccggaaacggcccatatgcaagcgtttttaaggaggctttttcatggagtgcaccgcaaggatcacccctgatctgttgtgggtgggcggcaacgaccgccggctgaacctgtttgagaacatctttcccatcccccgcggcgtcagctacaacagctaccttctgctggacgaaaaaaccgtgctcgtggacacggtggacaaggccatctccggcgtgttcttcgacaacctgaccgccgcgctggacggccggcagcttaactacatcgtggtcaaccacatggagcccgaccacgcggccaccctggccgaggtctgcgggcgctatcccggcgcgcaggtgatgctcaccgccaagggcgcgcagatggccgcgcagttctttggggatggcctgcgggaccgtctgcacgccgtcagtgatggcgcagagctggtcacgggacgtcaccacctgcgctttttcacggcgcccatggttcattggcccgaggtgatggtcacctgggacgaaaccgaccgcgtgctcttctccgcggacgccttcggcgccttcggagcggtaagcggcttcctcttcgccgacgaggtggactttgcccgcgactggctggacgacgcgcgccgctattacaccaacatcgtcggcaaatacggcgcgcccgtgcaggcgctgctcaaaaaggccgccgccctggacatcgccttcctctgcccgctgcacgggccggtctggcgtcgggacatcgcctggtttgtggaaaaataccagcgctggagcacctatcggcccgaggaggacggcgtgctggtggcctacgcgtccatctacggccacactgaaaacgcagcggaggtctttgccatggccctgcgcgacgcaggcgtgaagcatgtggcgatgtatgacgtatccgtcacccatccttcctacatcctcagcgacgcgttccgcttcggaaagctggcgctgctttcggccacctacaacctcggcgtattcccggccatggaaacgctgcttctggacctcaaggcgcacgccctgcaggatcgcaccgtggcgctggtggagaacggctcctgggctccggcggcaggcaaacagatgcgcgagatcctgggctccatgaaaaacatacgcgtgctggagccggtgcccaccatccgctcggcgctggcggcggacacgcgcgaggccatcaccgacctggcccgtcagctggcggaggcataagcggcatgtgcgggcgctactttctggacgatacgaaagaagcgaacgagcggctgttgaacctgctgcgcggccttctggaaagcggcgatcctctggcttcgcaggtgcatacgggcgagatctttcccacgcagctggcccccgtcatcgtggcggacgggggcggcgtgggcgtgcgcgccatgcgctggggatttccgcgcgctggaggccggggcgtggtcatcaacagccgttcggaaaaggccgattttacccccatgttccagcgcgcggtgcgggagcgccgctgcctggtgccggtttccggcttttacgaatggcggcgcactccctccggcggaaaaacgaaggaaaaattcgcctttcaatcgcagggcggggtagacaaggggctgatgtacctggcgggcgtgtatggcgaatttctgggcggattccgcgcgggcggatttgacggcttcgccatcctcacgcgcgaggccgatgagcagatgcgcccttaccacgaccgcatgcccgtgattctggacgacgaatccgtaaaaaagctgtggctgctttcgccgccgcagatcccctatgccgacctgcgccggcactttgatccgccgcgcctgtatgtgcgtccggcccctgcggagcggtaaagcaaaagggaaaaaacgccggcattcccccgcttccatcgggccatttcgcacgatgtgcgcttttcatcagggcgaaagggaaaaaagctgttgacaagcgaggggaaaaacattacaataacctatgtctggtattggggcggtgcatgcggacatgcgggtgtagctcaatggtagagctccagcttcccaagctggctacgtgggttcgattcccatcacccgctccaaccgcatgataacctgccggattatatcaaacgtaaaacaggaggtcgaatcccatggccaaggcgaaatttgaacgcaccaagccgcacgtaaacatcggcacgatcggtcacgtagaccacggcaagacgacgctgacggcggcgatcacgatgacgctggcgcagctgggcgaagctcaggcgatgaagtacgaggacatcgacaaggcgcctgaagagaaagcgcgcggaatcacaatcaacacggcgcacgtggagtatgagaccgagaagcgccactacgcgcacgtggactgcccgggccacgcggactacgtcaagaacatgatcaccggcgctgcgcagatggacggcgcgatgctggtggtatccgctcccgacggcccgatgccgcagacccgtgagcacattctgctggcccgtcaggtaggcgtgccctacatcgtggtgttcctgaacaagacggacatgatggacgatccggagctgctggagctggtggagatggaaatccgcgagctgctgagccagtacgacttcccgggcgacgagattccgatcatcaagggcagcgcgctgcaggctctggagtacgtgcagaacggcggcaccgacgtgcgcaacgccaaggagacgcagtgcatcttcgagctgatggacgcggtggacaactacattcctgctccgcagcgtgcgacggaccagccgttcctgatgcctgttgaggacgtgttctccatcaccggccgtggcacggttgcgacgggccgtgtggagcgcggcgtggtgaagctgagcgacacggtggagatcgtgggtctgatggacaagccgcgccaggtggttgtgacgggcgttgagatgttccgcaagctcctggatctggcggaagcgggcgacaacatcggcctgctgcttcgcggcgtgcagcgcaacgagatcgagcgcggccaggtgctggccaagcccggcacgattcatccgcacacccacttcatcggccaggtgtacgtgctgaccaaggaagagggcggccgccacaccccgtttttcaacggctaccgtccgcagttctacttccgcacgacggacgtaacgggcaacatcaagctgcccgagggcgttgagatggtgatgcccggtgacaacatcgacatggaaatcactctgattacccccatcgccatcgagcagggcctgcgcttcgctatccgcgagggcggccgcacggttggctccggcgtcgtgtccaaggtcatcgagtaagatgcgttcaggcgcgtccgctttcgcggacgcgctttttttgataccgcatggacaggaacacaaacaaccccgccgcagcgccatgctgcggcggggtccgtcgtatatcagccattcaacccgggttcaccttccggctgcggcacctcggtgggcagggtctgcacgctgtcctgtgtgccgccggcatcctgtgttgtttcaggtgcgtccgtagccgtcacgccatcactggcaggccagggatcgctgtctacatgggtctggcatgcggtcaacatcagcgccgcaatcaggcatatcgaaaggatcatcgtttttgtccttctggtcatttgaaacgcctccttgcattgggatcagttccagtataccacaagacgccgttgaatggctttacaaatcccgtcatgcttgttacaataccactgacaacgatccgagaggctggtgactgacatgagcaatatctggc

SEQ ID NO: 1137 - DNA, 7751 bp, Unknown
  16S sequences of unknown bacteria
gctctctccctgtcttagtttcctgctctcgccctctccccatacccctccccgccaaacaaaaaagagcccgcaggctctttttccgtttcccttgttctctcctctgctgccacgcttccgccatgccggcgcatgcagccctcggccttatctccgtgcaggcaggcgcccctgccctatgcgccgaatacctcgcgcgcaatcgccaccgacgcctgcacgtccgccgcataaaaatccgcgcccatctcgtcggcatactcctgggtcagcaccgcgccgcctaccatcgtccggcagccaaggccggccgctttcagcgcctcaatggtctccttcatcgatgccaccgtcgtcgtcatcagcgccgacagccccaccagcggcgcttttgtctcccgcgccgcctctaccaccgtctgcaccggcacatcgcgtcccaggtcgatcacctcgtacccgtagttttccagcaccaccttcacgatgttcttgccgatgtcgtggatgtcgccctttaccgtcgccatgaggatgcgcccccggctcggccccttgtccgcgcccgaagcctgcaaatgcgcgcgcacccgctcaaagcacgccttggccgcgtccgcgctggccaaaagctgcggcaaaaacaagacgcccttctcatactgctgccccacctcgtccagcgctgggattagcgtttcctgcaccagcgccaacggctccgtggatgccagcagcgcctcagcacactgcgcagcaggctcctttaagccctttaggatgcagtacgcaatgtcctccgttccgccgccgcgcttgggcaggggggcgggcttgtcctctgtgcggcctgcaaaccgctcgatgtacgcccggctgccgatgtccaggtttttcagctgatgatagcaaaaaatcgtatccatcatcgcgcttacgttggggtttaatatgggcaggtccagcccgtttgccagcgccagcgccaaaaacgtttggttcagcgcccccctttgcggcaggccgaaggaaatgttggaaacgcccagcaccgtctttagccccagctcctcatgcaccatccgcactgcgtccagcgtctcatacgccgcctcctgctcggccgaggccgtcagtaccaggcagtcgatgaataccctttccttcgggatgccgtaacgcagcgcctctgccaaaatgcgccgcgcgatcttcagccggtcctcggcccttcgcgggatgcccgtctcatccagcgttaagcccaccacgcacgcgccgtattttttcaccagcggcaaaatgcggcgcaataccgcctcttcgccgttaacggagtttacaatcggcaccccgttgtacgccctcagcgcctgttccaacacctccgggtgcgaagaatcgatctgcagcggcgcggtcagcacgctttgcagcgtctgcaccgcctccaccatcatcgccgcctcatccagcccgggcaggccaacgttcacatccaaaatcttggcgcccgcctccacctgctctaggccctggcttaccagatacgccatctcatgggtttgcagcgcctgcttcatgcgctttttccccgtcgggttgatcctttcgccaatcggccgcacccggtcgatcaccaccgtctccgcatgcgagcataccgccgataccggcgcatacgccggcctttttggcgttatgccgcgcaccgcctccgcgagcgcccggatgtagccggggtcggtcccgcagcagccgcccaccatcgcggccccgcgccgcaccagcgcctgcatcgcctctacaaattcctcccgcgtgatggaatagcgcgtcctgccgtccacaatctccggcagcccggcgttgggcttgatgatcagcggcaggtcggtatagcgcaggatctcctccgccatttccagcatctccaccgggcctaccgagcagttcatgcccagcccgtctacccccagccccgaaagcgtcagcgccatggccgaaagctggcacccggtaaacgtccggccgtccttttcaaagctcatcgtgcaaaataccggcaggctgctgtgctccttggccgccagcaccgccgccttggcctcgtaaagatccgtcatcgtctcgatgaaaatcgcgcccgcgcccgcctttacgcccgcctctacctgctcggcaaacaattcgtacgcctcgtcaaacgccagctggcccatcggaaacagcagttcgccgatggggccgatgtccagccccacatacgcgccgtcaaacgccttggccgcttctttggcgcagcgcacccccgccgcaatcgcctcctccggcgcaagtccgctgcccgccagcttgtgcgcgttggcgccaaaggtgttggccagcaccacccttgcgcccgcctgcaaatattggcggtggatgtccgtcacgatctccgggtgcaaaaggttataggtttccggcagctgccccagcggcagcccggcattttgcagcatggtgcccatcgcgccgtccagcacgatcgggccttgttgtaataatgcgttaacgtccacagtgtgtccctgcctttctcatctggcatgaagcggcaaacgcgcacgtttcgcagcgcgcctgcctgggttggggcggggctttcgcaatgcccagcaccgccgtcacggatttttgcggcgtcagcagcagcgacggcgtgcacgccagcccgattttgcgcggcgtatccagcacgcgtacaaagtccggctgcaaagatagcggcaggttcccatatccgcaggaataccgacgggtcagcctttcgcccctcgccagcccggccgccagcgttttttccgcctcgtcgcatacgcattcgatcagcgccgtggccgccgcatcgcacaataccgcctccgccatcgactgcgcctgcctttggcggatcagcgcatccacctccggccccagcgtggccgccagcaaaatgcatcggcggctgttttgcaaaagctgggcaatgtcgcgccccgtcagcgtcagcgtcgtgccgcccaccttcagccccgcctcggttctctccagcaaaaacgagcctgtgcagtgccgcggcacagccgtccggcatacctggtcgatgcagcgctccgccatcgccaaaaattcctccgtcatcgcctgcccatggtgccccaggtaccttagcacctccttgagcgccggccgcagcgccgtcatgccagcccctcctgcatcaaacgcaccaccagcgccgtctttctcagcggcgtcatcaggtaatacccgtcgcagtgcggggctgcctgcttcatcagccccgccgcatacggcaccgtaatgtcccacgcctgctgctgcgtggtaccctccagctgctgtaaaatctcctgcgggatctccacgccggatacctcatggcttaaaaacagcgcgtttttgtagcttgccaccggcataaagcccgccatgatcttgccgcgcagggtatgcctagccagcgccagattcgaaagcgcccgctcggtgtaaatgggctgggtcaggaaaaacgacgcaccgcacgcctcctttttctgtgcgcgcttcagttcgcttgcaaagctctgtgcgtttacgttgagcgccccgcccacggcaaacgggctttcttgaaacacgtcgcggttcagcccctctataaaagagatcagctcatacgaattgaagttgaataccgccgaccgcctggcaaacacctcttgcatgatggggtctcccgtcaccgccagcacctggcggatgccctcgtagcatgcgcccaaaagctcgcccttgatggcaatgtggttcttgtcccggcaggaaagatggggcagcacctccatccccgtctccctcttcacaatggcggcggacaaaatgctgttggcccgggtcctggccagcggcgaatccgcaatcgtcaataggtccgcgcccgccgcctgcagcgccctggccccttccaaaagcggggcaaagtctgcatccgtcggcgggtccagctccacagccacacgctttttcgtccaatccctatcaaacacagaaacgccgggggccgcctttttgcgcacttccggcgccggggcgccctggacgcgcgccgtccttgtctgcgccatacaggccagcgtccggcggatatgctccggcgtggtcccgcagcagccgcccaccaccatcggccttttggccgccagcgccgccagcttttccccaaagtacgcggcgttgtcctggaaaaatgtccgcccccctacctgcgacgggtaccccgcgttgggcatggccatcagcggcttgtccgtttctggcaggcggcgcatcaattctgccatgtgtaccggcccgcacacgcagttcagccctgccatgtgtacctccgggcaggaaagcgcctgctctatcagtgcgcggtaaaaatgccccttttgcgaatacccgtcctgcgatacggcaaacgagaccgccacaaacgcatccgggcattttgccgcaatctccccaattgcgggctttagcggcgcaaagtccgcctgcgtttcaaacagaaaatgcgtgccgcccaggcgcaaaaacgcccgcgccgcttccaggtacgcttcctcggcctgcccggtttcgccgtccgccacagggccgatatcgcaaaacaccttggccccgtagggcgccgccgcctccgcagccaggtggtatccctcgcgcatcagccgggcgcgctccctttcgtccggaaagacctgcgcgttgagcgcaaacgtgttggtctttaccgccttggcccctgcctccaggtattggcggtggatgcgccgtaccaggctggggttgtccacgttggcccgctcgcatgggccgtcgtcgcccgtcagctgaaaataataggtgccaaacgcgccgtcaaacgcgcggaacggaaggcgcttttccatgcacaccgccgcctttcttctcatagtgtttcgggatgaattaaatcagtttagcatacaacgaaacgccccgcaaagtcaacgtgcccggcgggcatcgcttccctcaaaagatcgtgtaccgccgtttcccctcctccctccagccttctttcaaacagctctcgcgcgcgtcttttggctctttattttctttttgttttgtttttgttttatttatatatataggcgcccccctttgcgcaccgggttgtgtctttgtttgtgtacgcgtttgtgtctctgtttgctgctcctgtttaatgctttgttgggatgctctctttggaaataaagatttcttctgcctcttttattgctgttttcaatagacataatgcttgtaaagcttgcttggttttcactggtgaaagcacattcaacgactccaaaatcccattcaatagccttgtatacatcctttcatatacacgcataaaaattcacctcctgggcaaattatatttactatgttcatagtaactacaaatatagtaactataaatatggtaatcgtcaatgtgcctaatttccgttaccctaatgttaggtgatatgtgctgtgaaagattcttccctcgtacaactcaaacaatatgggcatgttgagatttgcctaaagcaaatcctccatgaccgcaatatctctcgcaacaaatttgcaaccagcattggtacacgcttttccgtcatcaataaatggtacaacaatgatgttgaaaagctggatttggatattctcgccaggatctgctgtgttttggaatgtcgtgtagaagatctcattaagtattgtccataattcgataaaagcccttaagggctttttatatttcctgctatcgtatatgcacctgccgcaacaagcccggcgcggtgtagggccgggcgggccaaacagtataatcacgctagaaacgtaaaaccccttcccccctcgaaggagtccggggcgggcagtgcccgctcccttgtccggcccaagaggcctgcgttgctggggaaagtaccccggggcttttcctcgattttccgccttctccccgggcaggaggggggcgggcagtgcccgctcccttgtccggcccgggaggtctgcattgccggggacagtgccccggggagaggccatacacatcagcgcccctttgtcattaggcagtgcccgctgcctcttccagccaatctttctgtgctgctcactctaccatgccccggggctctttccctgccttttcatcttctccctggccggacctgcccgcaggcgctcgcctgctcgcttccttttggcaaaaaaaggaagaatccccgtccctctatgcgctgtagcttgaataagcaccgtaccctgcatctgctctcgccctgtcttagtttcctactctcgccctgtcttagtttcctgccctcgtcctgtcttagcttcctgctctcgccctgtcttagtttcctactctcgccctgtcttagtttcctgctctcgccctgtcttagcttcctgctctcgccctctccccatacccctccccgccaagcaaaaaagagcccgtaggcccttttttcttgttgcctgccccctgatggccccggcttaaaacacctcctgccgctgcaaaagccccagtgcgctctccggctccttcggccttaggctgtcaaattcaaacctcggccgcctgtccggccgcgccgtttcctgcggccgtccggatacaaaataccgcagcgcatccggcgcatgcgtcagctcatgcgggctctgtgccgtgtcgttggggtttttctcgtcatggcatagctgcggcagcgtgcggatcaggttcttgcagttcgggaaaatgcgcagcctggccgccggccggccccattcgtcgcggcaaggccttagccactccttgagcgcataccacccctgcacccggtcgttgctcgcccgtgtcagccgcagcccgtgctcgtaaaacagcgccgccgcgctcttgccgctgtcctgccgccggttccaaagatcgggcggcgccaaaatccggcaaagttcttcctcccccgtcatcgccaacagtctctccgctgcctcggaaataatcaaatccttttcatacaattcccggtatacatacgcaaacccctgcaaatccaccgcaatccagtacgctgccagcatatccagcccataatccagcgttacataccgccgccacgctttgggaaccacaaacggctccgtcacatgcagccgcctgtcgaattccggaaaatattgcccggcaaatacgtcccagtcgccgtataaatacgcccgccgcctgtcctccggcagcgcctctagggtctttacataccccggatccttctgcatcagcacctcgttgtcgtatacgttggcagggataaaggcatagtcctccgcccgttctccctcgcggtacatcccgtccacaaacagccgcttgaaccacccgtgccccacgccgcccgggttggccgtataatacatccgcggcgtaaaatccgcccgtgtgctgcggttggccgtcgtcagaaacatccgctgccgctcggtaaaatgcgtggcctcctccatcgcgatcacgtcgtattcctgcccctggtattggtatacatcgctctccgcatcgcagtagcccatcttgatgcggctgccgttgggaaacaaaaacgcccgctgcgtctcgtggtagtccgcatagccgtatagctcctccatcatcggcaaaa

SEQ ID NO: 1138 - DNA, 4162 bp, Unknown
  16S sequences of unknown bacteria
tcaaacgccgcacctctgtgagttccggctcgcggtggagtatggttgatatgataaacttcatcatcgcccccattaacagaccagtcgcgcgctctcgcataaagcgtagtagtggagcttaaaatgttcgcgcggtggagttagacgcggtgaatgcactggattcattcgttttgctttcgcgcgaaggggagaataccaaatcatgagtgaattggagtaggctaaccgcggatgggcgttagtctgtgcgctgacgtggagagaacgtccaatttcgtttagcttccgtaggagaactaacgaacagtttatcaaatctaaaccaaataaacagacgcggacatgttacgctccactacttcgctttatgcgttatcgcgccccaaaactcaccgcgcgcacattttatgctccactgaatgagcgtagctcattcgacgctttatgctttgccgcgcgactaatcggaaacagtgtgcggagacaaaagctcattgttaagccaaactccaccggaagccggtactcgcagaggggtggcgtctgaacctctctgcgttccctgaacagctacgctagttcggaaaagggcgccccacgcggagtggaataatgaaatcgaaaagacgtaagtcttttcttctttttacttcacttaaagcctaagtgaatctccataggggaagtctccaagaaggcgcaagtcgtctaaggtagaaaggaacttcgtcctttcatcttcagttggcgcgtacgataactccgttctcgaagtagccttcgtacgtcctgccgccgggccatgtgtacacaccttttccgctcatcacgttggacgcgaactgaccctcgtatttttcgccgttcgcccaggtgtatgttccgtagccgtcgcgcatatcgttcacgaagtctccctcgtacacgtcgccgtttgcccaggtgtagactccgcttccgttcttcatgtcctcgctgtagccgccgatgtaggtgtctcccgaggcatatttatactcgccggagccgtcctttttgtcatttttgaagcttccgatgtagacagagccgtcggagaaggtgtatgttccgtcgccgtttttcagtcctgccgtgaattcaccgacatacgagtccccgccgacgtaggtataagttccgtagccgtcgatgaggtcgtttttgaactgtcccttgtaggtgtcgccgtttgcgtagcgcatctcgccctcgccgtttttgagcaggttatcgagcggaccgcagtaaacgtcgccgttggaataggaaatctcgtccctgtcgaggttgacctctgccgaaatgccgtcggagtagattattctacccttgtagggctgtccgttatcgtcgacctgaccgaggaattttacgtagagcgaatccgtgacgttgacgcgcatatatctgactccggcgaagtaaactccggcaacgatgagcacggcggcgatgatggctaccacgacaattgtaatgataactctcgcgaagcttgcttttttctttctgcgccgtctctgcgggggacgctgcggagggcgttgctgaggtctttgaggattttgtctatagttattattaggtgtcatctgactgccctttctgggaaatttttacagaatattcgactgcggtttgacctgcgttacgaagttatcgagcatggtaaggagttcggggataacgaacactgcgaagactgcgaccgcaacgacgagtacgacggcgaggattccgtttctgacgggatgtttttcctcagcgaagcgcacctcagcagagatacgtttttcctcggggaggtagaaccttgcggtggagtagtcgattttcttctctcccgaatcggtacatgccactgctttatagagtgcggagccgggttttaagacggattttaaaaatgcgactctgccaagctcaagttcctcgacggttttcgcggagctttcgtcaactgcgccgtgctgaccgagggattttacgacctttccggcgacgcttttacagatgagggagaggacgataccgacgagcagacctacggcaagaccgactacgatgacgagcatggaggaagaatttacgtcgatgtcgaagttttcaaaagaatacagttttctttgcaaagaaacaaacctcctttttatcttttatcgcaaaagtttattttattagctttagtttattctttttttctatcaaatcaagaaagcgcgaagcaaatttcttttccttagacaactatcgtcttctaagagatttcacttgatgaagattcacttaaatcctaagtgagaagaatgtagaaaggacttcgccctttcagattaattaaatccacctgcgggtgggggctgctcctacgcggagggcgcacagagatgctcaaacgccgcacctctgtgagttccggctcgcggtggagttcggtttagcaattaactgccgtcttcgcccatttgaacagaacagtcgcgcggtcatgcataagccttagtagtggcattagcatgttcgcgcgggagagttagacgcgggtactttggttgaattcggttgttcttcatcgcgcggggtcgagaataccaaatcatacgtgaattggattaggctaaccgcggtgtgtcgttaatttgtgcgttgaaatgaagcgaacttgtgatttagttttgcttccgtagaaaagctgacaaacgtgtagtaaatctaaaccaaataaacagacgcggacatgttacgctacactactacgctttatgcgtaatcgcgccccaaaactcaccgcgcgtaaattttatgctccactactacggattatggaaaaccgcgcgactaatcggtaaaaatgtgcggagacaaaagctcattgctaagccatactccaccggaagccggtactcgcagaggggtggcgtttgaacccctctgtgcgccctccgcgtaggagcagcccctcaccgcagtgagatttaataaatcgaaaagacgtaagtctttttttctttagtctttccgaaagacataaagtttctcagaagaatgttttagtcaaaggcatttttcaaaaatccttgaacacgtcgtctccggcgagctttttcagaagttcttcgagatctccgtcgtcgcggtattcgagggtgagggttttcactccgcgctttttgtcggcgattttgcatcttcttccggtaattccggtgaagcgttcttcaatggcgcggaggtagttgaccttgacctcttccgtctcggcagcttccttctgctccttcgcggagtttttgttctcgcgtctgaccgcttcctcaagctggcgaaccgtcatttccccgttggcggctttttcggcaagctccatggctttggacttatcgtcgagcatgaggagcgcgcgtccgtgtccggcagaaatttccccgctgacgagaagctccgtcacgtcctcgggcaagtcgagaaggcgtacggaatttgcgacggcactgcgggatttaccgacctgcgcggccacctcgtcctgggtgaggttataatcgtcgagaagtgagcgatatgctgcggcttcttcgtagggatttaaatcctcgcgctgcaaattttcgataagggagaatttagcggcggtttcgtcgtcggcttcgaccacaactgcggggatttcggttttgccgaggagcttaaacgcgcggaatcttctctcgcccgcgacaagctcatatctgtccgccttttgtctgacgacgacgggctgcacaagaccgttttgctcaatggactgcgcaagctcacggagttcttcctccgcgaagttttttctcggctgattcgggtttgtgtcgagcagcgtcatggggatttcgcggtttgcggcggagtcttttttctcttcgtaaaaattatcctcgaaaatagcgccgagaccgcgcccgagacctttatttcctttattctttgatggcatagtataccttcattttattgcaaaattttatttctgtaagctttggtttattcttttatctatcaaatttagtttttccttcacgttcgtgaagctgtattgtagaaagactgccgtctttcagattcttattatatcgactgcggtcgaaggctgctcctacgc

SEQ ID NO: 1139 - DNA, 6437 bp, Unknown
  16S sequences of unknown bacteria
tcgtgggctcggagatgtgtataagagacagtccataccctcaagggagggaaccgtcaccgccaccacctgcgccttggttttttcaaatagctgcacgcccgcttgatagatccgctcttcgtcctccgctgaaatcacgtcggcaaaatcgttgacgaaaaaacggtcggtgggagtccagggaatggctgcggatgccggcacacaaaacagcatcacgcaccacagcacgccacagaaggcggcggccgcttttttcatacacacatcgatcctttcgcggatgccgggatttcagcataaagcgaatcccctttgccatatggccggcagccggccggtcttctcaaggatgcctacaggctcaaaaactgacggcggggctgctcgccgccccctcgctcgctctgaacccttcggccttttcaaaaccgaacatgcccgcgatgatcgaattggggaaacggcggagcatggtgttgtacgcctgcaccgcctcattgtaatccacacgggcgaccttcaggcggttttccgttccctccagctgatcctgcagcatacggaaattctcactggctttcaggtcgggatagttttccaccacgacccggagctggcccaaagcccgggtcagctcgttgtccgcctcgatccggtcctccagggatgtgctgccggccagcctggcgcgcgcctcggtcacggcagtgaggacctcttcctcgtgagccgcatagcctttgaccgtattgacgaggttcggcaccagatcggcccgccgggtcaggtcggcatcgatattggacgccttggcctgtacgttctcatccgccgcaaccaaattgttgtatgccgaaaatccccatccgactacgccgatcaccagcaccaccacgacggccaggatgccgagcccaattattgtgccttttttcaaaatcatcgcaacctttctgtaagggagataaaaccctgcagtattatagtatgccgccttggtgcgcaagtatttcgttaatattttgtcatcaattgacgttcagctggaattccggacaaagggggctgtttccgttgccggtccgaaataaagaaaaaagcgggatccctcccgcttcggcaggatccgaccggttgcgcggctataataggagtatggacgagacgggaggggacgggatgccggtcatatatctggatgtgttggtcgtgctgaattggtttatcgattttctgctcctgtcttccacctcccggattctgcgtttgccgttcaagcgctggcggctggtgttgggagctttgctcggcgggatcagttcctgcctcatttttttgccggccatgccgttttacctgtccatgctggtcaagctggcggcgggcagcctgatcgttctggcgtccttcccctggctcggtatccgagcctacgggaaacagatgctggttttcctggtcatttctgccgcctttgccggaatcgcgacagctatatggttttttgccgctccggcgggtttcctggtggcaaacggggtggtctattttgacgttcccccgctgctgctggtgggtctgacggtgctgagctatgccggcatccggctttacgaccgctttatccgcaagaaagcaccgctcaaccacgaatacaggctggcactggatgggggcaaaggagaggtggtgctccgcgcgctgtgtgacaccggcctgcatctgacggagcccttctccggctgtccggtcattgtggttcgtcagtcggctctctatcctcacctgccgcccgctttgcaggaggcgctgtctcttcgggatcagccgggaagcttctcgtatccttccggtaccggggcggtacaggccgtagaatcccgtttgcgggtagtcccctatcagacagtagggggaaaggggctattgccagcgttccaggtgaaaaaagcgaggatatccgctccgggacggccggacagggatatcaccggtgtatacatagccttgaccccggagctcggaagaggggaatatgaggcgctgttcggatgcgacatcggcgaatttctgacatgaaaggcgcgccgggccgccctccggacgatccgcggcccgtgagtatccggctgggcttggacagagaaaggttgaggtatatgacaggcatgatatggcgcaatatccttttgcgtgccgttttatggtgggaacggctccgggcgcgcagacatggagagggcatttattacatcaacggagctgacacgctcccgccgccgctctctccggccgaggaggccgacgcgatccaccgcgcggcagagggggacggtgatgcgcgcgatttgctgattacccataatttacggctggtggtgtacatcgcccgcaaattcgaaagctcgggggtggggatcgaggacctgatctccatcgggacaatcggtctgatcaaggcgatcaacaccttctgtcccggccgcaatatcaagctcgccacctattcctcccgctgtatcgaaaacgaaattttgatgtatctgcgcaagaatacccagctgcgaaacgagctttccatcgatgagcccctcaacgtggactgggacggcaatgaactcctgctgtcggatatcctgggcagcgatccggacctggtcaaccggaacatcgagcaggaggcagaacgggacctgctgctcgaatgcgtatcccggctgtcggagcgtgagcagctcatcatgcagctgcgtttcggtatcaacggaaaccaggagcatacccagaaggaggtggctgatctccttggcatctcgcagtcctacatatcccggctggaaaaaaagatcatcaaacggctcaaaaaggacatcgaacgggcggaataacggccggctccctcatccttgtattgtaaacagaaacgggctttctctaatgagaaagcccgtttccgttccagcccctgggacgggggccggttttatctattcgtctttcgcgataaaggcgatacccgcgcagccggggccggcatgggtccccacgaccgggccaatactgctgcgatggaccggtgcaccctccaagaggccggatgccgctgcagcgagctcctccatcagggcgggggcatcagaatggccgaggtatatccgccgaccggtatccgcttccttctggacccgctccaggatactcgcgtagcccgccttcaggcccctcaccttctggacgcacaccaccttgccgtcctcgatactgataaccggcttgacaccgagcagggttccgaccacggcaccggccggcgacagacggccgcccatgcgcaggtatttgagatcatccaccaccgcatagagccggatgcggccggacagggcctccatcgcccgcgcgaccgacgcggcatccgcccctgcgtcccgcatggcggcagcctcctgtaccatcagggcaaggccaaacgtcacctgcctggtatcgacgaccctcacccggccttcgggaaactgcgcggcggcggccaccgcattcccataggtgccgctgagctcctttgacagcggcagcacgacgatatcgtcccccgcctcgatatggggacggaaccgttcttcaaactccagcggagtgatttgagcggtcttgggcagctcggccgcttcggacagcataccgtaaaactgcgcgaccgtcatgttttctccttccagataggcgtcctcaccaaaaaacacgcggatgccgataacctccacccgcagacgccggcgctccgctgcgtcgagatcgctggcgctgtcggtgatgataaccacggacataataggcctccttcgccagatactttgattgtcaaactattttggcggagataagtataccacgacggacggaaaatgtcaaatcggcgcgagcgaaagcgtcggattccagccccacttttccggcctgcgacacaaaccctccccaaaaaatttgttttccattcacaattctcccggctccttctgttacaataaaaaataatagaattgtgacagcaagtgacagagcgtgaaatagtgcgaacccgcatgaatattgtacttttacagatttttcggtttctatatgaagatttaaaatgttgtttgtcgtttttttgacgaccgaacttagcggggacttataaagaggaataaaccggtataagaatcattctcttttcagaatgcgattgtctttatcagtaattcaacggacgcatgaaattatccgtttccgttcttttctttttctgtttttgtggtgaagaaattgaagagcaagcataggaagagggaaccctcttccgtgaaactgcttatcaggaaatatcccaacccctctgttgctttctcgaatgggtacccattcgaatgtatcgtcaagttcgcaagaatgtggtaaaataaatttgatcaggtgcgattgttactagttgtgacagcaagctaatttatattttgctggaggtgtctattatgataaaaaacggggtatatataggaaaagatattgaacttgtagttactgataaatatgtaatttcatatagaagaaacacacaaatggacatgcttgaatccagattgttcaaaagaagcggaaatgatttttcatgtattggtatttgccaatcaagcccaactgaaacggagcaatacaaaccaccgctgttatggaaaacggcatttatttataatggtaatgcgaaaggagaaatccaaacctatcaaaaaaatcaaataatgagttgtgacactccacctacatacttaaaaaatcatgatgagaatatgaagtcctacctaggaactgcatttactatttacgattatgcaaataaaatagaacttcaatttgacgacaatatcatttattcagccgcttatgatgaaatttttgatgacaagacccttttgccggacttgccttttgcttgcgataatactattggcgaatgccttcgtctatggaatgcaggactacgtgaagaatacatatcgatagatgggatatcaacctttattggtgtcacaattaatacaaacaaacacatgtatatattcgaaatgactccaagctctatttattgccgtgctgcacgttttgtcgcaaccaacaaagggattgtgttcaatcagaattttcggcagggatttgaagcctatatgataaaagataattcagaggctcaattcccactatcttttgacgaggctcttttttcaagcaattcgtgcgcttggaatgatcgaagtgtatactggtctttatcgtcttacaatgaaaatgaaatagtattacatggctgtcagggagacatataccattttaataaacccaaacgataattcttaaaaacctaaaatgcgttcgaacatcgtagcataacattttttgacgcttttgtgacattcgaacatacagagagacaataagagatatggcaagtgttaagcaaaaacgacgaaaagttccattctgtaaggattttaccgttttcctataaaggcttataagaagcagcggcggggattcccgcctttccaacaaggaggccgcggatatggaccgttttgtggagtttcaggacgtatgtaaatattatcagatgggcagccagcggattgccgccgccgaccacgtgagtttcgagatcgccagaggggaattcaccatcatcgtcggccccagcggcgctggcaaaaccaccgtgctcaacatgcttggcggtatggatgcctgcgacgaggggacgatccgtctcgacggaaacgaaatcagccgctacagccgcaagcagctcaccgaataccgccgatacgacgtggggttcgtcttccagttctacaatctggtccaaaacctgaccgcgctggagaacgtggagctggcctccgaaatctgccgggagcatctggacgcccgtgaaacgctgcgggaggtggggctagaagagcggatgggcaatttccccgctcagctttcgggcggggaacagcagcgggtggccatcgcccgggccctggctaaaaaccccaagatcctgctgtgtgacgagccgaccggcgccctggattacaaaaccggcaaaagtgtgctgaagctgctgcaggacacctgccgccataccggccggaccgtcatcgtcatcacccacaaccaggccctcaccgccatggccgaccgcgtgatccggatcaagtccggtaccgtcctgtcctcgcaggtcaacccgcatcccaccccggtggaagagatcgagtggtaacgcctgccggccatgggcggaacaacgggttgcgaagcgggggttcccccccgcagggaaggacgggacaggacacgtgaagaaatcgtatcgtaaactgattatccgggaggtaacccattccctc

SEQ ID NO: 1140 - DNA, 3275 bp, Unknown
  16S sequences of unknown bacteria
cggttatgctcaggtagtgcctatggaggacatcaatctgcacttcaccggagatttccatgccatcggcgcggccaataacctgctggcggccatgttggacaaccatattcagcagggcaatgctctggggattgatgtgaaaaagattgcctggaagcgttgcgtggacatgaacgaccgccagctgcgcaacattgtggacggcttgggcggccggatgcaaggcgtgccccgggaggacggctttgacatcaccgtggccagcgaggtgatggccattttctgcctggccacggatctgatggacctgaaagcgcgcctgggccgcatcatcgtggcctacacctacgacgacaagcccgtcaccgcccatgacctgcatgccgagggcgccatggcagccctgctgaaagacgcgatcaagcccaatctggtgcagacgttggagggcacgcctgccattgtccacggcggtccctttgccaacattgcccatggctgcaacagcgtggaggccactaccactgcgatgaagctcagcgattatgtagtcaccgaggccggtttcggcgcggatcttggcgcgcagaaattcctggatatcaagtgccgcctggcaggtcttaaacccgatgcctgcgtcattgtggccaccgtgcgcgccctcaagcaccacggcggcgtggccaaggctgacctgaatcaggaaaacctggaagcgctgaaaaaaggcctgcccaaccttctcaaacatgtggagaacatcacaagggtttatggtttgcctgctgtggtggctatcaataagttctataccgatacagatgctgaactgaacatgattgccgaagcctgcaaggaatatggcgtcaatgtggcgctttccgatgtatggggccgcggcggcgaaggcggaaaagagctggccgccgaagtgctgcgcgtcatcgaggaagagccgaatcacttccgtttttcgtatgcggatgatttgagcctcaaagagaaaattctgtcgattgtgcgcaatatctatggcggaagcgccgtggtgtacgaaagtacggcggaaaaagaactggcgaaactggaggcgctgggctttggcaagcttccgatttgcatggccaagacgcagtactcgctgtccgacgatgcggccaaactgggcgcgcccaaggatttcactgttacagtcaaaaaagtgcgagtcagtgccggcgcaggctttgtggtagtgcagaccggcgatatcatgacgatgccgggtcttcccaaagttcctgccgccgagaaaattgatgtggatgaaaacggcgtgattacagggcttttctgattggaatccattcgggccattttcggcggagtatttgaacaacacaatcgttttttgcaaaaaggcagggctgcttctccaggcagccctgcctttttacaattattttaccgggagaaaggaaaattttttcttgacatttccggaaaatggctctatcataatgcttgaattatttagctaaaaaaatttagttaaaattttgaaataacgaaaggaagtaagaacaatggaaatcacttttgaagcagtgcgcgatgtaatcgtgaatactctgagctgcgaggcagaggagatcaagctggagaccaacctgtttgaggatatgaagattgattctctggaggcggtggaactgtctatggcgctgcaggaggcttttggcgtgggcatcagtgacgaggatctgcccaatgtcaagaccgttcagcagatcatggattacctcaccagccacaagtaagtcccatggaactggaaacgctttttcaactgatggaccgcttcagccgctcggatctgagcgcgctggagtggcgccagggcgaggacgcggtggttttgaagcgggaaatgacggcggctcctgccgccgttcctgccgtgcaggcgtcggcgccttcctcgaatgcagctccggctgaagatgacgccgagttggtaactgcgccgatggtgggaacctactatgccgctgcttcgccggacgaggccccctttgtgaaggtgggacagaaggtaaacaaaggcgatgtgctgtgcatcattgaggcgatgaaaatgatgagcgagatcaccgcgcagtatgacggcgtcgttgcagaaatcctggcggagaacggtcagactgtgggctttggcgcgccgctgctgcggctgcggagggcttaagatgctcaggcgtgtgttgatcgccaaccgcggcgaaattgccctgcgcatcctgcgggcctgccgggaaatgaatattgaaaccgtggcggtttattccgctgcggacgagaataccctggcggcgtccctggcgacccagtcgctgtgcattgggccggcccgggcggcagaaagctacttaaacagcgatgcgctgattacggcggcactggccaccgggtgcgatgcggtgcacccaggctacggatttttgtccgaaagcccggaatttgccgaacaatgtacggctgcggggctgaaattcattggacctccggcggaggtcattcgtcggatgggcagcaaagctgcggccaaagaattggcaaaacaagctggcgttcctgtggtgccgggctcggacggacctctgaaaaacattcgtcaggcgcgcgcgctggccgataaagtgggctaccccgtactgctcaaagcctctgccggaggcggaggccggggtatgcgccaggctgacagtgcggaagcgctggaagcggcctaccgcgaagctcaggccgaggcggaagcgtgctttggcgatggggaaatgtatttggaaaaactgatcgaacatccgcggcatattgagtttcaaattctggcggacgcgcatggtcacgtggtgcatctgggggagcgggaatgctctatccagcgccgtcggcaaaagctgatcgaagaggcgccgtcctgggcgctgtcggatgcgctgcgccgggaaatgggagaaaaagcagtggcggcggccagagaagcaggttatgtaggcgcgggtacggtggaatttgtgcttgcaccggacggagcctattattttatcgaaatgaacacccgcatccaggtggagcacccggtgacggaaatggtaacaggtgttgatctggtcaaggaacagcttcgtatcgctgcgggacttccgctgacctttacgcaggatgagatcacgctgcatggccatgccctggagctgtctcttatacacatcccgagcccacgagac

SEQ ID NO: 1141 - DNA, 2250 bp, Unknown
  16S sequences of unknown bacteria
agatatccttcaaagccatgaacagggcataatcctccagccaagtcctgtttttccggcagaaatcagaaaaatccgcgtcctgctcccacctgctgcgggaccaggcttttttcaaaaccaggaaccggttggcgtacaatttggcataatccacccagtcggggcgaaggccccagtccggcgctgccgcttcccccggctgcaaaagtccctgttcggtcaaaagctgcaggtcaatatagtacggattccctgcgaaagcggaaaagctctgataagggctgtccccatagctggtggggcctaagggcagcacctgccagtagcgctggcctgccgcagccaaaaaatctacaaagcggtatgcttcatgcccaaaggtgccgattccgtaatccgacggcaggcaggatacaggcagcaaaacgccggctccgcggcccaggggcttttgttttttcatgatacaaccaccgttccttccacaatcagacgctttggcaggcttttgccgcagtattttctgccattatcatactccttgcgcggcccgccgtcaaaccaaacccgcaccgcccttttacatgctgcgaaaggctcaccctttaaccgctccggccatcacaccgcggatgatgtatttctgacaggccagatagaaaatgacaatgggaatgatcgccaggatcaaagtggccatcagcgcgcccatatcgcgggaaccgtaccctccttgcaggtactgcactgcgatgggaatagtgcggtagcggctgccgatcaccagataaggcagcagatagtcattccagatccacatggcgttgagaatcgccaccgtgatggccgtgggctttaaaatgggaaacaccacgaaaaaaaaggtctgtaaaggccgacagccatctatcatagccgcctcttccacatccagcggaatggatttgatgaacccgctatataaaaacaccgacagcccggagccaaaacccagatacagcaggataatccccaacgggttgtctaaacgcaatagattcgccatcttcgacatggtaaacatcaccatttgaaacggaacgatcatgctgaaaacaaacagataataaagcgcgtttgccgtgcgggttttaatccggaccaaataccaggcggtcatggcagtgaacagtacgattgccgctaccgaaaaaacggtgataaacgccgagtagccgaaggcggaaaaaaagcctaccttctcaatcccattccagtaattgcgaagacccacaaaagtctcggaatccggcagcgcaaagggcgcatcggaaatataaaactggcccttaaaggaattcatcagcaccaaaaaaatcggggccagaaaaaaaatagccagcactaccagaaaaacagtcagtaaaacgcttttccagcctttggattcattcctcactgctccacctccctgcttctggtagccctgagctgcagagccgcaatcgccgccaccatcaggaaaaaaagcaccgccttggcctgaccgactccctcatccccgatccgtccataaaaggtgttataaatgtccagcgccagcatcgccgtttttttcataggcgcaccagcggtcagggcaaagttctggtcgaacagcttaaaggaattggtcagcgtcaaaaacgtgcagatggtaatggagggcataatcatcggaatggttacgcggcgcagcttctgccaagaggaggcgccgtctatttcagccgcctccagcacgtctgtcggcaaattctgcaggcccgcaatataaataatcatcatatagccgatcatctgccagttcatcagcaccaccaggccccaaaatccatacttaggatcgtatgtgatatccacaccggcactgagcagcagcccgttaatgatcagctgccaaatatatcccagcacaatgccgccgatgaggttcggcataaaaaatactgtccggaacaggttagtacctttcagtcccctggtcaaaagaagcgccagtccaaaggcaagcagattgaccgaaagcaccgataccgccgtgaaggccgccgtaatccaaagcgcatggaggaaatcgttgttgtcggtaaacgcgcggacgtagttctcccatcctacccactgagtattggtcacggtggtaaaattggtaaaggacagataaaggccaaacaaaaacggaatcagaaaagcgatcacaaacgccgccagtgttggcagcgcaaa

SEQ ID NO: 1142 - DNA, 11342 bp, Unknown
  16S sequences of unknown bacteria
acgtacgacggagaagacctcatcatcgacagcgccgacgccgcctgccatgaaattccctccgcgctcgcgaaagaactgcgctcttccgtctttatgctgggttccgtcatatcccgtttttcacgcgcgcgcattgcttacccgggcgggtgcgatatcgggttgaggcccatcgacctgcatttaaaaggtctgaaacgcctgggggtgcagatagacgaagagggcggctacataaattgctcgtgcgacaggatcgtcggcgcggaagttttgttggactgtcccagcgtgggggcgacggaaaacattattctggcggcagtcaagggcaagggcaccacgatcgtaaagaacgcggcgcgcgaacccgaaatttccgacttacagaattttctcaacgcgatgggggcgaaggtgtacggctgcggcacgcccacggtcgtcgtcgagggcgtttccaggctgcacggagcggaatatacgcccattccagaccgcattgaggcgggcacttttctgatagcggccgccatgtgcggcggcgagatcgaggtgtgcaacgcggatgcggagaatatcgcgtcgcttctgcataaacttcgcgaaatcagttgcaaagtatgggcaaaagatgataaaatatatataaggagcaaggataagcctctctctcccaatctcgtcgagacgcagccttatccggggtttcccacagatctgcaagcgcagatgacggcgctttcctgcgttgccgagggatccacgctcatcgtggaaaatctcttcgaaacgcggttcaagcacgtgcccgaactcatcaagatgggggcggacatcacggtacgcggacgcagcgcgttggttcgcggagtgaacaatctgcacggagcggacgtggtcgcaagcgatcttcgcggcggcgcggcgctcacgctggcggggcttgcagcggagggaaataccaccgttaccgatttaagttatatagaccgcgggtatttcgggtttgaatacaaactcagagatctcggggcgaagatcaaacgaatacatatctgatttctgattacataagaggagccacgcatgcgcagtaaaaagttagtcatcgtctacgcagtcatcctgtttctgatcgtttttctcattacgttcaattcggtatgcgccatcacgcagatcgacgcgaggttcgacgtttccagtgcggacgccaagcaaaaagcggaaaagatacaggacgaactggacgggtatctccgcaaaaatttcctgtttttcgataccgataccgtaaaggagattttcgaacggaaagaaaattcgcatttcaaggtgctttcggtggaaaagagtttccccaacaagatcaccgtgaacgtgcgggaaaaatacgagtgctacgccttttacgataagactcttcaaaaatacgccgtcaccgacgcgtcgggcgaagtgatcgtcctgaaagacgacgcttccaacaacctcagcggcaacaacgtcgcggtttcgggatttacgttacagaacgccgaggcagggcagacgctttccgttaaagagagcgagcaaaaagcgtttgcgggcgtgaaagcggcgctcgcctatttcgaaaagacgttcggcggcgtgcggacgaatatcgtttccgtcttgtatcaggcggagcgggacggcatttccgtgttctccacgcaggagggcgtagagttctattttaccaatatccaaaagtttaccgaagagatgtttgcggaagtgtttgaattgtattcctcgctttccgacggcgaaaagacgtacgggcgcatcaacgcggcggtacaggataacggaaaattgaacgttcagtacataaccaacgatatccccgcataaaattaccattattttccccgaaagaattctttcggggaatggtttttttaacgcatttttattgacaaacgcgcgcttgtattatataatagtgattatatcaaccacactttcgcacatagaaatacggagaggaaaaatgaaccgcagaagcgtagccgtgctggacgtggaatcgtccgaagttaccgtcatcatcggtgagcgcggggtgaacaacacgttcgttttcaagggcatgaaaacggaaaaatacgacggatttgccgatgcggattttttcgattcggaaaaactcagccgcgcggtttcggaggcgctccgctgcgtcgaactcagttgcaacgacaagatcaaagagatctacgtcggcgttccgggcgagtttctcaaagtggtcaccatgcggcacatgacgagttttcccaaaaaacgccgcatttctttgcaggacgtcaagaatttgtatcatgacggtttcacctgcggcgaagcggggtattctctcatcaagcagtctaacgtatattacgttacgtcggacaagcgccgcaccatcgaccctgtcggtatggtcagcgattcgctggaagggtatctgtcctattttctgtgcagcgattactacaagaatattttatcgaacattctctatcagtacggcgtaaaaaaagtttcgtttcttcccgcttctttggcggaagcaatgtatctgatcccctcggaaacgcgcgacgaatacgccattttgctggatatcggctatatgtcgatgactttttccgtggtatgcgggaacggcatcgtttaccagagcgcctgctccgtgggcggcggccatgtgaccgcgtgcatgatacgggacggggaactggaaattcctttcgacgttgcggaagcactcttgaaaaaagtcaatctttcgagtgtggacaaccccgacgcgaccatcgattataccgatcgcctgcaatcgtactctcttcctttgagcgccgtgcacgaaaaggtgaaagaggggctggatctcatatgcgaggtcatcaataagtgtctggaactttgtgataatcggaatatcgactataagccgattttattgacgggcgggggtgtgacgaatatccgcggcgcgcgcgaacatatttccaaccgactcaacaaagtggtggagatcgtggcgcccaatctgccttattacaataaggcatcgcagagttcggttttgagtcttttggatatggcgcttacggaaaagcgcgaaaaaagtttattttctaatatattttacggattcggaggttaaaatcaaccatgtttaacggtatggacaatatgtccggagttgcgagaataaaagtcatcggcgtgggcggcgcgggtaataacgccgtcaacagaatgatcgaggcgggcatacagagcgcctcgtacgtggcggtcaatacggacaagcaaattctgcttttatccaaagccgaagtgaaaattcctatcggttcggctcttacgaaaggactgggcgcgggcgccgatcccgaagtgggcagggctgccgcggaagagagcaaagaaactctcaccgaagcggtcaaagacaccgaccttctgttcattaccgcgggtatgggcggcggcacgggtacgggcgcggctcccgtcattgcgaagatcgcgcgcgatttaaaaatcctgaccatcgcggtcgttaccgagcctttcaatttcgaaggcaaaaagcgcatggacaacaccgtgaaagggttggaaaatctcaaaaaatacgtcgacacgctggtcattatccccaacgataagatcatgtgcgtcgttcctaaaaatacgcctatggtagaggctctccgcgtggcggacgagatcctcaaacagggtatccgcgggatcgccgatctgatcgtcaatcccgccctcatcaacctcgactttgccgacgtgcgcacggtcttgaaagatcaggggctcgcgcatatgggcgtgggcgtggcgaaaggcgaaaaccgtatcgtggaagccgtccgtctcgcggtcaactgcccgcttctggaaacgaccatcgagggtgcgaagggcgtcatactcaatatcgtcggaggcaacgacctcacgatggacgaggtgcagaccgcggcgactttggtacagagcgtggtggattattccgcgaatatcattttcggcgcctgtatcgacagcaatatcaacgacgaagtggaggtcaccgtgatcgccacgggcttcccgcacgtggaaaatatgtacaacatgaaagacgagcgcaaccaggcgagcaaaaatttctttgtcaaccgcgggttgcccgaaaatgcggcgcaggtgcaggaaaccgcgcagactgccgcgccgtcgtatgtgcgcacgcccatcaacaatactttccgcgggcagcagcccgacgtgtaccgccagccctatcagcagcaggcggcgcagccccagcagtttgcgcgccagccgcagccggctcccgcaccgcagcccgtacaggcgcagcctgcgccgcagtatgtccagccgcagcagccgaacgcctatgcgcagccgcagcagttcgcgcgtcagccgcagcctgcgcccgtgcagcagcccgtaacatacgcacagccgccgcagggatacgcgcctcagccgcagccgacctatgcgccgcagggcaatcccgaacccgcgatcgatcggggcggggacaataaagatctgccgactttcgtgcagagattatttaaaaagaaataaaacaaaaaaggagtcgttcgactcctttttttaattcaaataccttcgggtatttcattcagcggctggtaaactgttatgaagggtttagaaatctcgaaattttactcagcgtgggccaattcttgttcgtacgcggcaaggatagcgtttttcaactcttcgcgcgtttccgtgttcagagggtgcgcgatatccttaaattcaccgtcattagttttgcggctgggcatagcaatgaatggtccgtcagtgccttcgataactttgatgtcgtgcacgacaaagcaatcatcgatggttatggacgcgaccgctttcagtttgctgtcttcttttttcacaaacctaatgcgtacatccgaaattttcaaatttcctacctccttattagtgtaacaatattcactaaacacattttacactatattgtttgaattttcaagtaccttttgaaaaaaaattcaataaaaaataaaataagtgaaaaaattgtcagattttcggggttttcgcatatatttaatgatatggatactctgcttttggttcgattgaaacatattcactttatcggtatcggcggcatcagcatgagcgggctggctctgtatctcaaagagcgcggttataccgtgagcgggagcgacgtctcagaaaacgaacaggtctgccgacttgaaaattacggggtaaaaatttatatagggcacagggaggaaaatgtggaaggggcggaactcgtcgtgttcaattcggcgatctcgcccgacaattgcgaacttctggccgccgcgcgcaaagcggtcccgctcgtcagccgcgtggaactcttggcggagattatgcgcggctttccgtacagcatcggtgtggcgggcagtcacggcaaaaccaccgcgaccgctatgtgcatgcatgcactcttcaacagttgtgaaaatgtgacggcgcatatcggcggcgaagacgcgagattcggcaatttttacagcggcggggataagtttttcgtcaccgaggcgtgcgagttcaaaaagaattttttaaaactcgaaccttccgtcgccattcttttgaattgcgataaggaccacctcgactgttatgaggacgaagaggaactgaacgccgctttcgtcaattttgccgcgcgcgcaaagacgcgcatcgtcaatgcggacgatgccgtggcggcaagagtcccggatgcgatcaccttcgctttaaacgacagaactgcggattttgtggcggaagatctccgaagtcacgcgggaaaatatgcgtttaccgtttcggagcggggtgaaaagggcgtacggatccgcttgaacgtctatgggaaacacaatgtttacaacgccctcgcggcattcgccgtggggcgttattatcgcttcgagccccgccttttggcgcaggggttggaacagtttaccggaattctgcgccgtttcgaacggctcggaaaatttgcgggggcggagtttatcgccgattacgcccatcacccgcgcgagatcacggcggtgctcgcctcggcgcgcgaggtgtgtgcgggcaggctgttcgttgtgtttcagccgcatacctactcccgcacaaagctgttgttcgacgattttttgaaagtgctgtgcgatgtggaaaatttggtcgtttacaaaacttatgccgcccgcgagtactttgacagcgcggggagcgcctacacgttggcgcagaatcttccgaacgcgctctatgcggaatctattaaagaactgcagttttatctcaaacccgtactttcaccgggggatatggtgctttttttgggggcgggggacatttactgcgcggcaaaacttcttttaaagcaactgactgaataataaaaaagggacgcctgacggcgtccctttttagataatgatttccgagtttttcgaaaggcaggcgaacacgtaatcgataaactgttttgcgcggcggggcgagcgcccgcccttgtcgatcgcccagcgttccgcaagcgagaacaatttttcttcgtccattccgagtttgcaatcgctggcgagttggcggatgatagagagatattcccgctttcccgtagaggaaaaaagtacggtcaggccgaatcggtcggaaagggaaagttgttcttccatcgtatcgcgcgcgtgcacgctgttttcgcggtcggagaaattttctttgagaatgtgacggcggttggaggtggcgacgatcatcacgttgtccgccttttcgttcatgcttccctctaaactcgctttgagcgaggtcactttttcgtcgttttcctctaaggacaaatcgtcgatgaagatgagaaatttcaaaggaagttccgcgagcagttctttgagcgcattgatctccttgacctgttctttggggatctctaccgcgcgcagtccctcgtgcgcatacttgttgagaacggcgtgcacggttgaagattttcccgtgcccttgtcgccgtacaggagcatattggagtagggcagatttttcaggaaactgataatgttgtcttccacgagttgtttttcgtattcgtaatctttcaggtcgtagagggaaatattcgacgtgtacttgacgggcgcaagcgcgccgccggcaaacgtaaaggctttgtttcccacgaaaatcccatacccgttttggcggaaaaattctttcagtttggaaagagtgcgttttcccgaccattcgccgccgaacagaggattgttcttccctcggtaaattttcgggaatcccgcgctgagtttcgcgccgatcttcggcgggggattatcgcacgcgtcggcaatgcgctgaaaaatatccagatcatgcgaaaaggcggaaacgacgtcgggggaaagttttccctcgaacgcgcgccgcgcgaacacgttgtcgtcgaataaaattttgtctgcgagatactcggcgaaattccgctgcgaaccctgttccagcagcagggcgtatgcccgcgcataggcgcggacgtcgtcgttttccatggcgtctataaaaagtttcatggcgggatcttccgccgcgcccgtcgcgagtatcagttcttcacgctccaagttcataatgccacctcgttcttcgatcgttgatattatacatagattttccgtaaaaatcaaatcgttgccgccgaaattgtgaaataaataaaaaaaacgcccgcaacgcccgtccgatgcttgacggaaaacggcaagagttatataatatataaaaattcggaaattcattcggaggaatttggaatatgtcaaagatatactatcagtctgattgcgatctgaaagttttaaagggtaaaaccgtcgctatcatcggctacggcagccagggacacgcgcatgcgctgaacttgcacgagagcggcgtaaacgtcgtcgtcggactgtataacggcagcaaatcctgggcgaaagcggaaaaggcaggcttgaaagtcatgacggcagcggaagcggcgaaagcggcggacgtcatcatgatccttatcaatgacgaaagacaggcgaaattgtataaagagagcatcgaacccaacctgaccgagggcaaggcgctcgcgtttgcgcacggcttcaatatccatttcaaacaaatcgttccgcccgcaaacgtggacgtgttcatgatcgcgcccaagggccccggccatacggtgcgcagcgagtacgtggcaggtaaaggcgttccctgcctggtcgccattcatcaggacgcgacgggcaaggcgctcgacgtggctttggcgtatgccgcgggtatcggcggcgcgcgcgcgggcgttctggaaacgactttcaagtgcgagacggaaaccgacctcttcggcgaacaggctgttctctgcggcggcgtgaccgcgctcatgaaagcggggttcgaaacgctcgtggaagcgggttacgatcccaagaacgcgtatttcgagtgcattcacgaaatgaaactcatcgtcgacctcatctataagggcggtttctcgatgatgcgctattccatttccgacaccgctgaatacggcgattacgagaccggtaagcgtatcatcaccgaagagaccaaaaaggaaatgaagaaagtcctcgaagagatccaggacggcacgttcgcctctaaatggatcgcagagaacaacaacggcagggcgcatttcaacgccaagcgcgcgctcgaggccgaccatcaactcgaagcggtgggtaaagaactgcgtaaaatgtattcctggaacgacgaaaaagaagatatgtaacgtaaaattttcttgcgccgcccgcgaaatgatcgcgggcggtttttttgttaaatttttgcagaagatattttgcctcgcgagggaaaaagttgcgcatttttattgaaataaatcgacaaaaatgttataatatctttattatagaaatactgaaatattgcgcctttttcgcggcgccggaagggagtctgatttgaacaatttaggaagaggaagcgagaacaatcaaaacgataaggaccgcattttgacccgcgagacggtggggatggtggtcgtcctgttcgccgcgctcgcgcttttgattttaattacgagaagtctcattttcgggagcgtcggctttgccatcagttcttttttgctcggcacgttcggatactgttcgtatgccgttcttgccgcgctcttttatctcggtttcgtgctcattacgggcaaaaggatcaccgcgggcaaaaaaatgacggcgctgtgcgtactgtttttctgcctgctcgtctgtctcgtgcacaccatcaccgcggcggtgggggagatcgcctacggctcgtacggcgaatatctttccgattgctaccgcgcgggagaaaacagttttttccagacgacgggcggaggcgtgattttcggtctcgtcgtttatcccgtggtgaaactcacgacttccgtcgggggctatatcatcttttcgcttttgatggcggcgaccgcgtatttcatctacgccgcaaaatcgggcaattccgtattcgccgcgccgcgccccgcgcagaaacgccgcgagcaggcagaaacgcccgtcgaggccgccacgcgcaatacgaacggcgcgtatgatctgaattatgcgggtacggcttatgcccagcccgccgcgcccgcgttccgttcggaaccgcagccctatgccgccgcacagacggaaatccccgcggcggacgcttatccgcagtcgcccgtcgatcagtccaaacgcctcttcgcggtgggggagaccttcgatttcaagacgaaacgcgagatcaacaaggagaataagcgcgccgaggcgcagcgccgcgaacagcagcgcgcggcggaacccgtttcgccctacgcgcagagccgctctattttatatccgcaaagcgacgcgccgatagggtcgaattatacaaacaatctgatcttcgattccaattcgtatttcaacaaccccaaccgcggctcggtttcgcgcgaacagtattccaacaacttcaaagacgtttcctcgttttccgaggggcacgagcgcagcacgcgcacggaaaataccgcgaccgccgcgcccatatcttcctacgcaaatctttatgaggacggagaagacggcaatatcacctattccaataaacccaaaaagatcgttacggacaccacgcgcaatacggatacggcggtgcccgatactccctatgccgcgtacgtttcgcctgaaaaaaattattataggaacgacgtttcgtcgccgcccgccgcgacgcctcctgcggaaaattcttttccgcagttcagcgcccgccgcgatcctgcgcctgcgccgagcgaaccgcagacgcctcctcctttcgaattcggcgcacgccgcacggaagggaacgagagcatccgcacaggctttacagacagtgcgcccgaacccgaacgggaagagcccgtcaagcgcgagcgcattcataaaaaagtgatttccgagcccgaagtcgccgcgaccgaagttccccgcccggcagaggaacccgtgcgctttcagcgtcctgcgagcgatttcgaattgaacgaacagaacgacgtgcgcaagaatacggaagattctttcggctctgccgcggatattttcgacgcggacgacgacctttcggaccagccgctcgattcggtcattccgaccgcgatggaggaaacgacgcgccttcgtcccgagcggacggaggaaattccatctttggggcgttcccgcgaccgtgccgtcgaacctgtcaggcaggaaccgacggtcgaagagagcaagcccaaacacgtctatcagaaatacgtcagcccgccgctctccctgttgcgcgattacgcgcccgcggcgaacaattccgaagacgagatgcgcgaaaacatcgtcacgatcaccgaaacgctcgctcagttgaaaatttcctgcgaagtggtgggcgtgacgcaggggccgatggtcacgcgctatgacatcgatattcccgggaatattcccgcctccaaggttttgggttgcgataccgaactcgccatgcgcctgcacgcgcgcgacggcgtcaacattcagcccaattacgaaaacggctccatcagcatagaagttcccaacaagcagaagacg

SEQ ID NO: 1143 - DNA, 7663 bp, Unknown
  16S sequences of unknown bacteria
cagccgctgcgccgcttcgtgctgatcagcggcccgagctcggccggcaagacgacgttctcccggcggctgaagatccatctgcgcatcctcggcttccagccgcaggcgctgtcgatggacgattttttccgtgaccgctgcgagtatccgcgtctggcagatggctcatatgatctggagagcccgaagacgctggatctgccgctgctcagcgagaccgtaaagggactgctggccggcaaagagatgccgatcccttcttttcactttgccaaaggctgccgtgagtggaagggcagaacgatgcggctgagggaaaatgacatcctgatcatggaagggatccatgggctcaatccgctggtggcgcaggatcttgcgcaggatgagctcttccgcatctatgtcaatgccttgacacatctcaacctcgatgcgcatacgcgcatccccaccaaagattaccggctcatccgccggttggtcagagaccggcacagccgcggatgcagtgctgcagagacgctcagacgctttccccgggtgcgggaaggcgaggaacgctacatctatccttatcaggaaaacgcggatgtgatcttcaacacgtcgatgctgtatgagatgctcatcctcgcgccgcttgccagcaggctgctggcggagatcagcgagcaggatgagatgtatgatcaggcgcagcggctgctgtcgctgctgcagtatgtcgatgaggcagatggggcacatgtccccggctattccatcctggcggaattcacgggcggcagcgtgttcgaatgaatgttcaggagcgtctttcctgccacagggcatacagataggcagacaggaacaggatcaggcagtagatgacgatctgcagctgggtcggggagaagagctgaaacagcgtccatgagccaaacaggaagaacacggtggcggaaaacagccgcagggcggagtcgctgatgtgtttcatcaggaagcgtccggcggcgagcgccagcaggttggcggcgagcaggccgaggcagctgcccaggaagatcgcggcatgcgcgtcgtgctgggctgccagggtgagggcgctgatctgggtcttgtcgcccagctccgcgatgaaaaaggcggcggccacgctcagccagtctgcgtgaaaacgccgtccttccctgaccacttccggtttgggcttcagggcgctgaagccaaacagcaggaacaagacggcggccgccggccgtatcgcgtcgatcgggatgcaggcgttcagccagctgcctgcccagacagagagcagcgacagcaggacgatggacagcgtcatgcccgagatgacgttgcgcagggaataacgccgggagagcgccaggacgagaagctgggtcttatcggccatttcggccatgaagatgaggataaagctcgtcagcatcatttgagatcacctgttagagtctatgcgctgcgcctgccggatatgaaaaaaagccctgcgggctcatgatgtgatataaacggcgctttcgtgatcgagctcctccacccggaccaggatctgttcatgcagggcgctggggatgttcttcccgatataatcagcgcggatggggagttcacggtgaccgcggtcgacgagcacggcaagctggatctctctggcacggccgaagctggtgatcgcgtccatcgccgcgcggatggtgcgtcctttgaacagcacgtcatcgacgaggatgaccttgcgatcctgaaccggaatggcttcgctgcggctctgggtgcgcttgtgatcatctctccagaagctcacatcgagcgcatagaccgggatctcgacttgttcgaacgaacggatcaatgcggccagccgcctggccagatagacgccgcggctgcggatgcccaccaggatgatgttgtcgacccctttgttatgctcgatgatctcatgggtaatgcgcttcagggagcgctgtattgccagatcatccataatgagtttcttttccattcaatcaccgtatccagtataccttgttttcttggaaactgcaatttgcctttccgcaaaaaacgcgtaaaatcagcagattgtcagaattgtttcattctgatatagtaaggcgggaggcgatgaaatggatgacatcagcgagaagacgatccgggcggctgccggcctctatggcatcgtgcatgtgcgccacctctgtgagatcgttgaacattatacagggaagcggtattcccgcgcccagctgaatcagatgatggatgagcaggactggcatccgctgcgcagggaacaggggttcatctaccgcccggatgcctttgccgcattggcggaatggaacagcgtgctcgcacgggccaagggaaagccgttctggatgccgccgctgacgcagttcctgcagtatgcggacctcgatcatcttcccgtgagcgcgtccatgcaggcgctgcaggcactgttcagcacgcagatcccggaagcagaggcgaaacagctcatccgtgacatgcacggtgacctgcgtaagggcgcggcgatgtcgcaggtgatgaagcggatgatggatgccggcatccggatcgatccagcgcatatgcggcgcttcggcgacctgctcgcccagctgtgcaatgagacgcgcatgttcatgaaccacggctttacgccgcaggagctcatgaaaaggactgggtgagatcgcagggggtgatgtgcatcagcgcgatgagcgcgttgggatccatctcgatctgcacgccgatctttccgccgctgaaacagatcgtgtcaaagagcagggcgctctcttcgatgaaggtgcggtaggtcttcttcatcgccagaggagagcatcctccgcgcacatatccgctgaccttggtgatgtctttgacatggatcatctctgtatgtttgactccggccgcttttgcggcttttttcaggtccagcacggcgttcaccggcagcatgaacacaaggtattctccggtgttggcctgtgtgatcagcgtcttgaacacggcgtcgggatcctggcccagcagcctggcaacctcagcgccgtccacggcttccttgccatggggataagcgtgtacggcataggggagcgcagcgctgtccagcgcacgcatggcattggtcttgttgattttcatgtcgatcacctcgttaagcaacagtatagcataatttacattgccttgcctttcttttccgcagatgcgcgggtataataatcaaggaaaggggatgaggacatgacagtcaagatgatcgcgctcgatctggatggcacgctgctgcggaatgacaagagcatcgatcccagttcggcagaagtgctgagacgggcgcaggaacaaggcatcatcatcacgctggccagcgggagagacaagaacggatgccgcttcgtctatgagccgctaaagctggaagaggggaacaattatctggcgctggtcaacgggcagatgatctacagctttgcccggaaggaatatgagctggatgatgtgctggacaacacggatgcgcagaagatcatgaagaccgtgaaggattatgatgtggaggcgatcttctgctgcggctatgacttctatgattacatctcccggcgtcgcaaggtgggcaagaagctctcccagctggtgaatggcagatcgggcgattacgggctcgcttcgggcaaggagcaccgcaatttcattgctatcaaggacaagaatgactttacgcaggacatcaacaaggtgatcctcgtgcatacgaaacgctatttccgccgtcatctccatgagatccgcgcccagctcagcgattatgatctgctggaagtgggaccggagtggatcgagatcatgccgcgcaatgtgaacaaggccagcgcgctgcgtcatatcgccgaggaaaacggctttacgatggatgaggtgatggcgtttggcgatgcggagaatgacatcgagatgctgcgcagctgccgttacggcatcgccatgggcaatgcgatggcggcggtcaaggaagccgcttttgccatcacctccagcaatgaggaacaaggcatcgcccgcgccatccgccgctatgtgttccaggaggatcacgcatgaagatccgcgcgatcgtgtgtgatatggatggtacgctgttgaagcgaacaggcggaacagaccatatcggcgaacggaccaggcaggcgctgcttgaggcgcaggcgcagggcatccggctcatcctggcctccggacggccgcatgggcggctgatgcgctatgcgcaagagctgcatatgcctcagcacggcggctggctcatcgaagtcaacggcacggcgctttatgatctggaaagcggccggagggaggtgcttgcccagctgcatcgcgcagagatccgcgagctgtatgcccagctgatgcagatggaatgcgaagtgagcgcttatcaagatcgggggctgtggtatcatatcccgaaacggctgatcgcacccaagctcgcttaccggcaggcacacgggctgagcgaagactgtccgctgacggccggggcattcgccctggtgagcgacaaccgcagcggttatcccgaccagcatgaggcaaatggatgggaggatctgcctgaacagatgaacaagctgtgcgtggcggacagcgaagcgaggatcgcgtcggtcatggcgatgctggagaagcgattcagcggccgtttctggtggggacggaccagcgcaaactggctggagatcatgccggcgcacgtcaataaggccgaaggactgaaacaggcggcatcgcgcatgggcatcgatccctcgcagatcatggcgtttggcgacggtgaaaatgacatcggcatgctctcgctgtgcggctatggctatgcgatgggcaatgcgctggacagcgtcaagaaagtcgcgtatgatgtgtgtgaaagcaatgaagaggaaggcgtggccaggaccgtggagcggtggctgcgcggaaaggagtgctgaacgagatgaagatcattcatgaaacagaattcaacgaactgatgaagaaagaagggctggtgctggtcgatttcttcgcgacctggtgcggaccgtgcaagatgctggcgcctgtgctggaagagactgcgcaggagctgcagggaaaggtggagatcgtgaaggtcgatgtcgaccaggacgcatcgctggcgtcaaagttccgcatcatgtcggtgccgaccatgatcctgttccgcaacggggaagcgatccagaagatcagcggatttcagccgaagccgcagcttgtctctttcctgaaacagttcatctgatcatttccgcgtgctcgcacgcggtttctttttttctttcccgccgtgtcgtgagatggtatactgaatgcgaggtgttgcagatgaagatcacaggactttcaaagagcgcggtgatggaggctgcccagcgcgcatttttagggaaaagcctcgagcttgaagaaggcagtctgttcctgcgcggggtcgagccaggcgcatggcgctgcgagggcatagcggacatccagcatgtgtccacctgcatgggctatcatgaagagatcatcaacggaaaccgcacaagggtcaagacgacgatcccgctgttgttcgtgaaggaaagccgatatgcggtgatctatgagggagaacagtgctgttatgtgccgatggaagatgaaggagagatcacgttcatgccctatgcgcagtttttgacctggatcgtggaaaacacgcatcccgcagcggaagaaacggcgggatgatccggtgtggtttgcgtcttcctgtatcgtttgatataatgaaattagctagatagcgggaggataaaagaatgaaaaaactgatgaaaggcgccgtgctgggaacactggcgtccgtactgctgctgagcggctgcagcaacgaacaagctgcgccggcaaacgaagaaaagcgcgtgtgcaccgtggacaacggtggtgtggaaggtctggatatgaccgtgaccgcgaccggcaatgacgaaaagctcaatacggtcgaaatggccatttccatgaaccttcaggcgatcctggaatccagcggcaccggcgtggaattcaatatggaggacatgacggatgagctgaagacacaggtgacggaatccatgcgcgatgagatgtccaagcagatcgccgacgaactgggtcttccggaagatgcgtttactgcagatgcgtcgatcgacggcaatacgatgaacatcaacatgaccatggatgtcagcaagatgggcgatacgtatgcgaacagttcgctggatgagtttgcacagaccatcgaagacgatctgaacgccacttgtcaataagctggaaaaaggacggaaattgggaaagtttccgtcttttttcaacgaaatgggggaaaaggatgagaaggaaagataacgtccggcggttcttgctcagtgcggcgctggcggcattgtcgctgagcgcatgtgcgtctgcaccgccgcaggttgaaacgatcacgatcgatggggaagatctgatcatggacatcagtgaggaaaaagcattttcctttgactgtcagcccgcagacgcgcagcgggaagagcttgcgctgaaggcgcctgctcagcttggcgcagaactggaagatgagcggatcatcatcgatccagatgcagcaggcacatttacattatatttgcagagcgatgcggtcacgagcaatgcgatcacggtgacggtcatcgactcggcccgcatcgaagcggaaaaacaagcagaggaagaggcccggcggcgggaagaagctgaacggcaaaaggcgcaggaggcagaagcggccgcgcaagcagaggcggcacagcaggcccaacaagagcaggccgcatcgcagcgcacgcctgcatcaggcggcaatgcgcagacgttggtgcaggcatcggtgtatatcgccgcttccggaaacgggacgaagtatcacagcgatccgcattgcagccgcatgaacggcgtcatcgaaatgagcgtcgaggaagcgcaggcaatgggatatacgccttgcaagaagtgttattgatgaatgagaccggtggtgaactgccggtcttattcatatggcgatcgtatcgtctatggagaaagcaagctgagggggcttgacgcatcggcgatgatcaagcaggcagacgaggttatccgaggagatactgccggatgacaaaagaaatcctcgccaatcgaggacgcatgaatgatgatctgaggatgagtgaagaggtgtcttcccttatttcttcaagtggggatgatgatcattcatgccggccatcgagcgagatgagtttttttgtcaagtacaaaaaattacaataaagtgaaaaatattacaatcgatttaaatttataatgagataggatcctgaaaaggaaattgaacacatcgtgaagggatgctgaacagaaagctaactatataaaaatcaagtaaatcagatgaaaaagtttgaaaatgtagactaactgatttttgatagctggttttgtatggatctttgaaaatgtgaataaaaaggcatgacgaaaacaaccttggtcaaggctc

SEQ ID NO: 1144 - DNA, 18803 bp, Unknown
  16S sequences of unknown bacteria
ccgccgcgctttcgttcggttttcgtttgtttgtcagttcgggcgtgcgcttggcttcggcgcccgagcgcgaagcgcgagggtgacggtgcggcgtcagccgcgccgtcagcttcgccgccgacttgtataagccaagcgcacgccttactgccatttaataaaatttacacgttttggaggacttatgaagtacatagactggctcattcaatggctggaaaactatatccgcccgtccgtcaaagtgcggacttacgaacggtataagcttatcattgagcagcatatcaaggataaaatcggcggcatggagctgaacgatttatctccgcttgtcctgcaatcgttcattaccgggcttttgcagagcggcaatcgtaagaccggcaagggactttccgctaatagtgtcaacgctataatttccgttattcagagttctctcaaaacggcgcatctgttggggctgacgaaagaatacacggcggacaaactaaaacgcccgaaactcaaagaaaagcccgtggagtgctttaccctcgccgagcagaagcagatagagcaagcaatactgaacggaaagaaagataagctgtacggcatcattctctgtctgtacagcggcttgcgtatcggcgagcttatcgccttacaatggagtgatatagattttgttaaaggcatcctgaccgtttccaagtcctgccatgacagcaaagatgggcttgtcatagatgagccgaaaaccgccacttcccgtcgcgtgatacctctgcccaaacagctacttcctattctcaaaggtgtaaagaaaaagagcgattcgcccttcgtggtatctgcaaacggaaagtccgtttccgtccgctcctatcagcgaagttttgaattgctcttaaaaaagctgaaaatcccgcacaaaggttttcattccctgcggcatacgttcgccacccgtgcccttgaatgcggtatggatgtaaagacgctctccgaaatcctcggccacaagaacccgaccgtcacgctcagccgctatgcccactccctaatggagcataaggcggatatgatgaataggcttggaaaactcttgtgatacgtttatgaattagtgtaattaatgtcacgtttcatacactgaatatgccattcagtgtacttcttcttttttattttaacaaattcaaagaaaaaaagcaagaacttcaaagcaaatttatagaaaaaggtaagaacttcaaagcaataccagctcccatgtctaatagttgttcttatatcttctatttcatgtatttcaagtcgtaatttgtacactgaatggcataatacatgaacaaacagcctgattgggttgttcatgtatcgggcatatattattatagtataggaggactccgacttatcggagtaagaaatattcatgaaaaaatttggttttattttagctggtgtgttagcgctgactgcaactgtcggtttaacggcttgcggtggtaacggttccgatgatcctgcaatgcacagcattacatacacggaaaacgataactaccgcgtcatcgatctgtcaagcacggggcaaaccgggagcaacattttgttcgacgtggaatcggagagcgtcttttacgagatcggcgaagtcagctacaacggcacggctatcacaaagggctcattggggtaccagtttaccatgcccgacgaggacgtatcgatagagatagagttgacgcccgttacagaatacgacgaccccgacgactatctgtcctgggacagcagcgttatcgacgagatatcggtcgctagcgaagaagataaaggatacgaatacttggattgcgagcaaaaattatccctcgctttcgacatggcaaaattcggctcatataacagtaatgttgacagaaaagaaatcctttcttcgaatcaagaagtgattcccgatagcgcattggactttgaacccattgagcaatcaggtattagttacataatcggaggtaatttagtcgtagatctgaagcagatcaatcccggcacggctactatttacctgtatttagacttcaataacgccggctctgccacattgatgaggacatttaccgttaccgagtacggcgaaatcgaagttgagactgtggatgtgccattcaaagttatcaatgaatccaaatttgacagtactgacgatttggcgaatatctcaatccgcattgtagataccgactacatctacggcagcacggcgcctgaatctcaaagctttacgttagacgagcttacaaacggcgaaggcactttcaaatatgttgacgggcatacttattcgataagcgcaagccatgctatttggaatgaagaaacaggacgctatgaaaatcctacttctctgtctatcaacgattggctcggacagggtacgaccattaccggattcaatcaaatcattgatgggaaattgactttagtaagtcttcctacagaggctataaaaattacgctgaatgactgagcgatttgctcaatgtgatatattttagcaaaattatatttagtatcactggtatcgtgtcatcggtgctttacggaaatatcatacaacaggcgctcatacttactatgaacgcctgttgtttgttatgaaatttaatgtcatactagaacgcgccgtaaaggctataatatctctgtcgtatgcttgcttttcggtggtttatcgttccgcggcctattccgagttcggcacagacttcggattgcaccatgccgttcatgtagcagttcagtatggcaagttccaatggggagagctgtaatgcgcctacaagttcgtctgctttggtgtaatcggtctgttctttctcaaagcagtttaccggatccatcggcaaagccttataatccgtaaaatctatggattcaacgacagtcccgcgcctgtccggtctgttacgaagaaggttgatgaaatgatccacttcgcgataacacgcgagtttgatagagatgtctttccctttgcggtctttaccgtaaatctcattggctgtatgcccgacgaattgatacagaaagcagattgctgtttgcgccacatcgtagccgtctgatacggtatagtctatctcgttcatgtgatgcagatctttgataaggccgatatacagcctatctgcaactttcatatcgaactttttgacggtgcgaagcgcttgtaaagcgatcatctcgcccatgagtttgacgttctcatttgagataggttcagcgaacaattcgccttcgttacaatactttccgtttgagaactttgtgactaacatttccattttaacacctctgaatttgtatttgcctttttcgggcaacaggcgaaggtgcataggacggtgaatgttggtgccctgaatagcaagtctgcggaagtcaacgggacaaagccaaaatcgttgcgtacaggtcgggaaatgccccatagacagaaaaagagccgagcaaggatgcaatccttactcgggctccaattcgtttatatgggtgttttcagcgacgattttgcgaccgttgacgtccgcgaggaactatgctaccatagccgaccgaaaaagcacaaatttagaggactgaaagaagttttcattcaaagcggactatcatgccgaagaaatcgcgggcaaaaaataatacgaaccttgacttggtgtcttggttcgtattattctggtatggtgcgaaggacgggacttgaacccgtatggttgcccacacgcccctcaaacgtgcgcgtctgccagttccgccaccctcgcgcagatgacttgactattatactaaatatgcaaatgtttgtcaaccgttttttttcaaaaaaaatgcaattttacgcggtttgattttccttaagaaaaaagcagttcttcagcgttgggcggtgtatgggaagaaaaacaggcaaaaagcgtttccaagtccaccgaacaatccgatcgcatatcgctgttgctgccaaggtacatggtgcgtgcctccgcaagcatacatccgttacggttaaagcggttgtcgccgctgccgaaatacacatttaattttttacaataagccttgaaatggggtattccgaatccgtatcccatcgagcacgtcgggcaaaggataaggcttgtcccgcattgagccataaggtccaagtcgtcgcggtccagataaacgccgcctacaacggtgcacttttccagcaacccgagtttatgcaggtattgaacgggtgaaagatgaaactttacatcaataagtccagtttcgtcaaggctgtaacctgcggcggcaatgagcttggctccattacccaaaaccgcttccgaaaccgcgtccacgattttatcgtccgttaaatccataagcgcaagcgcgccgaaacaggcgtcttcgggtttattgacgcgtttaaataccgtcactccctccattccgtcaaatttttcgggatgagaagacgcaacgttaaagaacgatactccttgttttttaccgcgtaaaacgctttcggtatcgtccgaaagcaaaaaatgatttttataaacgattttactcacaattccgacgcaaattttttaaggtactgtttaaatctttcgccgaactcgggactttttagtgcaagctctacttctgcggtaacggcaccgaatttatcgcccatatcgtaacggcgcccctcgaactcataagcgtaaactccgggatcggagcacattaaattcaaagtatcggtaagctgatattctccgcctttacccacgggagttttttcgattgccgaataaacgcgcgcgtcgagaacatatcttccgaggcttgcaaatcgcgaaggaatactgtcaagcgaaggcttttccacaatactctcgcatttgtgagcccttccgtccgaagatgaaatcttggcgaccccgtatttcacgatatcgtcgccgccgaaatactgcactcccagaacaggcactccgaaacggtaatatccttccgcaagctgagccataacgggcttttcgcccacgataaggtcatctccccatgccaggcaaaacgggtcattacccgtaaaatccttagccttatatactgcgtccgcactccccaaaggtttttcctgataagcgaagctaatctgcgcgcgcgagtaaatgttttttagaatcttgacgtaatcgccttttccgttagcggcgagtttatcttcaagctctgcagacggagtaaaataattcctaattgtttctttgtttttgtttataattattaatatatcggtaataccgctgtcaacggcttcctgaacgatatagtccaatacgggcgtatcgacgataggcagaatttcttttggtacagccttggtaataggcaaaaaacgcgtacccataccgccgcatgggattacggcctttgtaattttattcataaattaacctcttaagatttacttggacaactgcgtcgttttcggattcctaaaaaatttattaagtcacgattcctgattttgtttaacgcgttgtcgccacaataaaagtattatgccgagaaaactgacggcgttacggcttgtaaataattttacggcaggtttcgcagcggcagtagcctttgtttttcaaatcgtttttactcgcgtcggcaagcatcatgccgcagccgctgcaaacgggcgaattttcatctccgagagcgggcacaaaagcgggatatttattttctgcagtaagcgatttataaacttcaagcaattcggaatccacccccgactccagtttatcgcgctccgttttaagcttctgaagctcgtcctctttggagactttaaacttttcgtaattttccttagcggcggagtaagaatcgcgcgccgacttgccacttttttgcgcacccgaatattccatcaaagccttatccgcacccgactttaactgagcggctttcttttcccactcggcaaaagccgtgcgtaacgactccagctcggaaacggcggccttttcctcctcttccgaaatattttcgttttcaagcaaagcgcaaagttcttccgccctgcgtgaatttttttcaaggtattcgtttgcaccgttgtatgcgcttataaccgtacttgcaagagtttcgctgtcactgaccttttgtttggcgatattaaactcgtttttgtactttttcatttccaggtagtcggaattgcccctgatttcgtcaagcagttttttgcaggcaaggtccgcttcctgatattttaaaagattgtcaagattcataagtcctcctgtttcttacctgagccgtagttgtacggcaggaataagtcgtatttttggtcgaaatttacttttaccgataattattgtctaaaacctggggtttatatccttcgaggattgaattatctccacgtcaagctttgcggacagcgcctcgagtttaagtatctgcacaagccgcgtgatgtaacaatgctccattgtgtaatgttgcggttctataaccgtaagaccgttttccttggcatataccgcgacgtgatgctttacgtccgccgtgataaggcaatctgcaccgcttttaagcgccatatccacgtaatcggtactgccgcccccgccgccgtttattatcgccacgcgcgaaacgtattcgtaaggctcgcctattatgcggacgtatttgtccttgaacagattttccacctggcctttgaggactgcggcatacattttgcccgaaaggttgcctactcttcccagaccctcgtggtcggaaatatacggctgcatgacggaaacgtccagaagtcccagaagctgagccgtaaaatcgtttatgcctccgcccgagaaatccaggtttgtatgcgcggcgtaaacggcaataccgcgctctatggcggcaagaatttttcttcccgtaacgtcgttatcggtaacgctttttacgggtgcgtaaatcatggggtgatgcgccactataagctgaacgcccaattcgcccgcctcgcttatgacttcttcggttgcgtcaagacagcaaagcacgcgtttaacttccgcgtccgccctgcccacaagcaatcccacgttatcgtattcgtctttaagcacgttggtttcgggcgcaacgttgtttaaaaggcttacgatatcttttactcttgccatttaagaacctccttgacgagttcgagtttgtataaattcgactgagtggttttatagcttttaagttttgccaatgcgtccagcatacacgctttaaggtcgggatttttacgcttgtagtaaacgccgtactgaagctgaacggcggaaagcggaggcgactgtccctctgctgcgcgcatgaaatcgtaaaatttgccgcggtcgaggacgcaaaagtcctcttctatcgagtaaccgttgttaattaaatactccctcagttccttttgattgtgttgtgcgcccagaattaactcgggcttatatgtaagacgcgaaagtatgccgataatcgtttgtccgcccatgccggaaataaccgcgacgtccgcctttttctcaatcttatcgaaaccgtcgcttaacctgtatgtgacgttgggataaccgcccagcaatttttttgcttttttaagcgaaccctcgcttatgtcggcggcaataacctcttttacgccgttgtcaagggcatattttgcaaccaatccgtggtcgcagccgatgtccgcaaggcaatcgcacggacgaatgagagaacataccgcgcttatccggtccatcagtctatataatccttaagttttttgcttctttgcgggtgacgcagttttctcagcgcctttgcctctatctgacggatacgctctctcgtgacgccgaattccttgcccacttcttccagggtacgcggatgtccgtcgtctatgccgtaccttaatctcagtaccatttcttcgcgcggggtaagagtatcgagaacggacaaaagctgctccttaagcatggtaaacgttgccgcgtcctgaggcgcgctgacgtttatatcctcgataaagtcacccaggtgactgtcctcctcttcgccgataggagtttcgagcgaaacggggtcaagggcgatgcgctggatttcgcgcacgcgttcttcggatattcccatttcttcgctgatttcggcgggagtagggtcgcgcccgtacttctgaaccagaagtcttgtcgtgcgcgtaagtttgtttatggtttccaccatgtgaacgggtattcttatcgtacgcgcctgatccgcaatcgcgcgggtaattgcctggcgaatccaccacgtggcataagtggaaaacctgaagccttttgtgtaatcgaatttttccacggctttcataagtccgagattgccttcctgaatcaggtcaagaaacagcatacctcttcccacatggcgctttgctatggaaaccactaatctgagatttgcttcgcttaaacgtttttttgcctcctcgtcgcccttggacattctgtgagcaagctcgagttcctcctcaacggtaagaagcggcacttttccgatgtccttaaggtaaacctttacggggtcgtcgatagacacttccgacagaatctggtcgatatcgtcgtgaacaaggtcaagcgtgttgttgattatctgaatatcgttttcggcaagaattttgaaaacctcttccatctgttcggcgttagcctcgcactcgacggcaagtttttcgcccacttcatcgtaagtaagatggccgtgggctttacccacttttataagacgctttatttcgttatcgattttttcgccgagcgacttgtactcctgcacgggcttctttacctctatacccagtcctgcgagcgcacttaaaatatcgtcaatctcgttgggatcgacgttgccggcggaaagtaaagcgttgacatcgtcgtaggtaacgataccttcgcgtttaaatttttctttaagcgattttattatttcttctaatgcctgtttatccataaattcctctatcgatcgtttttgtgctgtcgaccgtgcttttcataccttatattgtatcccttttttgtcctttcttatcattaagcactttggtatttccttataggcttgctgagtgagggacttctcagctttttaagcgccttctgttcaacctgacgcactctttcccgcgttatgttgaacattgctccgacttcttcaagcgtcttaggtctgccgtcatccaatccgtatctgagcctgatgataatctgttcgcgcggttcaagcgaggctatcgcttcgttaatcagttctttcagaatattgtcctccaccacgtcctgaggaagtcgtatcttttcatccttgagtacttccgcaaacgtggcgtcgccgtcctcgcccatagtttcgtctatcgatttttctttaagcagtaatctctgatagaaaagaatctttttttcgtccactcccatggcggaagcaagctcgtcaaccgtagcgggtctgcctgttttctgttcgatgtccaacgaacagcggcgcatacggtccagattgtcttttacgtatcccggtatatgtatgggatgcgccaggtctcctatgtaacgggttatcgcctgacgtatccaccatgtggcataagttgaaaacctgaagccttttgtgtaatcgaatttttccacggcggtgattaggcccaggttaccaagctgtatgaggtcgtcaaggtcgatttctctgccgacgtatcttttcgcaatggataccaccagccttaaatttgcttctataagcgcgttttttgcgtcgcggtcgccttccgcggccttttttgcaagttccttttcctcttcggcggtaagcaaagtcactttaccgagagccttgagataagtgcgggtgctgtcttcaccgcggtaaaaaatttcttccgcgtcggaaggctcctcgcccacgacaagcacgttgttttttgcaagttcctcataagcgttgtcaatgtcgtcgctggacgcgtcgcaataaagcacaagcgcttcgctgacttcgtccgtggtaagatacccttttttaccgcccgattttaccagaaaagcgatttcttcattaagcgttcgtttttcgggttcaatcgacgcacggtcaattttttcagtcattctctcctccgtttttcaagcttctgagcaagccgtcaagccgcgcgatttccattatgagtttaacgtttttggtttcgtcgtactctttggcaagccgcgtcttttccgccgataagtatttcattttcaagcgagtcagacacatttcgtatttagccctgtcgtcgccctccagaaagttataatccgcgacttccgcgactcttgccgaatcctctatgctgtaaagcatggaaaccgacggcttttcgccttttttgtgcttttccacggcgtaaccgtaaatccgtctgtccgtgtccgaatcgagataggtgtacacgtcctcggaaaaatcgacgtaaggcattccgtgcgcgatgctggcaatgacgaaaagttccgctttgtcgcgttttgtttcaggttttgcttctttaccttcgtcaataacaggcgcatttttttcgccgggttcgtcctcgcttattaaatctgcctgctttctgagcgcgtcgaacgagtaccccgtagtatcgtgaactatggaaagatattcttcccgctcgacgggattgggcaaagattttatgacttttaccgcctcgatggcgtaggcggattttccgtcgggagagccgatgtcgaatctctttttaagactgttgagtttgaaagcgggcaaaggctccgcctctttaagcaatcgggcgtaagcatccctgccctgcgcttttatcagatcgtcggggtcaagcccttcgggaagcgaaacgactttcacgttaagcccagccgactgaagtatgtccaaaccgcgcaaagttgcggttttccccgccgaatcgccgtcgtaactgataaacacgttttcggaataattccttatcagctttgcctgagaaaaagtcagcgccgttcccatagaagcaacagccgtgtcaaaacccgctttatgcagcgcaacgacgtccatgtaaccttcggtcacgatgacgtaatcgattttttcgcgctgtttctttttcttgagaagattaatcgcgtacagcgttttggatttatcgaaaatcggcgtgtttgaagagttgcggtatttgacgggaatatgggacgaagggtctataagccgcccgccgaaagcgaccacctcgccgaaattgttgattatgggaatcataagcctgttgtaaaacacgtcgtaccagtctgcgccgcgctgctccacaagtcccgcttccttcatttcggcacgcgtgtaaccttttgaaagaagataagtaattatttcctccccgtcaaagcttgccccgaaaccgaaccttgtaacgagattccccgtaataccgcgcgcttcaaggtaatcacgggcgttttttccgcgcggagccgacagattttcgtgatagtgtttggcggcttctctcataagcgaataaagccgttcgcgtttttcgcgagttattccttcgtggtcgccgcttttgaatttggggatttccattttcacttcgtcggcaaggatttttaccgcgtcgataaaatccacgctttccattttttcgataaacgtaatcgcgttgccgctttccttgcagccgaaacaatggtaaaactgcttgtcctcgttgacggcgaaagagggttccttttcatggtgaaacggacagcacccccaataggtcctgcccttctttttcagcggtaaatagcgggaaattatctgcaccagatttacgcgcgataaaagttgttcaatccactctctgtccaataaaaaagctccgaataaaacgtcagtatttagaccagcttttgggtacggtaatgtcctcgtaagtctttacggcaaaatggtcgctcatcatggaaatgtaatcgcacaccttttgctcaagcgtgctgtccatatccagaaactctttgggaatcttgtccttatgcgcataaaaatattcgtaaaggaacttaatcatgtccaccgccttatgctcttcggacttggcgatggaagaacggtaaactttatcaaacagaaattccctcagccccataatcgcgtctttgaagtcgtccgacggcgcgacgaaattcttgccgtaactgttgtctatcacgttgagcaccatggagtcgatgcgcttgccgtgattggtgccaaattttgccctgaacctttcgggtatgtctttttcggtaatcacgccgccgcgtattgcgtcgtcaatatcgtgatttatgtaggcgattctgtcgctccaggcgacgacgtgtccttcaagcgtagcggcattgcccttgctggtgtgattcaatatgccgtcgcgcacttcgaacgtaaggttcattccctttccgtcgtactccagcacgtctaccatacgcaaagattgctcgttatgcgcgaagtgggtaaaatagttaagagcgcgctcccccgcgtggccgtaaggagtatgcccgaggtcatggccgagactgatcgcttcggtaaggtcctcgttaagtctaagcgcgcgggaaatgcttcttgcaatctggcttacttccagcgtatgagtaagtcgggtacggtagtggtcgccttcgggcgcaagaaaaacctgcgtcttgtgctttaatcgcctgaacgctttacaatgcaatattcgatcacggtcgcgctgaaaatcggtacgcatacaactgtcttccacaggtcttgccctgcccttggattcaaaagactttgccgcgtacggggacagatattttgactctatttcataaaataccgatttataatcgcgattagatttttccaatactcatcacctattaaatagtacaagcaaattttctattttgcaagcaatttgaacatatattgcacaggaaagttatgttttttatatattttttatcgtttaactcaaaaaaagagcgatttttttcagttattcaatttttcatataaagcaacaagcgtttctgcagtttcgccgtaacttgatatgccgctttgaaccccgttggacttaagaaacaaatcgttgaaaaaggaggaaatttcgtctatcactccctcgtatttttcatagtgcgcgttggcgtttgcgtactcggctaaaatttcttcaggcagcttatttacaagttcctgatatttttcttcattcagtctgttgattaaataaaccgacgcgttcatcagtccgctgtaccttatgtaggaatccgacgaataaaggcacagcgcgtaagcaactccgttagcctcgttttcccgcgatatgcctttcgcatgcgccatttcgtgcgccattgtaaaaggcagcgtatacggcggaacgtttacgttaagatttgattcggcgtaaaacgggaaatagattcccgtaattcccagatagctcataggtacggacattgacacttttttcggtataaccttatagccgttaaaatagtcggaatttaatttgtcaaatccggcattaaactcgcctgcaaggtcgttaaattctgaagcgggaagtacgtttccgtccttatcgcgcgataaagacgacgacgtttcgacaagaagatttacaaaatactccgccgccgcataaatcttttcttcatttacctccgcgtgagttaatcccagcgcgtcaagcgaagaatatctttcgtacatcggagcatacgtcagtccgaacgccgccacgaccgcgacaaccgccgaaacaagcctgtaaagataaacgcgcacgagggcaaatcttttttttgcagtcataaccaatatcaccgcggcaagagaaattccgcccgcaatcaggaacagtgccgtaaattcgtaaaaagaaacgggtatataattggtaaaagtatttaagacaaatcctataaaccttgttacgccgcgcgcaaaaacatattccgcaagaaacggaaaatccgaaagaaagtatataatcgcggtacaaagcagcagaataagcaaatttttaagccgcgaagatttttttgcggcgaaaagactttccataattgcattataccacaaaattgtgttgacaagcggaaaaaaacacgaaaatcaacgcaaacgtaaaaattttttacggcgtaagaagttaaaaacattatacctgccgaaaataccgttgaaattatttttattcgcaatcgggctgtttcattccgcgacaattttatataaaccgatattagaaaaaaattgtaaatcgcggattaaatattgttaaaaacgcccctttgcgtcaaacaattccgcaaaagagcgtcattaaccttaaaagtcagatgcaaaacaagaagattacttcttcattgcaatatcccatgctcgcgtaatcgcagtcatgacattacctacccgataacagtcgcctacgtaatccttgactttatcggtcaacgggtcgggcacgtatcctacgcactttatgaccgtatctccctctataaccaattctttgccgtctttgtctatggcgactacgcctttgtccgttatttctttaactttggtattaagataaacgggcacctgtttcagtttaaagaaatctcttaagtacgacgaattggcaagacataatcctccgacagccataaggtcgtttttcatttccacgattacgggttttttgccgtttaagaaaagctcgtaagctatttcacagccggtaaggtttccgcctgcgattattactttttcgcccgctttcgacctgtcgttcaaatagtcaagcgcctctatcgctttatcctcaccggggattctgagcatcctggcttttgcacccgtcgcaactatcacttcgtcggcgtcaagcgcggaaacatcctttacttcggtattatagacgatattaactcccaaatcggcaagctgtttatagtaccacgacagcaaatccctgtccttttccttaaaatcaaaggatgccgcgggcacgaacactccgcccagcctatcggtcttttcgtaaaccgtgaccttatgcccgcgcaaggcaagaactcttgccgtttccatgccgccgataccgccgccgacaacggcaaaacgttttggcttttttgccttttcgatacggtattttacgctgttcatggactcgggattaaccgcacaacggcacatcgccttggtttcggcaagcgactgagtgttgggagagccctcgtatttggcaagattgaagcagccgttatggcagcatatgcacggacgtatatcttccgttttgccgtccatgagtttggttatccattcggggtccgcaaggaactggcgcgcaactcccattgcgtcaacttttccttccgcgattttttccgcggcaaaatcgggctcgtttcttcctgcaaccacgacgggaatgtctaccgctttcttgacctgctcagcctctttgtagttgcagttctgcggcatatacatcggcggatgcgaccagtaccatgcgtcgtatgtgccgttgtcgcagttaagcatatcgtaacccgcgtcctgaagatacttagccgcttttatgccttcttccatatcgcggcctacttcaacgtaatcttctccttcgcacggcaaagcccccgatctgaaaccttttgttttggaaaccaccgaatagcgcaaagatacgggataatcctcgccacaggcctttttaatggactttaatatttcaaccgcaaaacggtaacggttttcaaaacttccgccgtatcggtcggtacgtttgttgacgtatttcaacgtgaattggtcaagaaggtaaccttcatgcaccgcgtgtacttccacgccgtccacgcccgcctctttgcactttgcggcaacttttccgaatccgtcgattatgtcacggatttccttttccgtcatggcgcggctgggaaccttgtccgaccatctgttaggaaccgccgacggggccatggtcagcctgtctacgtttatgacgggtttcagaagcgtccgaagaattttattggtatatactccttcggtaagatgacttaccgcaaaagaccttccgaatcccgcggttatctgcacaaacagttttgcacccgtcttatgaagttcggtcatgaattccttaagctttttaaatttactctctccctgatacagccacttgtttcccacaagatctcttatgggcgcaattccgggcaaaatcaaaccgcaattgtttcgtgccacattcatgatgagttttgccgcctcttcgtcccaatgattaggctcggcaaatccgaataaacaagtcccgcccattgaacacatgacaatacggtttttaatttccaagtcccgtattttccacggcgtaaacaaagcctgatacttttcttccattaattatcccccttgttttttacgatttacttaacggccatcttgacgtacgactaaacaaattgaatttgaaaaaattttaagcgccctgtttgcgaccgtcgatataataattatataactttttcggctttaagtcaactacggtaaaagctgtttatgctgccggaatataaaattaaacaaaacttcgcaatgcaaaaaaaaggaataaaaaactataattttttccgtataaatttaatttcagtatcaggaaaacagagtgtttctaattcggattattatgatatgcgcattatttattaaaggttaagcaaaattacgccgcctatcattacaactatcgataaaatgcttaaaagctttaatttttctttaaacatcaccgatgacactatcgctataagcgaaagtgtcactcccgtagggtgaattatactttcaagtgcaacactttgagaacaaaaaaagaagttcatatgaatctgttgtataattaaaattgcaacaaaaaaacacaacaggagaaatcatatgaactataatcatcttaccatagaagaacgctgttgtatacgaaaatattacaacgaaggaaaaagtttcagagaaattgcaatattaattggcagaaacgtaagcacaatatccagggagatatggcgaaacaaatcatttatgaactgtaaacctgcatattatccacaaacggcacaacggaaatattcgctcaggcgcaagttttgccatagaagtatgttctggaacagagagattctggattacatagaggacaagctgaataaaacttggtcgcccgagcagatagcaaaaactccttgtgaaataaaaatgccgtcattcaagacaatatatcgctggctgtaccaaggatatttggtgaaaggcaacgtaaaagtattgagaaagaagggaaaaacgcgaaaacgacttgggaacggtggaaaatttacaactggaaaaagcacacgaaaacgagataaaagcgtatataaacgacgagaagtcggacattgggaagtagatacggtagtcagcggaattggaaaaagcaaagcgtgttttgctacgttttcggaaagaaaaacgaggttttacatagctgtatggatgcccaacagaaaagcagaaagcatggaaaaagcatcagtaaaagcgttaggagtgttgccgtctgaaatggttaaaagcataacttgcgacagaggcagcgaatttggaaattggcgcaacatagaggaaaagctgaaatgcgaggtttactttgcagatccgtattgtgcgtggcaaaaaggaacaaatgaaaacagcaacggcttactgagagagttttatccgaaagggcgcaatctctcccacgtgggagagaaaaccctgaaaaagaatctggcgttgattaacgccagacctaaaaaagtactcggttacaaagcaccggcagatttgtttgaacaggaattgcaaaaagtgttgcacttggtttgacaattcaccttggctacttcggggataagtccttcgtgcgtagcgtttgcaaagtacagtttgtatttgccgtccttatcgaccgctacattgtacgagccgtttttgatcgtgcccgaataagccgcgccgcttgtaagatcggttgccgttacgttgccgtcggttacgcccgtaacggtgcggtttcagtccgcgtcgttctatacgcccgtatccacgacggcggtaatcgccgcgtcgatatcggcagccgaagtcgagaacgagtactcggagaacttattgcccgtcgtcgtgcctctgatagccagttcgacgtctaccgcgccgatcgaagcaaggtcgattcccttaccccaactgtcggtggtcgtgtaactgcccgagtaggttttccacaacgtgccgtcgataatcatatagaacgtgttatctttacgaacgagcgtatagacgaaaccggttttgtcgaacgttttacccatccccgcctcgttatcgagcccgcacactccgctaccccagccgtacatcgaagtaccgccgttccacgtgtggaatctgaacataagaatgttcgtttccgccgagttaatctgaacgccgacctccgttctcgcatcggtcggagtgcttattttagccgacagtataaagtcgcccgtaacggcttcgccgaacagcaagccgttaggcgagttgccatt

SEQ ID NO: 1145 - DNA, 6211 bp, Unknown
  16S sequences of unknown bacteria
ggccaagcgcctgcgttcgatcgaaaacggtccggtcgtcgacgttaccgctgtggcccagggcctgtccgagaaagcagaagggagcgtaaacaatggatagcatgacgctgtttatcgcatcgcttgccgtctcgtgcatcggtgcgctcgcctcggttctgctgatcaaggccgataacgccgccaagaccgccggctgcctgatcggcgccgtcgcggccgtgctgtcgttcatcgcgggcctcgaggccgtgcttggcgacgtttcgtccctcaacacggtcttctttttcccgttcgcccgtctcgagctcttgctcaacggccttgcgggcctgatcgtggtcctcatctcaatcctcgcctttgcgggcttcatctacggtctgtcctacttcgatgagtacccgggcaaggtcgggcgcgccggtttcttcatgaacaccttcgtcgcctcgatgatgctcgtcatcaccgccgacaacgtgttctggttcctggtcgcctttgagctcatgtcccttacgagctacttccttgtcgttatcgaggagaacaagaactccattaggggcggttggctctacttcgtcatcgcgcacgtgggctttgtccttatcatggcgagcttcctgctcatgaccaacggcgtgggcggttccttcagcttcagtgatttccgtacgcatgactttggacccgccgtctcctccgcgtgcttcgtcctcgcgttcttcggatttggcgcgaaggccggtatcattccgctgcactcctggctgccccaggcgcaccccgaggcgccgtccaacgtgtccgccctcatgtccggcggcatgatcaagatcggcatcctgggaatcctcaaggtcggtctcgacctgctcgcgggttcgggcgtccagctctggtggggcctcatggtcctggtcttcggatccatctcgtcggtcctgggtgtcgtctacgccctccacgagcacgacattaagcgcctgctggcctaccactccgtcgagaacatcggcatcatcttgctcggtgtcggcgcgtccatgacggcgcacgccctgggcaacgacgtcatcgcgacgatcgcgctcatggccgccctctaccacacgctcaaccacgccatgttcaagggcgagctgttcctcggcgcgggctccctgctctatgccacgggtacgcgcaacatggagaagatgggcggcctgttccgccgtatgccggtcacggccgtctgcttcctcatctgtgcccttgccatctcggctatcccgccgctcaacggcttcgtttccgagtggttcacctaccagtccctgttcaacatctcgacgctctccgacccggtcgtcatggtgttcgccgtcgcctccgcggccgcccttgccatcaccggtgccctggccgtcacgtgcttcgtgaaggcctacggcgtctcgttcgcgagcagccctcgttcccaggaggccgcgaacgccaaggagtccccggctccgatgttgttctcgcagatgctcctcgcggccatctgcgtggtgctgggaatcggctctcccgtcatcgccccggttctgggcgacgtcgcccagagcgtgcttgccggctctgccatcacagccacctcgggcgtgtctctggtgaacgagatttccggtgccgccacctccacccccgcgatcgccatcgcgctcgtggtcctcaccggcctcgcgttcgtgttgaggtcctgcctcggcaccaaggcccccgctaagaagaccgacccttgggcgtgcggctacgagcccaacgagcacatgcccgtcgtcgccacgagcttcgcgtcagacgtagagctcttcatgggcccgctctacaccctgcgcgaggtatgcaccaagatctgctggtccatcgcgcacgtgttccagaagctcaccggtgtcgcccagggcgttgagcccctgcccgaccgcttcctggtcgatgcaccgagcgagggtgccgataagctggccggcctcgcctccaagatcgagggcggcaactactccgtatacatctgctacatcgtcgcggcgctcgtggtcttcctcgtgctcgccgtggtcatggtctagagaggggagaggatattatgaacatcgttcttgcgatagcgcagggcctcgtggtcatgctggtcgcgcccttcttctccggcctcgcccgtgtgattcgcgcgaagatgcacaatcgccgcggtccgtccatccttcaggattaccgggacctcgcgaagctcatggcgcgtcccgagtccgtgagttccgactcgagcttcgtgctgcgcatcatgccgccgctgttcctcgcggtgtcgttcatgctcgccatgggcctgcccatgttcacgctcgagagccccatgcccgtctttggtgacgccatcaccatcatgtacgcgctcgcgctgtcccgcttcttcttcgcgctgtccggcgtggattcctccaacgcctacgcgggcttcggcggtatccgcgagctcctcatgagcgtgctcatcgagccgtccatgctcatcgcgctgtttaccgtcgccatcgtgtgcggctccacggacattgcgaccatgggtcagcacatcgttacgggcaacgtctcgagcgtcgtcgccgtcatcctcgccggcgtcgccttcgcggccgcctgctatatggagctcggcaagcttccgttcgatcaggccgaagccgagcaggagctccaggagggcccgctcgccgagctctccggcccgtccctggccatgatgaagctcgccatgggcatgaagcaggtcgtggtcgtcgcttggttcacctccatcttcatcccctggggagagcccgcgaccatcggcgtcaccgctctcgtgggcgccgtcgtcttccttgtcaagtgcctggtcgatttcgttgtctgcggcgtgctcgagaactccgtttcccgttcgcgcttcaaggtgctcggtaaccagacctgggccgtcgtcggcatcgcggtcctcgcgttcgtcttcgtcgtcgtaggcgtgtagggagaagggagaaactatgtcaatcgaatcgagcttgtccctctttgccatggtggcgatcgccgtccccatgctgggctccctgctcatcgtcatgctgccgcgtccctacgctaaatggatctgcgcctttgccggcggcatcgccacggtcgcttccgttggtttggccgcgacgtttgccggaaacggcatgaacgcggtcgatgtaacctgggcgagtatgggccagaccttggtcatgggcttcatattcgaccggatgagcacgctgctcgcacccgcgttcgtcgctatcggcctgctcgtcgtcatctattcgttcccgtacatgagcgataagaataaggagcatcccgacgcgccccgtcgtcgcttctacgtgtacttctccacgttcatcggcgccatggccggtctcgcctacagctccaccatcgtcggccagctcgttttcttcgaggtcaccggtgtgtgctcctggggcctcatcagctactacatgacgcccacggccaagaaggccggtatgaaggcgctcatcatcacccatatcggcgctctgggactctacatcggcgcggccttcctgttcgccggaacccgcacgttcgcgctgagcgcgatctcccagctcgattccggtatgaagaccgtcgtgctgctgctcatcctgttcgctgcttgggccaagtccgcccagttcccgctctacatgtggctgccctccgcaatggaggcccccacgcccgtttccgcctaccttcatggcgcgtccatggttaaggtcggcgtgtgcgtgttcgcccgcgctcttgcgagcgccggcgatatccccgagatcgtcggttgggtcgccatcatcgacgccgtcgtgaccatgctcttcggcttcctcatgtacctgccccagaaggatatgaagcgcctgctcgccttctcgacgatcgcgcagctcgcctacgtgttcttcggcctgggcctctccgtgttcggaagccagatggcgtttaacggcgccgtcgagcacatcttcaaccacgcgttcaccaagaccctgttcttcctcatcgctggctctctcagcttcacgctgggaacccgtatgctgcccaagatccagggcctcatgaagaagtacccggtcacgggcgtgggccttgcggtcgcgcgcgaccctatcgccggcgtgccccccatgagcacgttcttctccaagttccagattatttccggtggcttcgcggttggtgcttccaacacggtcatcttcgtcctcgtgtgcgtcatggtcgtcgagaccgtcgccaccttcgcatggttcctgcgttggatgggtaaggtcctgcccggtgagccgagcgagaccgtggccgccggccagccccttccgcgcgccatggcgttcgtgttcgtcgtcctcatgatcatggtcgtcgtcgccggtcctctgtcctctagttggatgggttaggaggtaggacatgggttattcgttagtcaatatcctgggcggtcttctgatcgtgacctccaccatggtggtcgtctcgaagaccatcccgtccgccatcaagtggtacgcgatccagtcggttgtcctggtgggcgtgctgctcaccctgggcctcaccaccggtgccaccgagcttctcatgtgggccgcgtcggccttcgtcaccaaggtgatcctcgttccgttcattctcaaccgtgcctacaagaagatgggttcgcctgccgatagcacgctgacctcctccatcaagccggcctggaccatcatcctcaccggtctggaggtggccgtctgcttcgcggtggtcacgcgcctgagcctgcccaccgccgaggtggccactccggccctcgccatcagcttcgcgcacttcttcgtcggcctcacgtgcatcatctcccagcgcaacatcctcaagcagatcttcgggtactgccttatggagaacggtagccacgtgacgctcgctctgctcgcgcccacggcccccgagatcatcgagatcggcatcgccaccgacgccatcttcgccgtcatcatcatgtccgccgtcgtcgtgaggatttggaacgacaccaagtcgctcgactcccacgacctgaccgaattgaaggggtaggccatggatgtttcaatgctgacggtcgccctgctcgcttgtcctctcgtgttctccctgattatggctgcgctccccaagacgacgtcctacaacgtcttcgcggggctcaacaccatctccgtcgcggcgacccttgtcctttcggtcgtcaccgcgggaaccatgctctcgagcgggcagaatatcgacgctttgggcctgtggctccatctcgattcgctctcgtcgatcttcgtccttctggtaggcatcatcgggttcatcaccggcgtgtactccatctcctatatcaagatcgatatcgaggagaagaccatgccggccgagcgcaccaagcagtactacgcgttgttcagcctgttcgtcttcacgatgctgctcgcctgcctgtccaacaacatcatcctcacctgggcggcggtcgaggccactacgctgtcgaccgtgttcctcgtgggcatctacaagaacaagcaggcgctcgaggcgtcttggaagtacgcgatggtctgcaccgccggtgtggccttcggcctgttcggcacgctgctcatctacgcgaacgccgccgatatcatgcccaacgcgcatgaggccgccttcctcacctccatcatgccctacgccgaccagttcgacccgatgctcgtgcgcctcgcgttcgcgttcatcgtcatcggcttcggcaccaaggcgggcctgttccccatgcacacctggctgcccgacgcgcactcccaggctccgagcccggtctccgcgctgctctcgggcgtgctgctcaagtgcgccatgctggtgatcatccgcttctactccctgtccatcatcacggtgggcgacacctatccgcgaacgctcctgctcatcctgggcacgctgtccatcctggtggccgccctgtgcatctttaagcaggacgatatcaagcgccgcttcgcgtactcctccgtcgacaacgtcggcgtggtcgcgctgtgcctgggtatcggtggcccgctcggtatcgccgcct

SEQ ID NO: 1146 - DNA, 12430 bp, Unknown
  16S sequences of unknown bacteria
ccccgcctatcgggctgtgcgcagccgcgtaaaatgcctcacgcacatcctcgatggccggctgtgccgccggttccagacagcgcaccgattttgcgccgtcaaaagctgcctctacctgcgaagaaccgtaacccaaccaaaacttttccaaaataccgccccgctttccaaatcgattgatgctttttccggtatcgcaccggaaagagaaaacaattttttcatgatacgcttctttttttccgctgtcaatcatgctatactcttgaaaacagggcaccctctgcggcgccttttccaaaggagcgataaccatgttcaaacatctggtcttatggcagttttctcccgaagtttccccggcccgccgggaaacgctgatccgggagctggacggccggttccgcgccatggtgggacaggttgaagggctgcaaaaagcggaaatcgggcaaaatctcctaccggacagcggataccatatgatcctttacacggaattcaccaaccgggaagcgatggaagcttatcaaaaccatccgcttcacctggcggtaaaagaagaaatgaaaaataccgtctgcggccgcctggcggtggattatcaggtctaaatcccgcatcagcatacaaaaaagcgccccctttcttaacattttcttaacacgattctgcaccattctgcgttttatttttgttataatggaaccagaagcatttgatttgttccggggccgccatcctctctcgccccggaagtccgccttttttatgcggacacaggttcttatgcttgcagggaattttccccgaccatctggacataggaggggcgctgatatttgaataaaaaactcaaagaaaaaattcatgaatccttttcgtctgtcatcccgatcacattgattgtgctgctgttaagcactacggcagcgcccatgaatctggagacactgatgctctttttaaccggtgcggtgctgctggtgatcggcatgggattttttacccttggcgccgatatggcaatgatgcccattggccagcaggcgggagagcagctgacccgcaccaaaaagctttggctgattattgcctgctgttttgtagtgggtattgtcatcaccgttgccgagccggatctgcaggttttggcccggcaaaccccggccgtaccggatctcgtgctgatcctgacggtggcggtgggcgttggcctgtttctggtgctggcttttctgcgtattttgttccgctggaacctttccacgctgcttttgctgttttactcgttgatctttgtcctggccttttgggtgccggattcgtttctcgccgttgcctttgattccggcggcgtcaccaccgggccgattaccgtgccgtttattatggcgctgggtctgggacttaccgcagtgcgcagcgacaatgacgccgaggacgacagctttggcctggtcgccctgtgctctattggaccgattctgtctgtgctgattctgggacttttgtataatccggccggttctagctacacgccgctggaaatcccggttctgtcaagcaccaaggagctttttggggaatttgggcgggctatccccgattacgcacaggaggtcatgctggccctgactcctgtcctgcttttgtttttggtgttgcaggccttttttctaaagctgcgccgcagacagctcattaaaatcctgatcggccttctctacaccctgattgggctgaccttattcctcaccggcgtaaacgtgggctttatgcccgccggctactatttgggcgggcagatttcccagctttcctacaactggattttagtccctctcgctatggtgatcggcttttacattgttaaggcggagccggcggttctggtgctgaacaaacaggtggaaaatgtgaccggcggcgccatttcccaacgggcgatgatggccagtctttccatcggtatggcggtttctctggggctttccatgatccgggtgctgaccggcctttcggttctttggtttttaatcccgggctatggtcttgcgctgggtctgtctttcgttaccccccagattttcaccgctatcgcttttgattccggcggcgtggcttccggcccgatgaccgccacctttttgcttcctttcgccatgggcgcctgcgatgcagtcggcggcaatattctcaccgatgcattcggtattgtggccatggtggccatgacgccgctgattaccattcagctgctgggacttttgtaccggctgaaaactcgcgatcatcctgctctcgggacagaaaaaagcacagaggatgaaatcattgattttcactaggaggaatccgaaaatgcctgaaaataaagcagcccatttcccggtgaaatggctgattaccattgtggaccgcggccggggagaaatggcggcggaactgctgaaccaggttcataaaagcgttcatatgatcagtctgggcaaggggaccgccagttctgaaatcatggattatctgggcctggatgaaccggaaaaggatattgtcatgagcctgattccacagcctctggaaaaaaagcttttgcaggtgctgggcgatagaatggcgctttcctcccccggaaaaggaatcgcctttaccatttctttagacagtatcagcacggctgtaacccatcatgcagaccccggaaactgcatgcagacattgattcaaaaggaggccacctttgccatgccggaaaacaaatcattcgccctgatcgccgctgttattcctcacggagagtcggatcttgtagtagacgccacccgcgccgccggcgcccgggggggcaccatgatccgtgcgcgggcgctgggcgccgaagaggccagccggttttttcacatcaccatccaaccggaaaaagaggtggtctttaccattgtcccctcatccatcaaaaaggccgtcatgcagtccatctgcaaccgtatcctggaaaaaagcggcgaacacggcattgtgttctcccttccggtggatgaggcgctggggctgcgcatgccccaaacagaggatgtcaccgagggtctttccggccaggcttaatttgccatacttttgctctgcgtccgcttcgtttggataaaaaacggggcagacgctttttttctcaaaattgtgcagacaaaaccgccttttccgtctgcttgtgcagaaagagggaacaagtttgtataaaatcgctatataaaattttgtcagtttttagtacaatatggtttagtgggtgtttattccacaggaatttttgagaaggagaaaaacaatggagaaaatttttaagctgaaggaaaacggtacaaacgtaaagaccgaaatcctggccggcttgaccacgttcatgacgatggcttatatcatcgccctgaaccccaatctgctcaccggcttcgacaggggcagccagctgtggaacggcgtgttcctggctacctgcattgcctccgccattgcaatgtttgtcatggcatttctggccaacaaaccctttgccctggcgcccggcatggggcttaacagcttctttgcggttgtagttgccaacatcgtcagcctgacggggttgagctacctgcaatccttccaggcggcgctgtgcattatcctgattgaaggcattatctttttgattctttccctgctgaacatccgggaaaaaatcgtcgattgcatccccctgggcgtgcggatgggcattgcgcccggcattggcctgatgctgatgaacatcggcctgggttccaacgtgggcatctattcggcggacggcggtccgttctatgtcatgcgtgacttctttggcgccctgactccctcggtcatcaaaggcaacatgggcgatgcgtacccggaaatggtattgaccgtcgttaccatgtttgtcggcctgttcgccatctgtatcctggcaaaactcggtgtaaaaggcgccgtactgctgggtatgctgatttcctgcatcatttactgggcaggcgaagcgatcttcctgggcaacaacccgttcgcttctctggcaactgcttcctttgttccgccttttgccgacatggctgcgaccaccctgttcaaatttgatttcaaaacctttttctcgatcggctggtttacgatcatcaccctgattatcaccttctgcatgatcgatatgtttgataccatcggcacctttgtaggtaccgcttcccgcgccggtatgatggacaaaaacggcaaaatgccgaaaatgaaagaagcgctggtcgccgatgccgtgggtaccattgccggtgctgtcaccggtacttccaccgttaccactttcgtggaatccgcttccggcgttgaggctggcggccgcaccggtctgaccgcgctgaccaccggtatcctcttcctggcctgcatcttcatcgctcccattgccgcgatcattcccgctgccgctacttccgcagcgctgatctatgtcggtgttctgatgctcagcggactgaaaaatgttcatttcgacgacctgaccgaaatcgttcctgttgcgctgatgctcatttccatgccgatttccggatcgatcggccatggtattggactgggcctgattgcctacactgtcatcaaagttttcaccggcaaagccaaagatgtttcgtttgttacttacatcatttccgttctgttcttagtgaaattcttcctggttgtgtaagcaaaaatccgcattttccaaaagaggggccatttggcccctctttttttgtgcatatgatgaaaagcccgccaatttttaaaaaatcagcgggcttttcataacgtttcaaatgatttaccgccttttgggggaatcgccacccacctcatagcatttctgtgcccggcaaagctgttccatcattccccgcaccgctgtttctggtgaaaggatgcgcaccccctcgccaagggcaaagatccaaccgtaaaactgggggctcagcaccacgcgggtatagatttcaaaaaagccgtcctcctttggaaaaacggtgacgtctttgccgaaccggtccatcaccacgccaaccagccggttttcaaaacgcagccggaccatctcctcctcgccgccgaacatggaaaacaccttccgggaatagtccgccatatccagcttttgaaactgctcattaccctgcctgggcgcatccaacggctgtatttcggtcattttatccacccggtagtgctttaaaattcccgcctgggcatcatatcccagcatatagtaattttcatcgtcccacgctaaggcaaagggactgatgcggtactgggcgccgttatgacggaaccgccgctttttttccaccgtatattcaaaataccgaaatccgatttggcggttttggccaatggccatgtggatccgatcgatgttataatacacgctctcattcatcgccttaatccggcccgccacaaatacctgacgctgcagctgcctggcctgatgcacgctagtgaggctttccagctttttgatcagctccatggattttttgcaggtgatgaatttagacgcctgcacgctatccaccagcaattttaactccgccagctgaaaggtacggttcggcacatgatagccgctcccttttacgaactccacatccacgccgaactgacgcagctgctccatatcgtcatataaactttttcgctccgcttctatcccctgctgcgccaaaagttccgtcaggcgggccaaaggaaggaaatggtcctcatcggtctgctccagcaaaatttgcatcaagcacagcagctttctcttttgattgatcgatttcggcacggcagtttccctcctcctgttttctttattgtatcaaatcccgtggtttcccgcaatccaagccagaaaatcctccgccaaaggcagaggattttctctgtttttattcgatctctcttctcctgcggcgatgagacgccaccgcccagatgccgacaatcaacgcggtcaggataccggcacccgccaaaatcacgccgacactgatatggaacaggtcctcttccggctgcgcaggatccggctggtcgcaagggatctccggcaggctttccggcacatgctccgaggaggatgaggaagtctccaagggcagggagctttcgacaggcggaaccgaagaagcactgggctgcacggccggcaaagatggcgccggtttggataaaccctcgttatggtgtccgttgggctctgcataaagcttttccaactggtacagcgaatcataactcaagccgttgtccggctgcgcttttcctgccgggatcagaaaggttttaccgccattccagtggatttttaacgccacgcccggatgattccgcaaagcggacatgacccgccaattcatatcggtaaaatcgcccgcgtctaccgtgatggtatcaccgctttgggcacgcttgatctggtttgccacactctcccaaaaagcgtcctgcttttcttcaaagctctgcggttcatccggctcctgctccccggcgccgccagacttttcccagccaatggcataaggcgaaaaacggcgcagatgcaaaatcaactccccgctatgaacctccaggtattccccatccctgttttccaaagccgtgagcgattgcagttttccgccgtgcaaccggtaagcaatccaatctttctttccctgcaaagacgatggtatcgggatatggatttcgactgactccggcaggcagttcacctgcgcggcggtcgcctttttgttttcgacagtctgtttctgcaccgaaatatcaaacagcaactcctggcggaacgttcttttggatttcaggcggtctgtcagggccttgcagtccaaacaggcggtctcttcgcccttcactgtcattgtcagaataacagaaccgccactggccgccgcagccagatctttctgcgtcacaccggcggctgagtctgcgttttctcctaccagatccggggagaacatgctgtccagcccgccgacgatccattccgtgtcggtcagaacctggaccacgctgctggtattgctctgcggcagcaccacatcccagcgttttgtctgatccgtgagacataccatgctggtcatggtcagcgacccatctgccagggaaacgaccatctggtacaaccccggcgaaatggtttcgatcccatagcttccgtcgtcttgcaccaccccggccgctatcacattccttccccgcttgaacgctacctttgcacctgcggcaggtttttcaccgcgggtgacctttcctgtcaaatcataggaaaccgccggctttgcatacagctgcgcgccgtcttgccaaagggcaaagctgccgtcatcacaggcgaaggcagcctttcccgccaacgccgcctgctcactggaaaataacaccgcagcgccggagaccggaagaaagcccatctccccagtcaggcgatagcgccccacgccaatcttcgcggctgcatccaaagccccggttacggacaccggagcgcccgctgtttcgctttgttccagataaagaaggttattgtatgaaatccgtttgccggcggcgtcttccacaaaattgccccaaatcaccgccgtaccttccacctgtaccgattctgcccgttcagcggatacgccgccgcccgtatgaacagccttccccgccagcgtacctatcacggcgcggtttccgctgatggaaccgttgtccgaaacagtcaaaaccgcacggtccgacagggtgacgcccccgccggttcctgcgttctcaaagatccgggcactgccgcccagcaggatttgagaatcggccaccgcctgcacaccgcctacgcaggacatcacgctttgttcactcccggcgacggcactgttatggcagacagacgcgtttgcttccatccgcagcacacttgcgtccagataaacgccgcctgcattggccgccgcacggttatcccggaccgctgcgtctgcggtcagtaccagtgtcccttccaataccattgcaccgccggccgccggtttctccgccttttcattgtcgttgttttgcagcgccgctccggcatccaaaaccaaagtcccgctctgaaccaccgccagcggagattgggattttgccccgtcgttttgccggcgcagtacggacgtttcggcgctccaaatcgcgccgccgtccagtatgatattttttagcgttaactgtccgccggattcgaccgataccaggctgccggaataggaatctttgcgggaaacggtataagatccgccatcttttccagttaaggtcagtgccttggcagacacggcaagcggctgatccaacgcaagatcctgcgccagctcaatcactgctttgtccccggcgtcctgtacggcctgctgtaggctggtgtatggcgtcgatccaatataggctaccggcagtaccgttttgacctggacggcttttggcaaaacaggctggcctgcatctaccgcgtcgctgccgtccgcaggctgataatgcgaaaactcgcctaacaaagctgcggccaacccggtggtggagaccgcatttcccgccgtctgccccgcaccgcctgaaaaaacgccgccggtcagcttgatcgattcttcaccggacaaaacggcgagtccatttccaccggttcccgcggaggacatgccgccggtataaaatccgtcctggatttccaaattaccctggctgactgcaatggcatggccgccggccatactcccggcccctccggttgctctggctgttttacccatcagagaggaaccggcttccatctgaatcgcagcgccgccggtatggccgctgcccccggtcagcgttccgctgcgaagctccaattttgaccctacctgcaaatgtgcagcagaggcgccgttgcccttttgaggttgctgcggtgtttccgctccgccgctgccgccggttaaggccgcgccggacaggaccatcgacccgctgtttttcacagcggcctcgccgtttcccgccggcaggaccgtatccgcaggggcaccgctgccgccgtatactttcagattctctcccagtgtcagattggtcccgtcattttgaattccgatcccgctctcctgctccgccgtgcctgcggcaccctgtatgatgccgttgcagatggttacattttttgcgcgaacccaaaccgccggcgctccagccggcccggtaaccgtttttccctgcagatccagcaccgtgccatcctgtgtaatcacgatggtttccagcacattatgcgcggcaaaatacgcctgtaacagcgaaaacttttgccaatcaaccatcgcctgctgttcgggattcaatgcggcaaaggcgttttctgcctgccgcatctgctccttggcctgttcctgcttctcccggttcatggcctccacctcgtccggtgcgggcagcccgtcaatcttttcccttgccgccgttaccggacagtccccttcgtgtatctgcccgcagacagaacagggtacgtcttttgcactggcaggcaaaaacgccagcaaaaggcacgctgccaacaacaagctccaccatttctttcctttcatcatccaccctcctcgccaacagataaaaaaagcaagctttcgcaagcctgctgtgtttctttgaccgggccgggacggaacccctttatcacccggccatatccttttccggaaccgctttgcaggccgtccgcctatctccggatatccccattgccattttgccatgggcgaaagccatttattttcccagacaggaaagctcgttccccaacagattttttccttttaactgcgttgtgtccaagctttgctttccaaagcccttttatcaggaaaaccatgattcaagcagctttgttacagtttcctacaaaattcggagaaatctccgtgcttgttttccccgctgcaaagttcccgcgcccgcaccaaagagaagcccacgcttcccccctcgttgcaaagcaaaagttattccaaatcagtcaggcttttcgccacttttaaaagctttcgtttggaaagcccgttggaacggatcttggtaaaacagtcgttttcaaaaatataaatctttcgccatccttctttctccacatacagcgcccggttctcattcgcatccagatattctgttttggcatcctccgtgtcaatctggatactggcgtttccgtcaatttccatatatcgctgggaaatatacagaaccttttcgccatcccgataatcgatgagaatcgatctggggctgcttttgacctcctgcacctcaaagccctgcggcacataagaaggcagatgcacccagctgaaatccccctcccgcaggctgttctggccggcggcctccagcaggaacgacgtgtgggtgggaaactgatcaatatggattcgcctttttaatccgattccggcgtcaactgccgcaaagctcagcaataccaccgacaaaacaactgccaatctgggaatccagcgtttgcctgcgccagaaaaaccaaatcgccgtttttttttgagcggcgcagcaggcgctgtatttttctggaaaaccggcaggaagggacgtaatccggcggcagggcatctttacaggcaagcaaaagcgcatccggattctcccaatctgactggatatctgccagcgctccggataaggcctcttcaaaaaccttttcatccgcactgttcattctgcccattctccctcccgttccagcgcccggcgcagctttttgcggatgcgggaaagcttaacggaaacggttttttcgttcatcccaaacagatccgccaattccttgtaggtatacttttttaagattccgtacaccaaaagctgctgttcttgctgcgaaaagccctttataataaaaaccattctgctttgcaaatgcttcaccgaaaactgcgactacaccggatcatcctccggttcccgctcctcctctaaaatgggttccgtgaggtgcagccgcttacgcgccaaatgggtatagcataagcggcgcactgtaatcagcatgaaattttttgcttcccgatccgtcgagttctctattttggcgatgttgcggaatatacggataaacgcctcctgaacgatatcctctgcttcctcggtagactttactatggaatgggcaaaacggatcaggtccagatggtaccggttgtaaagctcttccaatttattctcctgctccgcccctgccataaaaatccctatgccttttgggatatttccgttcgttctgccgcaccgggcccggcttttttaagaaaccttgagcgtcaggcggagcctatcgctgagcatggcgataaattcgctgtttgtgggctttccgcgggaattgtggatggtatagccaaaataggagttgagcgtatccacatcccctcgatcccatgccacttcgatagcgtggcggatggcccgctccacccgtgaaggggtggttccaaatttcttggcgactgtggggtacagcaccttggtcactgcattcatgacctccgggtcttctaccgacagcaaaattgcctcccgcagataatgatagcctttgatgtgggccggaaccccgatttgatgaatcatttccgtcaccattaattccatatcctgtccaccggcacccagcggtatcgtcttgatatttttgccgttttcttccgacgcgctgcccaacagctgcacaatccgctcggccagcacctccggatcaaagggctttagaaaatagtaccgtgccccggactgcatgacctcgttttgcagcatgacgttgtcgaatccggaaagaaccataaactgcggctgcggcagatcatcctcttcccgcacccgtttcatcacgccaatcgcgtcgctgtgaggcatgaacacatcgcataaaacagcctgcggcttctgcgcaacaattgcctcatacaacgcttctccatccttcggcaccaaaacggcttctactccaaaaccttttaacaaacttgcacagggaacggcaaattcccggctttcgtctgcgattatgacctttcttgtagcttgcatgtcgatgattcctccaaaaacgtttttcccgcaacattttgtctatccaaatactatcacgttttccctggggctgacaatgaatggactgcatgaactttttccatgaagtttgtgcgctattttgatcgcttcgtcgccgtattttgcctgattttgcgcccttttccaacgtttcgacaatcgcgcggcggccaaatgtcgaaaaagcaggaatcggttctcatcgcgg

SEQ ID NO: 1147 - DNA, 8252 bp, Unknown
  16S sequences of unknown bacteria
ttagatataaaaatcgaaacaatgcaaatcaatatcacaacggctatattttctatgagattagcggaaataaatctttcgtgtctttcataaaagctataacccaaaacctttttgagagagatttccatagaactaagtctaaattccattttcacttcggatacgattatagctatatctaacagcaacactaatacacaaagagagcttataaagctaatcaatttcacgaggaaactatggctataagtgtaatcctctccgacattcgtcagcataaaatagtgtgaacctaactgttttgaatacttattggcaacatcacgaatggtactttcatcactaccatagatgatttcactgttgaatgttcctgtttcgatataacctccgttcagagctacagccccgtttgcttgataaatcacaatcggatttgtcactcttgacaagccatcaacagcttcttctctgttcgagttgagataataaaacctttctctgccagaatactctttataaataacactcagttcttctgcatttttggtaagagagccaatttcctcttttgcgatatatttgtatgactctgcatttcttccctttggcacaaagaccactatatccgccttttcatcatcctcagtaagcatctcggaaaacccttgcagcatatctttggcattatgatttacaaagatgtaattacccaaatcacctatttgactgcctatgcagattaccggatttatcgtgttatattcgttctcataaagctcgctccaaaacttactctctgccgattcctcgccatcttcgatgaaaaaatactcatcttcttcaaaagaatttccaagtgatataacaccgaaatagtaattatcataatgattttccaaaagatttgagcttgtaagtaaattgccttgaatgctgctgagatttgtagttattgtaaaaatcgtcatagcggtagcaagtactttaagaccgttcagaagataaaatataccttttttgtctgaagcgttggcaaaggcttttttaacgtcaaagcggacaaaagcaacataaggaattacggaaagaactgctccgacgcaatacactgcccaaacgagatgtttttcatacgcccccgatataaattgagaaacaagcagctttgctaagacgaataatgcagcatacgaaataatatcagtcactacggattttagagcaatcacagcagcattttcacccagagaagcccgtacaactacttccttttgtctgcgtatcacttcaactacattcagcacgatcatcaatatggcaaccaatccccaaacaatgaacatcatatcagtttcagttgattgccaaaactccggctgtgttatggaatagtcttttgctaaatcttgatatgtggcaataatatcatcttcatcaccgatatagctgaccattatttcctgtccgctgcctgtgttttttgcttcgctaaaatcttcaaattctattacagtgattccgcttatcagagccgtatatgttttttcctcaatatccatcgtgcttttaagactatcacgaacaacggcatcatcaccgtaaatataaagccttgtctgataattggaaactctctggttaaaagtcgaaaagatatgaacatcatgcttcgcggctatatcttctgcattggctaaaaatgaatccatatcgtcattagcagttgtgtatctggatgataagtaataagcaccattaaaggtccacagcatattttgatatatttcagcctgcataacaaaagcaaaaattatcgtaatcaacaacaatatatttcttatatgcttcatttaaagttctcaaacctcctttgccgcagatatacttaaatcataccaaaatattttaatacctctgtaattgccttttccttttctggtgggcattgcggctgtctagttttttcagacttcgatttattgtagttctcacgctcaataataccatgtttctgcttaacttatgcgatatagagggatgatactttcaatccggtccgttccagcacacgctcttttatttgaccttatgtgacatcgttctgaaagccggacatatccataccctccagcgagaactcaacccgaatctttttttgaatcgctctctcacttggaaagcaagacaactgtctccacatgctttgtcatcggaaagttatcatacgccttcatctttactgctttatacccataatactccatatatttgatgttttcggcgagggtacgcgggttgcaggatatataaagtatttcattaatgccatagttaagtattttatctatagtcttcggcaggattcccatgcgcggcggatctacgacaatcacatcaggtttttcgttaataccgtcaagcacatcaaatacatctcctgcgatgaactcgcagttatcgagaccgttgagcttggcattttcttttgcggccataaccgcttcttccactatctcaacgccgactgctttctttgcctttgttgccagggcctgcgttattgtgcctgtaccgcaaaataagtcgaacgctacctggccgtcaaaatccggaagcatagcgagggcatccttatagagacgctcggcagcttcgacatttgtctggaaaaatgaaaaggcactcactttaaaatcaagccccattaccttttcgttataatagtcgcgtccgcgcagcacgcgcaccccatcagcattcacagcgtctgcaatattgtcgtttaatgttctcagcactccgacaggaacatttttaagcggcagcgcatatatcatatcggcatatccttgctcatcaaactcactctgcgacgatgtaacgatatttacaagaagctcgcccgtccgctcaccctttctcactatcagattgcggagcagccccttatggctcttcttatgataaaaatcatagccgcgctcattacagaaattaagagtactttttaaaacgaggttaaaatcctcatcaacaatttggcagccgtcaaccgtaattatcgacataaagttgccttttttatgcattccgagtgtcatctcaccgtcttttacaaggtcgccgaaagtatactccattttgtttctatatctgtaaatcttcggagcaccaatgatatcttcaggtacaaaaggcctttcaaggtaagtcaaatcaacccctttttcgttcataagccgcagcacttccctgcctttcagaattcgctgctcatcatatgtgagttcttgatatatacaccctccgcaaaactcattatgcacacacacaggatattcgttaatacatattctgtcttccattttttctcccattagccatttataatgtataaatttagctttttcactcacttttttaaaaaataagattattagaagcgtccgtaattatcgtaaaactctttcttataatccaaaaacctatcttcttctatcgcttctctgatttttcccatcatatttatgagaaaatacaaattatgatttgaaagcagcattgaagataacatctcatcggctttaaacagatgacgcagatacgcacgtgaataattcctgcatgtatagcagctgcactcagaatcaagcggctcccaatccctctcatactttgcattctttatattcactctgccgtgcgatgtcatcgcaagaccgtggcgtgcaattcttgtcggaagcacgcagtcgcacatatctataccgcgttcaacggcttcaaacagataatcagggctgccgacacccataagatagcgcggcctgtcagacggaagataatcaacacagtcatccataacatcgagcattacttctttcggctctcctaccgaaagaccgccgatagcatatcccggcagatccatttctacaatctgcatagcgctctcatatctcatatccttgtacataccgccttgcataatgccaaaaagcgactgattttcaatatttttatgatattccttacatcttgcaagccatcttgtcgtccgctcaaacgaatcctttacataactcctatcagcaggataaggcgcgcactcatcgaacgccatcattatatcagagccgagtgcgttttgtatttccatagacttttccggggaaatcatatgcagcgaaccgtctatatgcgagcggaaacgcacaccttcttctgtaattttgcgcagctttccgagcgaaaacacctgaaacccaccgctgtctgtaagaatagcaccattccagttcataaatttgtgaagaccgcctgcttctttcacaatctcgtgaccgggtcttaaataaagatgatatgtatttcccagtattattttcgcacccatttccgcaacttgctcaggacgcattgcttttacagtaccctgcgttcccacgggcataaataccggcgtttcgatatctccgtggggcgtatgaatgcggccgcgcctggcttttgtccgcgaatctgtctttataagttcatatgtcactgcattttttacagccatctgttttctcctctgttccttaaatttatatcattcttcctcatccgtgctctcaatcatatcgcgcagatcacttaaagcaattccatcttttacaaaaaatctccagccgtttaatcttgtttcttcattccaattatatttttccgtaagtattttgcttgccaagcctgtcactgtgtatttatcaccatcgtatttgatatggtttttttcatcaattacctcagcttctatattatcatcatataaaaacgctattttttcacctacagcaatatttaacaacttgaaagaagaattcgcacgcttcgacttgttttcagcaatctctaactctttcatttcatcacatgtaggcttatacaatttcaaactgtcaaaatctcctctcaaattagaaatgtctttaaatatcccgtatgctgtttcaggcgatattttgaaaaattcgcgctcacgaatacgaccattttcaagctgctcccttgcatgcaatgagtaatcaattctgtcaattatactatgtatatttttttcaacctcagacggattatcaacttcatataccgcatagcacctgtacgaaagcgggatattggtaggagtatttaattctttcaatcttctttctatatcattgcgttcggtcatacctattttaacccagccatcaagacatggatttgtcaatatataaactatcccttttggcatattgcctccttaatcaataaaaatgaacaaattgtattattattctataaacattgcatcgccgtaactgaaaaaccgatatttttccttaaccgccatattatatattctgagtatgtcttctcggttgtacagcgccgatatgagcataagaagagtcgatttcggcaaatggaagttcgtaattaggctgtccaccattttaaattcataaccgggatatatgaaaattccagtactgtctgcacctgctctaacttcatacactccactctcttcgttaaatactgcagcgctttcaagtgtcctggttgaagtcgtgccgacagatacgatacggcctccgtttttcttcgtctcgtttataactcttgctgtttcttcgtctatatgatattcttcaaagtgcatctgatgttcttctatgttctcacactttaccggcctgaaagtaccgatacctacatgcagtgtaacatatgcgattttcactcctttttccgcagccttttcaaggagctcgggagtaaagtgaagtcctgcggtcggtgcagcaacggagccttcttcactatcgctcgcatatacagtctgataacgctctttatcttcgcttgtactttcgcggcctatatacggcggcagcggaatacgtcctatctcttcgagtttttcggcaaacaagccttcgtatttaaattccactatacgcgtctcttcatcgccaaagccgagtacttctgcctcaaagagactgtcatcagaaaaagaaacgatatctcccggttttatgcgtttaccaggccgcaccattgtttcccacttgtctccgtcaatccgctttacaagtaaaaactcaatctttgcgccggtctccttcttaacgccgaaaagccttgctggtatcaccttggaattatttaatacaaggcaatcagaaggctttaaataatctatgatatcgtaaaaatgtttgtgttccgtttctcccgtagctctatgtacaacgagaagccgcgaagcatctctcttgtccgccggatgctgagctattagttcttccggcagctcgtaatcaaaatcgttaatattcaagttcttttctaccacctttttactatttatttaaagcttccgatcattttgcattcgtgacctgctttcttactattcaattacttaatttctatatcggtataataatagtgcagaatttcgtcatatgtaaaaccctgttttgccatttctatagcactgtcctgcggcatacctataccgtgtccgtatcccaaaccggtaaatgtgaccggactttttgtaacatattcaacactgccgctttgacctatatcgctgcttgccgataaaattcctgctgcacttaaagctgcacttttatctattgcatatatattttcaagcgttctcttttcaatctctccgtcagctcctattaccgacacggaattcttcgctgaaagcgatagccttgctccgtcttttcctataacattcacggatgacatagctattttttgtgctcccgtttctgccgtaccctgacttgcgtctgaacttcctgtattatattctgtaaatgaaaaatgcgtggattttataacgcttgcgtcaaataaagtccttattttttccttagaaatactcacctctccgccagtgccaataaatttaagcgtatcaactgcacccgactcgtttcgtgagacgatttctatacgcataatatcaccaatactgttccccgcactttcaagcttcgattctatatcatcaaaagaaaatgtcgctgtccattgatattcaggactatactcatcttttaccgctttaagataatcagcctcgctgccccatacgtcgtttatattctgcgtatagccgccgctgttcttaaaataataagcagaaacaactttgccgcctgaataaatacaaagccctgctgtatcatctacagccgcattagtctcttcatactcgtctgcatatcccttatatacctgacaatgcgtagttgcgcacacatcaaatccgtactgcgaatgacgatttaaatttgtaacggcaaagcttcgggctgccacggcctgcgccttcaaagcttcttccggataatcatgatgcatttcagcgttgagaacgccgtatacatactcgtcaatttcaatcacatttatcatatttatacttcccgtgctatttatggaaaacataataccgccgcggtactctttgccatccgctgtaatgactcctccatcgtcaaaatccatcgcagcaattacatagcgctcaaaatcctgctgcactatattaccgtcatctccaaagagatttacacttccattttcacataccgcatttaaattcgtataagcagctaccggcatagtcggcacaaactggccatcctcatatacgcccatataaaacccgctatccgacgaaagcgtatacgacatagccgcgctgcttccgtatttgaggcctactcgtatgctgtccgcaaatgaataaagcggaaacaaaagcagtatcgttaacataattgttattattgtcttcctcataaaatttcaccttgctataaatctgtttttatatcaatctctatttgctctgtatgcgctgaagaggatttgagatcagagctcgaaacaaagttttcttctttatccgcttttgctctgttatctgtaagcccgagatgcctgtatgccttttccgatactactcttcccttctgcgttctgtgcagaaatcccgcctgtatcagataaggctcatacgcatcctctattgtaactctttcttctcctatcgaagccgctatagtgtcgattccgacaggcccgccgttaaaacggtctattataatatgtagtatctcgcggtcaagattttccagtccgtattcgtcaacacccatagaatcaagcgccat

SEQ ID NO: 1148 - DNA, 20838 bp, Unknown
  16S sequences of unknown bacteria
attgtcgttgtgggcggcggccgtgcggatgacgcagtcggcgccctctacgagcgcgcccgcgttgccctcgtcgaggagcgtgctcacgggctcgacggcgacgagggggtttaccgccagcacgcgtgcggcggccgtctgcgccttgtcctgcccgagcgttgcctgcgtggcgagtatctgccggttgaggttgctttcctcgaacgcgtcgccgtcgatggcgcgcaggtgccccacgcccaggcgcgcgagctcctcgatacaatagccgcccagtccgccgcagcccacgaccacgacgtgcttgccggccagggcagcgcactcgtcttcggagagcgagtacaggtttctgttgtagcgggcgggtacggacatggctcctccttaacgtgcgcggggcgtgacagccgcgccgccatgccccgcgcttgctcgtctcgtgccgttggccttcgcgtcctctcacgagaggcggtaggcgggcatcatctcgtcggcgatcagcttcttgcggcactcgtcgcacagcgtcggcacctcgtcgaggcctgcgcgcttggcggcgtgcgccaccgattccggcgtgcccatgacggccccgcacctctcgcacttgaggagctcgaacatgcggttccagatcgtgcgcgcatcggctgtctgcgtgtagggtatcgcttcggtggggcagacgttcgcgcagctcaggcagcccacgcacgaagacgacgggtcgccgtagggggtgttgaccatcttgtcgacgccgcggttgacggtcgagatggcgctcgtccccaggctgtcgcatgcctgcacgcacagcccgcacaacacgcacttctcgccgtcgagcgtgatgaggcgctcgagcccctcgtttcccatcgcctgcgagagaaacgtcacgcgctgcgcctcgggggcgcgggcggccagcaggcccagcacgacggagcgctcctctttgatgcgctcggagttggtgcgcacctcgcactcctgctcgacggggtacacgcagcttgtcacgaccttcgcgcggccgcgtgtctccacctcgacgatgcagacgcggcagcaggcacggtgctcgggaaacgcgtccgagcggcacagcaccgggatggggatgccgttgcgcttggccacgtcccacaggtactcgcccctctcgcaggtgcagtccttcccgtcgatggttatatgcaaaagctcgctcatgccggcctcctctgcgtcatgaccgcgccgaacttgcaggcctcacggcagctgccgcaggcgatgcagtcccaaggcttcttgcccttttctacgccgccgcaggcgatgcacttggtcgggtcgatggaatgcggctcggtggaggagccgttgacggcgcctgcggggcacgcgcgctggcatgcgccgcagtcggtgcacttctcggatgcgatggcgaactgcgtcatcttggggcacacgcctgcagggcattccctgttggcgatgtgcgcctcgtactcgtcgcggaagaacttgatcgtggtgagcacggggttgggggctgtgcgccccagcgcgcacagcgaggcgtcctgcatcgtgtgtccgatgcgctcgagcagctcgatgtcgccttcctggccgcgtccctcgcagatgtcggtgaggatgacgcgcatctggcgcagcccctcgcggcacggcgtgcacttgccgcagctttcctcgcacaggaagttcacgtagtagcgcgcgacgtcgaccatgcagcttcggtcgtccatgacgatcatgccgcccgagcccatcatggcgccgtacttcttgagcgtgtcgaagtcgacgggcaggtcgagcagcgactcggggatgcagccgccggaaggaccgccggtctggatggccttgaaggggcggttgttcatcatgccgccgccgatgtcgtagatgagggtgcgcagcgtcgtgcccatggggacctctaccaggccggtgtgcttgaccttgcccaccatcgcgaacaccttcgtgcccttggaggtctcggtgcccagctgggcgtacgcgtcgccgccctcgcgcaggatgtaggggacggacgcgagcgtctcgacgttgttgagcacggtgggctggtcgaacaggccgcgctggacgctgcggatgtacttggcgcgcggctcgccgacgcggccctcgatcgaggccatgagcgcggtggactcgccgcagacaaacgcgccgccgccgcgcacgatggaaagtgtgagcctgtggtcggtgcccatgatgtgctcgcccaagatgccggccgccatcgcgtcgtcgatggcgcgctggatgtgctcgcgcgccgccgcgtactcgtcgcggatgtagaggatgccctcttccgccccgatggcgagcgcgccgatgatcatgccctcgatgacggcatgcggacagccctccatggtggagccgtccatgaatgcgccggggtcgccctcgtcgccgttgcagacgatgtacttggggaagttgtcgtagccggcggccgtgcgccacttgcgccccgtgggaaagcccgcgccgcccttgccgcgcaggccggacttctcgacttcggcgatgatttcgtccggcgtcatggcaagtgcgcgctcgaggcccttgtagccgccgcgtgcacggtaggcgtcgaggtcgagcgggtcgatgatgccgacgtcggccaggacgatcttgtgctgcatggcgtagaaggggttgtcggccatgtgctcgtagaacttgcggtcctggttgtagagcaggcgcttgaccggctcgccgtcgagcgaggcgacgatggcgggcgcgtctttgaccgagacgtggtagtacatgaggtcgcacggcatgaggcgcacgatcggcccgcgttcgcattcgcccgagcagcccgtgcgcacggtgcgcaccttcgcgtgcttgccggccttcgcgagctctgcctcgatggcatctgccacctcgaaggcgccattggcaacgcagctcgtgccgcagcacacgaggatctcttcgacgtttctagtcattgccgctcctctcgccgtcagcgtacagtgcgacaatctttttcacctgctcgacgcgcagcttgttgtggtagttgccgtccacgaccatgacgggcgcgagcgcgcacgagcccaggcagttcacgaactcgacggagaacttcccgtcttcggtcgtctggcccgggtcgatgcccagctcgtttttgagctgcgtcgcgaggctcatcgagccgcgcaggtggcaggcggtgccgttgcagatcttgatgatgtgctcgcctttcggggtgagcgagagcgccttgtagaacgtcgccatggagtagagctgcgactcggggcagccgagccgtgcggcgagcgccttgaaggcgggctgtggtatgtagttgaacgcatgctgcacgtcctgcagcaccgccagcgcatagcggcggttcgcagggtacgcggcgatgatctcctcgattttcgaggcttgctcttctggggtcatagatgcctctcatcctccggcgacgagcggggtgacggcgacgtaatcttgctcggagagcttggtgcgcacgccttcgagatgctcgatgtggcggccgttcaccatgatgatgacgtcgtcccccctgtcgtcgccggcatcgttgagcacgagcccacgaaacgccggccagcggtctgcgagctctctcatgagccccagcacgtcgtctggggcgggaatatcgcaggtcttgcagccggttatctggcggtaggttgcgaagaacttgacgagcatgccgggtgtcctcctttcacggtgcatgagaaacgcgcgcggccggcgcctctttcttgcgggcgccggccaatgcgcgtcgcttgggcctagaagccgagctgctggagcttttcgggggtcggcacgccgtcggcggtccacccgcgctcctcgtagtactcggcgagcatggtctgcagctcgttgaccttgccctttgccgggccgctcgggagcgcctcgcgcagcaggcgcggcgggagcgtgtccgcctcgatgccggcggccatgttgtagcgtttctcgaggttccagatgcgctcgcccttgagcaggatctcctcatcggactcgtcgctgcccacggcctcgcggtattggccggcaatctcgggcagcccgatggcaaaggtcgtgaacaggcagatgcccaccgagtcgcacagcgccgtgaggtcctggaacgtcttgagcatgccggccttgccctcggtgacgagcgggtccatcttgacgggcaggcccagcacctccggggagatcatgtagccgcgcacgtggcagccgccgcggttggacgtcgcgtactcgaggccgatgccctggatggcgcggccgtcgtaggcgggcatctcctgcttcttcacgctcatggagagctcggggtgcccgtagtgatctgccaggcggtaggagccctggccgatcatcttgccaaagccctcgccgtcggcgcacatctgggtgagcttgaccatcgcgtcggcatctccgaagcgcaaggggaacccgatgtcttcctcggggatggcgcccatctcgaagagctccattgcgcaggcgacggtcgagccgagcgaaatcgggtccatgccctgctcgttgcagatgaagttgcacttgacgatggcgcccaggtcggtgacgccgcaggcggcgccgtagctccagccggcctcgtactcggggccctcgcccaggccgtcgaggttcccgcgcccctcgatcttggtgacgcgcccgcaggcgatcgagcagccgaagcagccctggttcttgaccaggtaggtctgcgcgagacgctcgccgctggtgtcgtcggccttatcccagaacgagccgtcgcggccgttgtgcagcggcaggccgcccacctcgttgacgatgttcacgaggatctgcgtgccgagcgcgcccaggccgttgcccgtgaccggatggctctgcagcgtcgcgcgggccttggtgacctccatcatgaattccttggggtgtgccaccttcacaccgcccgtgccgcgcacgacgacggccttgaggttcttgctgcccatgacggcgcccatgccgccgcgtccggctgcgcggttcttgtcgttcatgatgccggcgtacagcatcccgcgctcgcccggggtgccgatggtcgccacgcgcacgctgccgtgcttttcgacgagcgcgtcggtggtgtagtggacgtctttgccccacagctcgcttgcgtcgagcaactcgacgagctcgtcgtcgatgtgcaggtagacgggatggtcggccttgccctcgaagatgatgccgtcatagcctgcaaacttgagctcggggccaaagtggccgccggagttggacgcatcgatcgtgccggtcaaagggcccttcgagatgacgtcgtagcgtccgcccgagcatgccgcggtgccggtcagagggccggtcatgaagatgatcttgttctcgggggagagagggtcgatgttggggtcgacctcgtcgcagtagtacttggtgcccaggccgcgggcgcccacgtaatcgttggcgctttgcatgtcgagcggctctttgcggatggtgccgtcggtcaagttgacgcggatgagcgtgcccatccagccttttccagcgctgatcattatgcctgcacctcctcgagcgttgccttcatcttgtctgccgccagctgctttttgtcgggggcctcgttcgggtcgacgacgctgatcgcaccagacgggcagtaggtcgcgcaccacgtctcgccatcgcacatgtcgcatttgtggatggtgcgcttcgcgggggagtacgagacgttgcccagggggcacgcgctgacgcacatcttgcatacgatgcacttgttcgcatcgtgcgtgatgacgccatttgcgtcgcgcgtgagcgctccggtggggcaggtcgccgcgcatgcagcctcatcgcattgcatgcacatgatggggacggtgatggatgcctgctcgtactggaagaccgtcacgttggacagcctcgggttgaactcctcgaagtgccgaaacgagcacacgagctcgcaggtgcggcagttcttgcacttcttggggtccacgactaattgctttgccattgtgtctccttcccatcggggcactgctctatgaccattcaagcagctggggtgcgcgcgtgcggagcatgtcggttcagtggcgacgaatctgggctattctgcctaagagcgaatgccaaaatgggcagatactccgccggttttttgcccagtgcgcgtggccatgtgccgcaggcgtgcctagagggggacgacatgaggacgttcgattatcgcaacctgcccaaagacctgttccaccgcgccgcgggcgatctcaacgtgcgcgtgtacgaggaccgcggaaagctcgcgcagctcgagagcttccatcccgaggtgctcgagaagctgcgcgagaaagcgctgctcgacggcgtcgtggcatccgctcgcatcgagggccttgcccccgatgtccaggcggtacgcgcggcggtgcgggacaacgcgtacggggacgacgagatggcccagcatgtgggctatgcgcgcgctctcaaggtcatcgacgagcatgcggcagagctcgagctttcgagtggaaccgtcatcgacctgtacgagcagctctactgcaaccgcgtcttcggcgcgaggagccgctatcgcacgagcgactacgcgcaggtcatggtcgacgggcaccgcgagagggtgctcgtgagccccgtgcatgccttcgaaagcccgctcgtcttgggcgccgcatgcgacagcctggcagatgccttcaacgcgaacacttgcagccccgtcatcctcacggcggtgttcgcggtcgacatgctgtgcatccggccgttcgacacgggcaacgggcgcgtgtcgcgcctgttctccaatttgctgctgcgcaaggcaggctttggcatcgcgcgctactcgagcgtcgacgcggtcatcgagaggcactccgacgaatactaccgtgcgctcaactcctgcgcggagggctgggatcgcggccgcaacgactacacgccctacgtgctgttcttcttggaagcggttcacgaggcccaccagcgtctcttcgacgaagtcgagctgctctgcggcgcgggggcgagcaagaccgaccgcgtgcgcctgtttgtcgcgcgttcgggcgctcccgtcacgaagcggcagattctcgaggcgcatcctgatataagtgtctcggctgtggaaaacgccctcggggcgctcgtcaaagagcacgcagtcgaaaagcggggcgcggggcgctccaccgcgtatgtttgggtgggcgcaaagctctagcccgagggattcggctcggaaggtttatcagcatatatgaatatcgccgcattcgtctccgcatttggcgcggggctgctgtcatttttctctccctgcatcctgccgctgctgcctgtctacgtgggcatacttaccaccggcgccgatgacgagcagctggggcttgcccggcgctgcgccaatacggtggccttcgtgctcggcatctgcctcgtgttcgtcgcgctcggggtgggggcgagcgcgctcggctcggtgttcaacaacccgtatgtgaccatcgcgctcggcatcgtcgtgttcgcgttcgggctcgtgctagccggcttcgtgaggattccgctgcttcagcgcgactcgcgcaaggggctgcgccgcgtcaaggtgagaggcgtcgcgagcgcgtttctcctgggactcgcgttctcgtttgggtggacgccgtgcgtcggtcccgtcttgggctccatactcgcgcttgcggcaggcgggggcaacgtcgccgcgggggcggggctgctgctcgtctacgcgcttggcctgtgcatcccgtttctcgtcatcacgctcgcggcaaacctcctgctggcgcgcctgtcgaagatccacaagtacctgcccgccatccagaaggcgggtggcgtgctcattgccatcatgggcctgtggatgatcttcacgcaggtgggtgcccttgccacgagcgcgagcgtggagcaggaagacgcgggcgcggaggtgtcggtcaccgatgcgcagggcgtcagcgcgggcgatgcggacacgggcggcatctcgtctgcctggaaaaacgtcgtgctcacggatctggacggcaccaagcaccgcatgagcgagcttgcgggcagccccgtctacttcgagttctggggcagctggtgcacgtcgtgcgtggctgacttagggcagctcaacgaggtcagcaaggagcacgagcagctgggcgacgtgaaggtcgtctccgtcgtcacgcccggcttctacggcgagcgctctgcggacgacttcgtggcatgggcgcgcgagaacggtgtcgaggtgcccgtctacatggacacgcgctgctcgcttgccaagtacatcggcgtcagcgcgttcccgacctcggtgttcgtcgacagcagcgggaacatcgcaaaagtgcgcgtcggcgccatcgaccgcgacgagctcgagggtctgctcgcggagctgtcgtaagcgcgccggagtatccccgtgccgttcgcgagatgggacggctgtgctggggataccggtggtatagtgcgcttcgcgctgacgtggggctcgattcaacttttctgcgccttcggccccgtcatgcggtggagctcttccgattctgcaatcgcccgcggccttcgacggcttcgtgcacgggcccgttccacctgcacgccatgcgccgtgtgttaccgatgtcggggtttcccggctcaggccgctgcaggcgggtgcctgcacgctttttttcgcgcgccgtttttctgcccgcgcgcttgtcccacatgatggttcgagatgcctcgccgtgcggtggtgcagctcgacgtatttgcaaagaggaagtcttatgaagaaactctcaccaaaggcgcttgccacgctcgtcgcggcagttgcgctttccgcctttgccgtgttcgcgtttgccgggtgcggccagaattccaactccggctcgtctgcctccaacgcgggcagctcgcagtctgcaggctctgacaagcagggcgataccgtcggcacggtcacgaccgacatcgacatgagcagctacggggcgggcaagtccgtgcgcgtgtgggtcccggttgcgcaggactacgagtatcagaaggtgacggacgtcgcctacgatgcgcccggtgccaagacggccgaaatcaccgaggactccgccggcaacaaggcgctctacctcgagtgggacaaggatgccaagcccgaggagcgcaaggcgaccctgagcttcaaggcagaccgcgagctcgtctcgcgccccgagctcgtggagaaagacggcgagctgccctccgacgtcgccgagtgcctgaagggctcgaggctcgtgcccgtcaacgaccaggtcaaagacgcggcgaacaagatcgtcgagggcaagacgagcgatcttgacaaggcgcgcgccatctacgattggatcgtccagaacatgacccgcgacgagagcgtcgagggctgtggccagggcgacgtgtgcgcgctgctcaccacgcagtcgggaaagtgcaccgacatcaactccgtgttcgtcggcctgtgccgtgcggtcgacatccccgcgcgcgagatgttcggcgtgcgcatgaacgcagacgacatcacgggcaaccagcactgctgggccgagttctacctcaatggcacgggctgggtctccgccgatcccgccgacgtcctgaaggccgtgctcaagggcggctggaccaaggaccagcaagagaccaaggacaaggcggagtactactggggaggcctcgactcgcagcgcgtgcagctttccgccggccgtgacatcaccttgagccccgcgcaaaacgacgaggcgctcaactactttggctacccgtacggcgaggtggacggctccgccctcgacttctacgatccggagaacttctcctaccacatctccttcaccgcggaataactgacacgaggggccgtgggtatcgtgtcattttggaacggagggacaccccggccccggctccgttcctcccgtcccctcgttgggtcacgatgggattgtgacgtgcaaagatagaccgcggacgattccgcagtgctatagtggtgcgactgcaacgcggacggaaagacgctatgtgggcctactataactatgcgatcacatcgttggtgctcatgggcatcgtcgccgtggtctactgcacgcgcttcagagtgcgcacgctgcttagcatctgcttcgtcttcaacctggctgtcagcatgctctgcgctgccctcgacatcgcagcggactacacgagcgccctgtacgggagcattcccgacttcgtgccggtcctcttcgaccagctctactttgccgtgctcatcttgcagccgtatgcgtttttcctgtacgcctacacgctttccgtcaagcgcaaacgcctcacgggcaagctgctggctgccttcacggtgccgcttgtcctcctcgaggccctttgcgcgctgacgcctgccgtgcattggctctactccatcgatgcaggcggccttcaaaacgggcctgcctacatcctcatgttcgtcgagggcattttctacatctgcgcggcgcttatcgtcatgcacgtgcagcgtgcgcatgtgctgcgcagagaacgcatcggcgtctacctgtactgcgtagtgctcacggtcggttacgcgttgggcatcttgctccccaacgtgctggtcatcgacggctgcacggccatcgccctgcttatcatgtacctctcgctgcagaatccggagttctatctcttcagctcgagcggtatgtacaaccgacacgggatgggggaggtgctctctgacgcactcatgcgcggccgtcgtgtctgcatcgtgggcttttccatcaacaacttcgacgacatgcgcgaactctacggcacggcgcagctcgaggcgtcgatcgagctgatatacgcctaccttgccgaggagtttccgcagctgatcgcctgctatctggaatcggggcgcttcgcgctcatctgcgcgagcaagacgccggtcaccgcgcaggaatcctccgaggtcgtcaagcgcctgcgcgagcgcttctcaaagccgtggatttcggaacatgccgacacgttcttcagcatccagaccgtgcagatgccggaaatgccgcagcttgcgaacggggaggcgattgtcgccgcgctgacctcggtgatgatgcgcatgcagcgcgaggcgggaacagaagacctcgtggtgaccgatgcggtgctcgaggagaacgaacgccgccgcagcatcgagacggagctcaagagcgcgttggattcgaagagcctgcaggtgtacctgcagcccatctattccacgaagcgcaagcgcgtgaccagggcagaggcgcttgcgcgcatcgtaaccgccgatgggacggtcctgccgccggccgagttcatcggcatcgccgagagcaccggcaccgttatcgagctcggcgagcaggtgttcgagcgaacctgccaggtcgtgcgcgactacgacctgccggcgcgcggcatcgagagcgtgaacgtgaacctctcgcccatccagtgcctgagtccgacgctccctgcgcgcttcgcgcaaatcgccgcacgctatggcgtgccgttgagcctgttcacgctcgagatcaccgaggaatcgttcgtcgacatcaacgtcttgcgtacgcagatggagcgcttcatcgggctgggcgcgcacttctcgctggacgactacgggacggggtactcgaacctgcaccgcatcgtccagctgccgtttgccaacatcaagatcgaccggctgttcatactcgaatacgagcagaagcgggataacctgctgcccatgatcgtccgcatgctcaagcagcagggctacagcgtgacggcggaaggcgtcgaagatgcgcggatgctcgaggttctcacgcgcctcgggagcgatttcgtgcaggggttctacttctcgtgcccggtgccgccggagcgctttgtcgcgtacgtcgatgcggagcacgcgaggctacgcgacgccgagcggcaggactgatctgcgaagaggggagctgggggtacttccatggcggataacgcgagggtctacgcgatgcggttcggcaaggtctggccgctgctggtgaacaaggcagtgcgcaaggggaggaccgaaggcgaggtctacgaggtggcatcatggctcaccggctactcgcgcgcgcagatcgacgagctcgctgcgggcgatgcgtgctatgccgagttcttcaacaacgccccggcgatgaaccccaaacgggagctcatcaccggaagcgtgtgcggcgtgcgcgtgcaggacatcgaagagccgctcatgcggcagatcaggcagctcgacaagctggtcgacgagctcgccaagggcaaacccctcgagaaaatcctgcgctcgtagccttttgtgcccctcgccgctagaacaggcaggagatgagggtcaggatggccaggccgccctgggtgaggatgatcttggggctgctcgtgatggcgccgtaggcggcgacggcgacgatgtagcccatgagcgccatgagagcgatcttgctgccaaagccaaagaccgcgatcacgaccaggaccgcgatgagcaggttgtagacgccctggttcttgaacagcacgtccacagacgggcgcttgagctcttcgacgtccatgccgaagaccttcgccgtgcgctcggacgaggttgcgatggtttccaggtagaagatgaagacgaactcgagtgccacgagcgtggcgagcaccatggtaatgacgttcatgcgagggctcctgtttctcttgtggtttcatacgtgcccaaggcggtttcaaggccatggtggttcatcatattctcgcagctcaaggcgtatcaagcaacggtttgtcaactcgtctgcgcgcccgtgctgcgggtataatcggcgcggaggtctttctcgaaacgcagacctgtcgttggcaaggaaaggggcgcatcgtggacggcaacctgttcaaccgcaacgagcttctggcgcaaaaggtcataaaggggctcgagtcgcgcaacatgcgggggttctatgcaaaagacggcgacgaggcgcgcgagatcgcgctcgagctgataggcgagggggcgagcgtcggcatgggcggctgcatgagcgccctggaaatcggcctggtcgacgcgctcaaggagggcccgtacaccttcatcgaccgttcaacctacgccgaccagcgtgcggcgctcctggacacctacgcggcagacgcgttcttgacgagcgcgaacgccatgacctacgacggcgtcatcgtcaacatcgacggcaacgccaaccgcgtctcgtgcattgcccaagggccgagaaaggtcgtcttcatcgtgggcatgaacaagctgtgccccgaccttgactccgcgatgaagcgcgcccgcaacgtcgccgcgcccgcgaacgtgcagcgtttcgacattgacacgccgtgcaagaagacgggaagctgctttgactgcaagagccccgataccgtctgctgccagttcctcatcacgcgcttctcgcgccatgcggggcgcatcaacgtcgtgctggtcaacgaggcgctcggattctaggggcggttgcgcaggtctccaatttgtcgcgcgcccgccacgcgaaaggcgtaccatgtcgcaaacgtttaatctccaaggaggagcatgtctgacgagagcctgttactgaacgccatcgagcgggccgcgaacgcccacccggagcgcgtcgcgtttcgtgctcccggggctcgcgacgtcacctacgacgagctgtggggcatgtcctcccgcatcgccgccgcccttgcaggcagcgtggacgggcgcgatcccatctgcgtcatctgcgacaagtcggcgctttcggtggcggcgtttctcggctgcctgcgcgcggggcacgcgttcgtgcccgtggacatcgccatgcccgacgcgcgcatccgcggtatcgttgcccagctcgagggcagtcccgtgctccaggcaacgcagggggcagggcccgtggagctttccggcgtgacggtgcgcgatgccgccgccttggcgcaaggcgtccccgcgcgtcccgccgacgaggccgagcgcgcccgctgggtgcgcggcgagcagacgcagtacatcatcttcacctcgggctcgaccggcacgcccaaggggatcgaggtcacggcaaacgacatcggcaacttcatggcgtggatgcaggggtttccggtggtgcgcgacgggggcgtcacgttcattgaccaggcgtcctacagcttcgatctgtccgagtaccagctcgtcggagcgctttccacgggcggttgcctgttcgcgctcccgccccaggtcacgggcgattatcgcgcgctgttcgaggcgcttgccgattcgggtgccaacgtgtgggtgtccaccccgtcgtttgcggacctgtgcctggtcgatccgtcgttttcgcaggagctcctgccggggcttcggctcttcctgttctgcggcgaggcgctgcaccacaccacggcctctgcgctcatggagcgcttccccgcagcacgcgtcgtgaacacctacggccccaccgagtcgacggtggcggtcacgtactgcgaggtgggccaggcggacctggacgacccgcggccgctgcaggtgggcacgccgcgtcccggcacccagatccgcatcgtcgaccccgagacgggcgcgagactcggccgcggcgagacgggcgagatcgtcatcgtgggagacaccgtggccaaaggctacatcaaccttcccgaaaagacggccgagagcttcttcgatgcctccgagctcggcgcgcacgtgcgcggctaccacacgggcgacctcgggcacctcgatgaaatgggcaggctgcactgcgaggggcgcatggacgacctcgtcaagctcaacggctttcgtatcgagctcggcgacgtcgagcgcaacctggaggcgctgcccgccgtcgaccaggcggcggtcgtcaccgtcaaacgcggcggcgtgacccgcgcgctcaaggccttcgtcgtcgtcaacgctgccgcgcccaaaggccagacgacgcctgctgccctcaaggcgcagcttggcgagcgcgttcccgcgtacatggtcccgcgcaccatcaaggtcctcgacagcatgccgctcaacgccaacaacaagatcgaccgcgccgcgctcaagggcaagtaggcgcagcagcgtatgtcgtttttcgccgacccgagctttttcgtcatcaccgccctcatcgtcgccatcgcggcggtgctcggcctgcgtcaggtctcgctgcgccgtttcggcatgggcgcgacgctcgtcatggtcctgttcctgttctgcaagaccccggggcagggcgcggcgtttgtggcgtttctcgccatcgcgaccctggcggccaagttcctgtttgccaggcgcgattcgaaggcgcgcttctgggggggcctcgccgtgacgctcgcgccgctcgtcgtgtgcaaggtgtccggtatcttcgagctcaacctgctcggcttcacgggcatctcgtacctcacgttcaaggcggtgcaggtcgtgctcgagacgcacgacggcctcatcgaggacatgggcatcggcgactacctgtacttcctcgcgttctttccgacgatcatctccgggcccatagaccgcagccgccgcttcgtggaagacatccaccgtaccccctcgcgcgacgagtacgcgggcatgctcgcccgcggcatcctgcttatcggcatcggcatggtgtacaagatcgtcatcgcgggcatcatccaccgctactacaatccggcaggctgggggagcgggcctgcggggctcgagttcctcaaccaggtgggcatcgcctacctctacggcttctacctgttcttcgactttgccggctacagcctgatggccatgggcgtcagctactgcctgggcgtgcgcacgccgcgcaacttccgcgcgccgtttgtcgcgctcgacatcaaggacttctggaaccgctggcacatgacgctgtcgttttggctgcgcgacttcgtgttcatgcgcttcgcgcgcttctcgatgaagcacaagctgttcaagcagcgcctgcacacggcggaatgcggtttcgtcatcaacatggtgctcatgggcgcctggcacggcctgacgccgagctacctgctctacggcctgtaccacggcgtgcttctggcggcgacggaggccttccagaagaaatctaaattttacaagaagcacaagggcgagcgctggtatcaggtgctgtcttggcttataacaatgcagctcgtcatgttcggattcgccctgttctcgggacaggtgctcatgttggcgaagggagtctgattactatggcaaagatgacgcacgaggagctcgaggagaagatgctcgacctgctcgaagacatcaccggcgacgaggcggtgcgcgagcagcgcgacgtggacctgttcgaagaggggctgctcgactcgatggcggccgtggagctgctcgtcgacatcgaggaggagtttggcgtatcgatcgcgccgacgggcgtcccgcgcgaggagatgaacacggtgaacctgatcatccaccaggtggagatcaggctgtagccatgaagcaggcgggtgccgacagccctgagggaaagacctcgggcggcaagctctcggggagcgccatgctcaaggccgtgggggttggtcttgccctcatcgccgtggcggcgctgctcgccgagaccgtgctgttgccgctccaaggtgcaaggcgcgacgacacgcgcctgtacgactacctctactcgggcgccaagtccacgagcacggcgttcacgctggaaaacatgtccgacgacggctacctggtattcggctcctcggaattctacatcggcaagaagctcgtcccgcagtgcccggccgccgtctttggcgagcacgtgaccggcgtggacatgacctttgtcggcgaggcctacgaccagagcctgtggcatgccatcgccgccggcgcctacggcagcaaggtggcgcgcagaaaggtcgcgctcgtcgtgtcgccccagtggttcttcaagggcaacggccagcagagcaagttcaagtcgaagtactcgtacgacctgtaccggcagttctgcgacaacggctccatctcggacgagacgaagtcctacgtccgccagcgcctcgcggccctcggcatcgacgagacgtcgcttgccgcggcaaacgacgacaccccgctcgacgcgctcaacaacgtgatgtactcgtttggcgacgacctgtccgcgcgcttcaagctcgtgcaggcggcggcgtctgcccccgagaagagctacgcgcgcaagcagggggagtacacgggcgagcccgactgggacgcgctgctcaggtgggcggacgattcgggcgcgcacgcctgcaccaacaacgactacggcatctacgacgactactggacgcgcaactcgcagttccacgtggagtcggaccaggatttcaagcaggcagaagacgagttctccgacctgcgctgctttttggacgtctgcgcgcaaagcggcctcgagccgctcgtcatcatgctgcccatgcacggcatgtggtacgacgcgaagggcgtgaacgcggacacgcgcgcctactactacgaccgcgtgcgcggcatctgcgacgatgccggcgtggcgtacgcggacttctcgtcgtgcgagtacgagaagtatttcctgtgcgacaccgtgcacccgggctggcgtggctgggtgcgcatcgagcattccttctacgatttcgtgaacggccgcgacgacgacttcctggcaggcggtgcctatgggacggctccgggacttgcggcggaagggagcgcctcgtgagcacgcggcaaaagcatccgatcgcatctgccaaaaagcgcctcgaagcctgggcgctcgcccgtccgcgcgcgcttgccgcaggaatcacgctcgcgacgcttatcttgggcggcgtgctcatctggtttctcatcttctccggcttgaatgagccggtccagttcatctacagcgccttctagccatggcgaggatgcgacatctggagcggcgcccctggcaggcgcgtgcggcatgcgcgctggcctgcgcggtcgtgctggcgctcgtgtgtgggcttctcgcgccggccgcacaggcacggcgcccgcacggcgcgctgcacgacgaactcgacgagtacctcgcgcaaaacgttcccgccacgggggttccgggcatcgcggtggcggtcgtctcctcggatggtaccgaataccagcgcaccttcggcgattgccccggccccgacgccgccttcacggtcggctcgctcagcaagtcgttcaccgcgctgtgcatcatgcagctcgtggagcgcggcgaggtcgacctggacgaccccgcgtccgactacgtgcccgactacctcgtgcccgaggaggtgacggtgcgctcgctgctcaaccagacgagcgggttcggctactacgagtcgctttcgcaggcgcaggtgggcgacaccttcggcagcttctcgtacgcgaacgcgaactacgacctgctcggccgcatcgtcgagagcgtgtcgggcctcgactacgacgagtacctgcgcgaaaacgtcttcgagccgctcggcatgacaagcgcctcgacgcagggcagcgccgtgaagagcccaaaggtcgacccggggcaccgtaactacttcggcatcaacgtggcagacgggttctcgcatgacgtgtcggacgacgcatggggcgccgacccttccggctacgtgcaggcaagcgtctcggacatggcgcgctacctgcagatgtacctcgacaagggggaggggatcatctcgccggcgggcatcgaggcgatggtgaccgacaaggtgcccgacccgtacggcagcacgttctacggcatgggctggacgacgtactacgatgacggcgacaacctcgtcatgtcgcacgacgggcaggtcgagaactacgtcgcgcgcatgacgatcgtgccgtcgtccgatgtcgcggtggtcgtgctgggagattccaacgactacttcggcggaaacagctgctttttcgacctcgcaagcggcgtcgtcgacatcgccacgggcacgccggcgctctacgacgtcgacccgagcgaccgcgtctcgcagcacctcgggctcgatatcgcctacctggcgctcgtcctctcgtctgccgtgccgctgttctcgctcggcagctggaggcgcaggatcgtcagcgcgctcgagcaggaccgaccgctgtggccgcgcgtggcgctggccatactcgtgcacctcgcgctgccgatgtttctgctcgaccttccccgccagctcggctaccagtggcgcgacctgagcatgttcgtgccggaccttgcgctcgtgctggtggcggtcgcggccatcctgtttgcgggaggctgcgccaaggtggtcgtctgggcgctcgcggcccgggcggagtcgccgggagacgcatttgacaggcgctcgcggggcgggggacacgaggcgcgcgacggcgcatagagcgaaacgcacgacacgaaacgcgtgtcggcagcacgtagtagagtatggtcggaagcgaccgagatttcattcgagaagagaggcgcaatggcagacgcacccacgacgacgcagcttgccttttcggcagaccgcgcgaacacgtatttcccgctcacgagcttgaatccgggcgactcgagcgagccgttcgaggcgtacttcaagatggacgcgttttgggactccgagcaggaatgcgtggacgtgtgcgagaaggggcgcggcatcgtcgcgaagctgcgcgagggcaaccggggctatgccgaggtgaagggcattgccgcagccgggaccttcacggcagatggcccctacatccaggtcaaggcgctcgaccagcgcgacgagcagccctattacgattcgtacgccttctccgtctgctgatgagcggcaggggcggtacgcggggccttcggggacggccatgagacgcgcggacgcgcaggcagcaacagaggcgggcgcgaggcggcgcaggtttccgcgctttgcagccgtgctgcttgccctcatagccgcgctcaacctcgcgacgatgatcccgtggtttgccgactggtatgtggagcacgcgtcccccgtgctgacgctgccgctcgcccgcttgagcgagctgtcctcgctccccgtgggcgagctcgtcatgtacggcggcatcgcggcgcttctggtggggctcgtgctcgccgtgctcgcgctgttcctgcgccggcaccgggcgttcgtccacgtgatcggtgtgtactggaagtcggtgctttccgtggtgctggtggtcggcctgctcttcacgctcaactgggcgattccgttcagggcaacgccgcttcgcgcggtgtacggggccggcgcggatgcctcgctcgagcaggtggaggcgctgcg

SEQ ID NO: 1149 - DNA, 2104 bp, Unknown
  16S sequences of unknown bacteria
ccgccggtaggggcggggaacggccaggatgacatcgcagatctgccgccccaggggggtgcgccggcagaccggcggcttgcagatcgtgccggagagaaagacatcgttgagcggcgcggcgtcgctggtctgcaggctctgggcgtagacgaaaagcagcagcttacgccgggcctctgtccgcacgtggtaagaccggacctggccggtgacggtgatgtggctgcctgcggaaaggtccatctcctctaaaacagactgggcggcgatgattggcagacggtccgccgtacccgacaggcgcgccacatccagaaaaaaacgataaaacctttgcccgtggttctcgtgcgacagcaccggcaatgcgacaagatcgccccgcaggtcgatgcggttggcagtgttttccatagctcccacctcattttgttcatctggggaatctatattcggaaaacaggggcaatatgcccgcaacgccccgctgcggcggggcgcgatgcggtcagcggtgacgcttggctttatgcagacgcttttccggaacggggcgtgtcgtttttggctttttgaccggggcggcgcgttttgcgcccgggggcgggagcaggcagccggggccggcgccaatcaggtcctcccggtgtgcggcgtgcagcgcctccagggcgagacggtaattcttcgggtcctggtactggagcagggcccgctgcatgtttttttcatgggcactgcggggaacatagaccggctgcattgtgcgggggtcaagcccggtgtagtacattgtggtggagactgtcgctggggtggggtaaaaatcctgtacctgttcgggcatatagcccaggcttttgacatagagggccagttccactgcctcccgcatcgtgctgcccggatgagaggacatcaggtacgggacgacatactgcttcatgcctagctgctggttgatgcgccggtactgggcgagaaattccagataaacctcgtgggcaggcttgcccatattctgcagcactggggcgctgacatgctccggcgcgaccttgagctgcccggagatatggtacttcaccagctccttgaaaaacggcgttttatggtcggccagaagatagtcaaaccggataccgctgcggatgaagacctttttgacccccggcagcttccgcagctttcgcaggagctggagatagtcactgtgatcggcctgcagatttttgcagggggcggggaagagacactgcttgtgggggcaggcgccgtgggtcagctgcttttgacaggcgggctggcggaaatttgccgtggggccgccgacatcgtgaatatagcccttgaaggccggatcttccgtcatgtgccgcgcctcggccaggatggattcgtggcttcgcgtctggacgatgcggccctggtggaaggtcagggcgcagaagctgcagccgccgaagcagccccggttggagaccaggctgaatttgacctcctgcagcgccgggacgccccctaatttttcatagctggggtgatagttccggcagtagggcagggcatagacggcgtccatctcctgctgggacaggggcttctgcggcggattctgcacgacgtagacgccgccggggtaacgctccgccaagcgcttgccggaaaagggatcggtattggcatattgcagggcaaagctgcgggcataggcttttttgtttgcgctgatctccgcaaattccggcagctggagatattgccgcccgtcggtaatgtcctttgtcttgtagcaggtgccttcaatgtaggtgatttcgctgggggacaggccatcgttcagcgcatctgccacggcgacgatgctgcgctcgcccatgccgtagagcagcagatctgcctgactgtcgagcaaaatggagcgcttgaccttgtcggaccagtagtcgtaatgccccaggcggcggagacttgcctcaatgccgccgatgaggatgggcgtatgccggtagcgctggcggatgaggttacagtagacgatcgttgcgtaatccgggcgctttccgccgacaccgccgggggtgaaggcgtcggcggaaag

SEQ ID NO: 1150 - DNA, 32759 bp, Unknown
  16S sequences of unknown bacteria
aatctcctaaaccgacgcccatacataaagggggcccggggcccccgggagtctgggaggtcataattatataaaaatcaacccattgaatttttccgtgccctcaaccgacacaacggccgcctgttttccatgaacaaatcccggaaacggacacatgcccggctcgggtaagtcccgcgccgtccggctctccgaccggcgtctcccgtcacccgccgaaagcgcggatgagccacatcacaccgccgcacacgacatagatgaccggctgatggacgacatagatgatgagggtgtgtttcccgatccaggacaaccaaggcgcgcggcttttatacatccagccgggaaaacggccggccttcgcccatacccccacgaagctgcccgcgaggaaacagaaaaaccaaggcagcaggggaaaataatccgcgccggtcccccggccgatcccgagcgggtaaagccacggaatgtcgacgaggctttcgggcaagggcagagtaaacaggcccttgatcccgaaccaactgcccagctcgtgcgacatgtgataggtgagcaggaacaggacggcacacacggcgatccccgcgaggggaggcaccttggaaagcaggggccgcagcgccgcaaacagcaggatggagacagccagaaaatgcaggataccgaaccagatcatttcgtcccgcatgaacaggtagagaaaaagggaaattcccaccgaaattcccgccagaatcaggccgcggcgggcgttgctgtgggacagatagcaggaaatgccgcagataaagatgaacagcccggcaaaaaggggctgaaccggccggaaaaactggaaaagcgtgcgcccgaacgcgacgtcgtagatccagcccagcatatagaacccatggaaaaacaccatgaggatcaggtcgaatccacgaacctcatcgagaaaatggatccggcggcgaagaacaggggtgtcgtccaaggcgggtctcctccttttacggaatgaaaacggcggcggataggtggttccgggtaaaacgcccggcaaaatcatattttatcatagtttcttctttcccgcgagagaaaaacggaaagtttacagaatcttgataaacgaaaggcggaaaaggacgatgcaggaattcgttggcagacaggaaaaacgggaatggacggtcacaaaggagatgctcgcggtgcagatgggcagcgggatggtgccggttctcgccacgcccgcgctcatcgcctgcatggaaaacgcctgcatgcggctggtacagccagccttcggtgaagggatcaccaccgtgggtacccgggtagaggtggcgcatctcgcgccgacccccgaaggggcccggatccaggtgacggctacccttctcgccaccgacgggcggcgctttacctaccgggtggaggccagcgacgaaagcggcaaaatcggagaggggtcgatggaacggcagagtgtgcggctgtcctccttcggggaaaaggcggaggcacggaagcggtcctgatgcggggaagatttccgcacaaacccgttgacagacaggaaaagctgtggtatactgacggatgccgcatgttccgggcggcagcggtttgcgctgccggaagagggctttctcccgcccgtgcgcagcgagtcttaagaaaaggcaggttcccgtatgtacgccattattgaaaccggcggcaagcagtacaaggtgcagagcggagatgtgctcttcatcgaaaagctggatgcctccgaggagaccgccgtgaccttcgacaaggtgatcgcgctccacaacgacaaggacctcaagctcggcgccccgtatatcaaaggcgcttcggtggacgcccgtatcctcaagcagggcaagggaaaaaagatcaccgtcttcacctaccggcctaaaaagggcagcagccgtaaaatgggccatcgccagccctataccaaggtgcagatcgagcagatccgtgcacgcgccccccgggctgcgaaaaccgaggcggcggccgaggctgaagccgaggcatgattcgggcgcggtttttcacgcaggacggggccccgtgcggtttttgcatccggggccacgcgggactggacgcggcgggacgggatatcctctgcgctgcggtctcatcggccgccattttggccgtgaacaccttgactgaggagtccggcatccgggcgttggtccgcgaaaaggacggatacctctacgtctgggtcgtccggaaggaccgggaacgcagccgggcggttctggccgcgctgcgccgccatctgatcggccttttcgaggtttatcccacatatttacaggtagagactacggaggtgtaacgacatgctgaaaataaacatccagctgttcgcccataaaaaaggaatgggatccaccaaaaacgggcgggattccgaatccaagcggttgggcgtcaaacgtgccgacggacagtttgtgctcgccggcaatatcctggtgcgccagcggggcacccacatccatcccggcctgaacgtcgggatcggctccgacgacaccctgttcgccaaagcggatggtaccgtccggttcgagcggatgggcaaggaccgcaaacgtgtgagcgtctacgcggtcgagcagtaagttcaggagaaaatccgtcctgtcgtgcggtccgccgtgcggcagggcgtttttttacggcggggcgtgtgcgattcccggatccggggatggaaggcctccataattcagcagaaaccgtgtatactagaacggatgaatccgcgtcccgcagggcgggacgcggtggaagggacgtgtgcgacatgtttatcgataaagcggtgatcgcggtcaaggccggcggcggtggcaacggggcggtgagcttccgccgggagaaatatgtcgcggcaggcgggccggacgggggcgacggcggccggggcggcaacgtggtattcgtggccgacgacggcctgaataccctgtcggatttccggtataagcggaaatacgccgcggaaccggggcagaacggcggggcgaaccgctgcttcggccgggccggggcggactgcgtgattaaggtgccccgcggcaccctgctttacgacaaccaaaccggacggctgatcgccgacgtttcgtcggacgagcccttcgtcgcggccaaaggcgggcggggtggctggggcaacgcccatttcgccaccccgacgaggcaggtgccccggttttccaaaccgggcgtgccgggtgagacgctggaactccgcctggaactcaaactgctggccgacgtggggctggtaggcttcccgaacgtgggcaagtccaccctcgtctcggtcgtcagcgaagccaagccccagatcgccaactatccctttaccaccctgactcccgtgctgggggtggtgcggacgggagccgaggcctctttcgtcatggcggatatccccggcgtgatcgagggggcgagcgagggggtcggcctgggccacgattttctgcgccatgtcgagcgctgccgcctgctcgtgcatgtggtggatatcgcgggcagcgaggggcgggatcccctccaggattttgatgtgctgaaccgggagctcgcctctttcaaccccgagctcgcgtcccggcctatgctggtggcggggaacaaatgtgatctggcatccgaagagcagcaggaagccttcgccgccgccatgcgggagaaggggtatgagtacttccccatgatggcggcgatcgcccacggcacccgagagctgaccaaccgctgcgccgccctgctggcggagctgccgcccatccgccgctttgaggccgagcccgagccggccccggagcttccggaggggacacgggaggtcacggtcacggaggaagacggtgtgttttttgtcgaggcggagtggctggagcggctgttccaaaccaccgatatccgggataccgaaggtctgcagtatttccagcgggtgctccgttccaccggcgtgatcgacgccctggtgcggtccggcgtccaagaaggcgatacggtgagtatatatggatttaaattcgactatatggaataatccggccggaatattccatgggataggaacgtatagtataggatgaggcgacaaatggagccgttgcaaaacgacaaaaaagccctgggggagatcagctccctgaatctcgcgtatatcggggacggggtgtatgagctgatggtccgggaacggctgctccggcaggggggccgtgtccgggacctacatacgctggcggtggagcaggtgcgggcggaggcccaggccgtcgcggccgaccggctgctccccctcctgaccgagcgggaagcggcggtctaccggcggggacgcaacgcccgcacggcccggaccgacggggcgtatcataaggcgacggggctggaagccctgttcggctatctctatctgagtggggagacggcacggctgcgggagcttttcgacgaggcgatgacggcgatcggggagactgccggataaggccgtgcgatgcctctgtgtcccgctggacacggggcgggaaaggacggtcctgatgatgaaaaaaacgcgcagcaaggggatttggaagcgcacagcgctcgacggcctgttttatctgctcggcagtgtgctgtacgccttgtcggtgaacatctttaccgcccccaaccagatcgccccggggggcgtgaccggtgtggccaccctgttcaatttcgcctgggggctgccgatcggcaccatgatcctggtcatcaacctgcccctgctggtcgcctcgtggttccggctgggcaaagcctttaccatacgcaccctcatcgttacggtgctctcatcggtcgtcatcgacgccgccgcgccctttctgccccccttccggggggaccggatgctggtcgccctgttcggtggggtgctggccggggcgggcctgggcctgatctacatgcggggcgcgaccaccggcggcaccgaggtggtggcccggttattggaacgcaagttccgccacatccccatcgggcgtttgatcctgctggtggacgccctggtggtcgcggcgtcggccctggtctaccgcaacgtggaatccgcactgtatgcgatggttctcatctttgtttcgaccagcctgatggacgcgctggtttacggcggggacaagggcaaaatgctcctcatcatgagcaaaaaggagcgggaaatcgccgacgcggtgctcgaccggatggaacggggcgtcaccatgctcaacgccaccggcgcctataccggcggggagcggcgggtgctgctctgcgcggtgcggcgcagcgaaatgtaccagctgcgcagcctcgtcatggatatcgatcccggcgccttcctgatcgtggtgtccaccgatgaggtgctcggcgaggggttcaaaaccccggaagagaaaaaataagatcctctaaaaatcgtgccggacacccgcgtccagtccatattcttcaaacagagtgataatatcttccaccatctcaaaatcactgcgctccatgtcctgtataaccgcctggatatcccgcaataaggatatggccttgctttccacgtcggcagcttggaagggaagcacctgcaaatgggataaaatataccggcataacagttcctcatgaatctccattctgttcacctcagatgcatgatatctgaattccagatataattcccttgccgcggcaaaaccgtgctatactggctgcggaggtgagaaaaatggcggatcggatacgggaactgcggctgaagcggcatctccggcagcaggaggtggcggtggcgctggggattcccccgcgtacctattcctcgtatgaaaccggacggatcccgtggacttgcgagttagtcatcaagttggcctgcttttatggggtaaacgccgactatctcgttggactgacggacatatctgcgccctatccgccccctcggcgctgaccgggcggggccgctaagaaagggaaccaacatggcctatactatcgagcatctgccgaaggagcggtggcaggggtatatcctgcccatgcggtatacatcggacagttattacgacgtgcgggtagaccggacggcggacgggttcgcggcctcctttcgaaagacgccggcccggcccccgatccaacacacgccggaggaatacgactttcccgacaggctttacgcggagtattatgagggcgccttcgcctgggggattgtccgggacaaagagctgctcgcggcgatcgaaacctgccccgaaacctggtccaaccgcctgcgggtaaccgagctctgggttgcggaggagctccgcgggcagggtatcgggcgcgccctgctgaatctcgccaaggagcaggcgggacgggagcgccgccgggcagtgatattggaaacccaatcctgcaacgcgaacgcgatcggtttttatctgcacgagggcttgaccctgaccggattcgacgcttgctgctaccggaacgacgacctcgacagaaaggaagtccgtctcgagctgggctggttccggaacaagccggaacggctctccccggacaagatcaccgtccgggaggaacgcccggaggagtggttcgaaaccgaggccatgacccgtcgggctttctggaaccggtaccgccccggatgcgacgaacatttcctggttcacaaactccgttcctctccggcttaccggccggagctcagccgggtcgcggtggtggagggccggatcgtcggctgcatcctgtattccgaatcgcagatccgggacggggcggccgttcatccggtcctgaccttcgggccgctgtgcgtggatcccgcctggcagggccgggggatcggggagcggctgcttggggagactcttcccctggcggcaggggccgggtatcccggtgtcgtgatctatggcgaaccggactactatccccggctggggttccggccctgcggccggtttggcatcaccacgccggaaggggaaacttccgacgcgttcatggcgatcgagctcgtccctggggggctggcggatgtccacggaacattctatgaggcggcggtcttccatgatctgtcgccggaagcggccgccgcctatgaccggcggttcccgccgctggaaaaacaacgctttcccggccagtgggccgaaaaaaagagttgaaaaaagaagggcaagcgttgcttgcccttcttttggcgcgtgccggttcaggcctccggctcttcctgccagagctgcgcggcggacttggacaccgccttgatcgcgggttccggatagggggacgcctccccgccgataccatagaggaaatagaagccctcgggggtgagatacagcctttcctcgtagccggcgggatcgccgtaatagctgaaagcccggctggccaccagctcggcggtttcggtattatagacctttttccggatgattttttccatggataatcctccttttgtccggatattccgggttctgatttgtattgtacggagaatcggggaggattgcaaccgaaaggcgttggaaactgtcggatgggaaccattccctccctttttcaggagaacccgcccgctttccatttgggctttacacattttcccggccagatccgggatcatccgcttgtactgcgccggaaaatcggctataatgaaaccagtttccggcgggtgtgtcgccggtaccataacgagaataagccggtagcccggctatggaggaaccagatggacaattcggattggcgccggattggcgaccagatcagcgacacggtcagccgggcgctgagctcccgggaattccgggagattcaaggtacgattcaaaatacggtccatgaaattcagaccgcgttcaaaaacgaattcagcggctatgccccgcagacgccgcccgcccctccgccggctgtaccgccccgcaaaacgaagacccgggcgcctggccggacggcgggtacgcttttgctggtgttcggggccatcgggttcggcgctgccgccttgaccgccctgatctccagcgttttggcgctgacttccgaccgtatcctgccttttatggggctgggaatcggggtgtttctgccccttctggccgtattcggcggcatgatgctgggcggcggcgcgctccgccggcgagcacagcgatatctgcgctatcgggaggagctgggggacagcgccttctgcccggtcggcgttctggcctccgcggtgggcaagaggccccgctttgtcgcgagggatctgcgccgtatgattgggctgggcctcttccccggcgcccgtgtcgacgacgagggcacctgcctgatgctggacgacgagacctaccgctattatctcgcagcccggcaaaaacgggacgaggaggccggacgaaggaagaaaaccgcgcccgagacgacggcgccctccgacgaagcccaaagcgtcattgcagagggccggcgtctcctcgaccggatccgggcctgcaacgacgagatcccgggggaggcgatttccaggagcctcgaccgcctggatgaggtcgccgccgccatcttcgcttatgttgaggcgcacccggcgaagctgcccgagatccggcggtttctcaactactatctgcccaccaccctccgtctgctcgaggcgtacaaatccttcagtggccagccggtccagggaaagcatctggacgagacccgtgcccagatcgagggcacggtggacaccgtggtgcaggccttttccaacctgctggacggcctgatgcaggacgatatgcgggacgtttctgccgatatgacggtgatgaaatccctgatggaacaggagggcctgaccggcggcttcccgcgcccgaagccctgaaacggctgcacagatcccgtctgcggccgatcgcaagtccatcagatcgatagagggcgaaaccccagggcggatacgggatggcacatggtttcagggaccgtcaaaatccctgagcggccgcccttgctcgattacggtagcgtcgggcaatgcggtttagcgcgatttgctttctatgcaaagcggaccgggcgccgccttctgagccagcctttatacaaatagggggccagtcaccattctataacttataaaagccgaaagccctagggatattgtcccgaatcggacggttattcttcccgtaccgccaattccttgccgaagagaggggccacctgccgcacccgctcggtcaaagcggcgaactgagcgggggtgatggactgggcgccgtcggacaaggcgtgaggcgggtcgttgtgcacttcgatgatcaggccgtccgcccccgcggcgaccgccgccagggccaggggctccaccagggcgctgatgcccgaagcatgggagggatccactaccaccgggaggtgggacagggatttgagcaggggtacggccgagatatccagcgtattgcgggtcatggtttcgaaggtccggataccccgctcgcacaggatcacacgctcattgcctgcggccataatatattccgcgctcatgagcagctcctcaatggtgttggccaggccccttttcagcaggatgggcttgtcgcacttgcccagttcctttagcagctcgaaattctgcatgttccgggcccctacctgaatgatgtccacgtcctcaaacaaaaccagatgggcgggggacatgatctcggtgacgatgggcaggccggtcttttcccgggcgtgacggagcagctcgatgccgccggcccgcagcccctggaaggcatagggggaggtgcggggcttgaacgcgcctccccgcaggaaagcggcgcccgcccccttgacatcctccgccacgccgacaatctgctcctcgcattccactgagcaggggcccgcgatgatgcccaaccggcctccgccgatgaccgacccgtcgccaaggtcgatgacggtgtcgtcggggtggaatttccggttggcttttttgtagggttcctgcacccgtttgacgctctgcacaatgtcctgggcccccaccgactcgatatccaccgtggcggtgtcccccagcaggccgagcaccaccgaatgctcgccataccaggcgttgaccttgacgctgtgttggtgttcaagccgggtggagaaagcctccacctgttcatgggtgacgccgggcttcagtacgatgatcatgttgattgcttcctttcctgcggcgaaccgctctgctgttttgtataaaaaaggcggggcccctccatgggccccgcctttcatcgactgttgcaaatgccaatattccgggacggcctcatggactattcacttgggaactccgcgcagcaaaaagcactccggctgaaagtaaagccgaagtggaagctaaaaaatcgcgcggtacccaggatacgggccatcaaagacgcctccggtttcaagtgtatatgtttatcatacggcccccgccgacgattgtcaatggaaaaacctacggttcttgagagcgatcggcgaggatttttgtacgtcccggccgaaaaagcggcccttataccttctttggaagggggcggtcaggaataccctgctcattccccagcgcgaggagaatgtcccccgccaccgcctcaggggcctggttgccgtcgatatacagggacgcggcctcataatactggggcaggcggcgggccatcagctcccgcaccgccatctccttatcctctcgctgtaaaaggggacgggtacggtcccccttgaggcgatcgagcacggtttcaggggaaacgtctaacaggataatcactccagaacggcggaggaccgcggcattttcgggaaaggtcagcgcccctccgcccgtggcgatcaccagattctctttttcagccaggcgggaacaagcctgccgctcccgcagccggaaatcctcttctccgaaccgtttaaaaatgtcctccaccgccatgcccgcctcttcctcaatgagggcgtcggtatccacaaagcggcgtccggtacgggcggcgagaaggcgtcccaccgtggttttgccacagcccatgaaaccgcagagcacgagattgttcatcggatatcgatcctttcgggttgagagtctccgccgatatccggcgtccggatgccgggcggggatgggaccgccttcgcggcgtttcatccaaacgaccgggccatttcctcccccgcatcggtgatgagacggcggatatccccgttttcaaaggaggcgccgtaccagcaggcatgagcctccacagcctgccacaccagcatgggcataccgcccgcggttttggccccgcaggccgccgccatacgcagaagcgccgtctctccgggattgtacaccgcgtcgaataccgcagccgtatggcggagcaccgcgtcgtccaccggagatacgcctatccgcggatacatccccaccggcgtggcgttaatcagaaggtcgaagccttccctttccgcggctgcaggaaggcaggagagggggatccgctggaaggcggcgccggggaccaggtcacggacatacacgccgagggcctccccggcgggcagatcctcctcgcgcacggcgcatacgatccgggcgccggccagggcggcctcacaggcaaaggtgcggcctaccccgccgcagccgagcaacgccacccgtccgccgagggggatgccggcgtcccgcagggcggcgaggaagccgccggcgtcggtgttgtagccaaccggcccttccgcggtgagggcgatggtgttgaccgaccggtagagctccgcccggccttttagggcggacaaataggggatgaccgcctgcttgtgggggatggtgacgttcagtcccttcacacgcccgaaaagggcgggcagcgccgtctccagctcctcgggagagaggtcctcgagggtatacgagacatcctgcccgctcagagagaagagacgggcatggataaagggggacaggctgtgtcccaggggatgtccgatcaaagcgtaacgcgatttttccatgcggcaacggcctttctgcggcggcggaaaagaaaaacaaaaaattttccaaaaggtgattgacaaaccgccggtttacgaatactattttggtgtactccctgatgccggcccgcagccgacggagtcagtataccacaccggcccccgccggttcaaccccgggacggcaaaggtgcaacaattttggaaggatgagctggatggtactcgaaaaggttaaaatgatcctcagcagccagtttgatgtggaagaggacagcatcaccccggaaaccaatattgccgacgatctgggggcggattcgctggacgtggtggatatgctgatgtccctggaggacgagttcgatgtggagatcccggatgaggagatcgaacgcatccgcaccgtgggcgagctggtcgcctatattgaggaaaacatgtaaacattcccgacgtatcaaaacgtgggctgtatgccgcggaccggttttccggccggcggcatttttgctgggagggatcggcttggaaaggcgtgtccggctgccggaaggggagcttgcctatatatggacccgcaaacgggtaaaaaattggaatctgcgggtcagcccggacggcacggtcaccctgtccacgccgaccggtgtaaccggagccgaggccgaccgctatgtcatcggcaaggccgcctggatcgatgcgtcccgccggcggcttgccgggcggaaacccctgtgtttgacagacggagcgcggtttgcggtggcgggggtacctgtccggctgcatatcgagaccggggaagctggtcccgcccggtgggaggacgggagtctcaccctgcgtcttccggccggactgtcccaggatgaggagaaagaagcggtccgggaggcgctacggcaggtgctgcgggaccccgccgaacggatgctgacggagcttctgcgccgctcccttctatggatggaggcggagaccggacggacagatggggccccttccctgactctgcgatggatgcgctcgagatgggggagctgcgcgcccgggcggaaccggctgacgctgaacgccgctcttgtcctggccccgccggactgcgcggcgtatgtggtgatccatgagctttgccaccggatccatcccgatcattccgccgcgttccaccggctggtggcacgggtattggccagggccggcctggcggatgaggcgtcgcttcgccggcagctgcgcggctccgatgccgcggcctggatacgatgacaaccgggacgggcgcttgccagtctcagtttttatgatgagggagccattgtatacagacggcaggcgtccgccccccagcggacccttcctctgtggggggagacgccgcctctcaagacctcttgcagagcggcgcccggtatcgggaagttcgagaaagcgggcatgggctctcctttcagcaggaaggcgaagcgctctgcgctgtgcgtttcctggaattgtgcggtttcaccgtctttcaacagggactgtcccgcaggatcagatggggttctgaccggctcttttttcttgtttttttcataacgccgtaccgcccgcaaacagaaccccccgccgggtattgaccggcgggggggtctggcgtcgttatttcaggttgtttttcagggtggcgagctggctcttcagttcggccgggagcttgtcaccgaacttctcataaaactcggcgatgccgtccgcctcggttctccacagatccttatccacttccaggatggacttgagggtgtcgaggctgaagtccagaccttcaaggttgatgtcctcagcctgcgggacatagccgatcggggtctcgaccgcgtcggccttgccttcgcagcgcttgatgatccattcgagtacccggagattatcgccgaatcccggccagatgaagtggccttcgtcatcggtacggaaccagttgacattaaagattttgggcgccttgtcgccgagtttcttgcccatttccagccagtgagcccagtaatcggccatatgatagccgcagaagggcagcatggccatgggatcgcggcgaacgactccgacagcgccggtggcggcggcagtggtctcagaggccatgatggagcctacaaacacgccgtggttccaatcgcgggactgatacaccagaggcgcagtcttggcacggcggccgccgaacacgatggcggaaatcggcacgcccaccggggaatcaaactcggaggacaggcagggacagttgcgggccggggcggtgaagcgggaattgggatgagcgcctttggagccgtcggtgcaatcccatttctcgcccttccagttcagggcgttcttgggcggattcttgtccaggccctcccaccacacggtgttgtcctccaggttgtgtacgacgttggtgaaaatggtgcctttctgagtcgaaatcaaggcattggggttggatttcatattagtaccgggagccacgccgaagaagccgttttccgggttgcaggcccacaggcgtccgtcggcaccgatgcgcatccaggcgatatcgtcacccacgcaccagaccttatagcccttcttctgatagagctcgggcggaatgagcatggcgaggttggtcttgccgcaggcggaggggaaagcggcggcaatgtatttcacttcgccgtccgggctctccagccccaggatgagcatatgctcggccatccagccctcctgccggcccaggttggaggcgatccgcagggcgaagcactttttgcccagcagcacattcccgccgtagccggagttgaccgaaatgatggtgttgtcctgcgggaagtggcagatataccgcttttcttccacgatgtcgcatttgcagtgcaggccgcgcacccagtcgtcactgtcgcccagggcttccagcacatccttgcccacccgggtcatgatggccatattcagcacgacgtagatggagtcggtcagctcgatgccgtatttggcgaagggagaccccaccggacccatggaataggggatgacgtacatcgtacgtcccttgtagctgccgcgggcgatatcgtagagcattttatacgcttcatcgggatccatccagttattggtggggccggcctgttccttggtgggggcgcagataaaggtacggccctccacccgggccacgtcgttgaccgcggtgcggtggagatagcagccgggcagtttctcctcgttgagcttgagcatctcgccggtggagcaggcttcggcgcgcagggcgttcagctgatcctccgaaccgtcgatccaaacgatctggtcgggctgcacgagcgcgaccttgtcctcgatccaggagaggacggacggatttttggtcagtgcgttggtcataggatgatcccctttctgtagtcaaacctttcagaaatccaaagttcgctagatatcattataggcagaatcggttccgatatcaatggataaaatgtgaatattctgataactttttaacaaaaagtcggtaaatgtgcagaatcggccggacaatcctgcaaaatcggccgaaaaatctgtttccatgccggtatatatgcatggcggctcatgcgttgaaacaggatgggcgccctatacgtcttggatggaagagctccccgatttcaaggcccctctccgtaagaacctggattcaggttctgaaacgattggtcgccatgccaggcagccgatcgcgcgcagccgtctccggcgtaggggcctggattcagtcgaaaaatacaaaagaagcacgaagggggaacccgggacgtggaatttgataaagttttcacgcacatcccggttttctcttgcaaaagctgggagaatacagtaaaataagggattggaaggcgggcggagcccgcaagcctgtcccgcagacaaggcgggcgggacagccggatttcataggaaaggattgtctgactgtatgaattacctgaacaagaagaccatcgaagacatcgacgtcaaggggaagaaggtcctcgtgcggtgcgacttcaacgtaccgctggccgacggcgtcatcaccgacgacaaacggatccgggaatctctgcccaccatccagtatttggccgggcacggcgccgctgtaatcctctgctcccatctcggccgtccaaaagaggacgatgaagaatccaagaaaaaggcctccctggccccggttgccaagcgtctctccgagctgttgggcaaggacgtaaaattcacccatgatgtggtgggggacgaggcgcatgccctggccgccgccctgaagccgggcgagatcctgctgatcgaaaatgtccggttcttcaaggccgagaccaaaaacgacccggaatttgccaaaaagctggcgagccttgcggacgtctatgtcaacgatgcgttcggcactgcacaccgcgcccatgcctccaccgccggcgtggccgactatctgcccgcggtgtgcggttatctgatccgtaaggaaatcaccatcatgggcggcgccctcgccgatccgaagaggccctttgtcgccatcctcggcggcgccaaggtctccgacaagatcggggtcatcaccaacctgatcgacaaggtggacacccttatcatcggcggcgccatggcctataccttcaaggccgcccagggctttgccatcggctcctcgaaatttgaggaggacaaggtggatctggcccgcgacatcctcaaaaaggcggaggaaaaaggcgtaaaattcctgctgccggtggacaacatctgtgcggacgcgttcgatgcgaacgccaacaccagggtgttcgaggggaatatcgaggatagctggatgggcctggacatcggccccaagacccaggctctctttgccgatgccgtgaagggcgcgggcaccgtgatctggaacggaccgatgggtgtgtttgaaatggcgcccttcgcaggaggcaccatcgccctggccaaggccatcgcggaatccggcgccatctccatcattggcggcggcgattccgccgctgcggtggaacagctcggttttgcggacaaaatgacccatatctccacgggcggcggcgcctccctcgaattcctcgagggactcgagctccccggcatcgcctgcctcaacgacaaattataatagaaagcgggggacaggcactgtccccttctttcacatcacgagaaaaggaagagaacgatgcgccattatgtgatcgctggaaactggaaaatgaacaagaatcccgccgaggccgccgcgctcattgcggaaatcaagccgctggtcgcggacgcctcctgcggtgttatcgtcggggtcccctttgtcgacctgcccgccgccctggaggccgtgaggggcaccaatatcggtgtcgccgcacagaactgccactgggaaaaatccggtgcctataccggtgaggtgtcggccgagatgctggcgtccatgggcgtcggcaccgtcatcctgggccacagcgaacggcggacctatttcggggaaaccgacgtcacggtgcagaagcgggtccgcgccgcccttgatgccgggctgaccgtcatcctctgcgtgggcgaaaccctcgaacagcgggagcagggcgtcaccggcgaagtggtcgccctccagacgaaaatcgccctgcagggtgtcgccaaggatgagcttgcccgggtcatcatcgcctatgaaccggtttgggccatcggcaccggccgcaccgctaccgccgaacaggcgaatgaggtctgtgctctgatccgaaatacgattgcgtcgctgtacagctgggactgcgccgacgacgtggtgatccagtacggcggctccatgaacgcgggcaacgccgcggagctgctcgcgcagcccgacgtcttcggcggactcatcggcggcgcgtctctgaagccggccgatttcgccgccattgtcaaagccgcctgcgaggccgcgaaataagttcataactgcctacgttcccggagcctcggtccctgccctgtatgggggatcggttcaggggttggcctttataccgatttttagaaagaaaatcggctcggaagccgctgcctgaaccaacctttatacaaaaaggggctgcagccccggcgatttgcccggccaaagatatatggcttatcatttcgcagacctgcgggtatgtaataaaaattttgaggaggggacaggtatgcagtacagcattcagggggataatcttcctgtggtgatctgcacactcgggcagggcgaacagatgctcaccgaaaagggtgccatgagctggatgacccctaacatcgcgatggagacctccatgaccggagggatcggcaaagccttcggccgggcgttcagcggggaatcgatgttcatgaacgtctttacctgcaccgccggcgagggaatgatcgcattcgcctccagttttcccggccggatcctgcctttagccatcacaccgtccacctccatcgtggtgcagaaaaccgcgtttctcgccgcggaaacgggtgtggagctccacacccacttcacgaaaaagctgggcgccggcttcttcggcggggagggcttcatcatgcagcgcctctccggccaggggaccgcgtttctggagctggacgggcatgtggtggaatacgacctgcaacccggccaatccctattaattgacaccggcctgctcgccgctatgaccgataccgtccagctctcggtggaagcggtcaaaggggtcaagaacatggtgctcggaggcgagggcctgttcaacacccgggtgacgggtccgggccatgtctggctgcagaccatgcccttctcccgcctggccggcatgctgtcggtcggtaagcgctgaccattcccgaacgaatccgaaaggctgactatttatgaaaaaaccgctgattctcatcattatggacggtttcgggatcaatcccgacacctacggcaatgccgtcaaggcggccaggacgcccaacctcacccgcctgtttgaagaaaacccctgtaccgccatcggcgcgtcggggatggacgtcggtctgcccgacgggcagatgggcaacagtgaggtgggccacaccaatatcggcgccggccgggtggtgtatcaggaactgacccggatcaccaaatccatcggggacggagacttttttgagaatcccgccctgctcgacgcaatagagaacgccaaaaagccgggcgcggccctgcatctcgcgggtctgctttcggacggcggggtgcacagccacaacacccatctttacggcctgctggagctggccgagcgtcagggcgtggagagggtcttcatccattgcctgatggacggccgggacgtgccgccgacctcgggcaagggatatatcgaggacttgcaggccgagctcgcccgcatcggggcgggccggatcgcaacggtgatgggccgctactacgcgatggaccgggacaaccgctgggagcgggtcgaaaaggcctatgccgccatggtgtacggcgaagggatacagaaccccgaccccgctgatgcggtggccgagtcctatgccgccggtatcaccgacgaattcatcgtgcccgtggtctgcgcgccggacggccagatcaaggccggcgacagcgtggtgtttttcaacttccgtcccgaccgggcgcgggagatcacccgtaccttcgtggatccggattttgccggatttacccgccgggacgggttcttccccctgacctatgtctgcatgacccagtacgacgccgaaatgccgaatgtccaggtggcgttcaagccccaatccctgcggaatacctttggggagacggtcagccgccacggcctgacccagctccgtatcgcggaaaccgagaagtatgcccacgtcaccttctttttcaacggcggcgtggagacggaattcgaaggggaggaccgggcgctgatcccctcgcccaaggtggcgacctatgacctccagcccgagatgagcgcctacctcgtgtgcgacgaggtggtggaacggatcgaaagcggcaaatacgacgtcatcatcctcaactacgccaactgcgatatggtgggccacaccggtgtcttcgacgccgcggtaaaagccgtggaggcggtggacacctgcgtgggccggacagtggacgccatccgcaaaatgggcggcattgccctgatcaccgccgaccacggcaacgcggacaagatgtatgaggcggacggctccccctttaccgcccacaccaccaatccggtgcccttctgtgtcgtcggcgccccctgtaccctgcggcagggcgggcggctgtgtgacatcgcgccgaccatgctccagttcctcgggatcgaccagcccatcgagatggacggcaagagcctggtggaacgcttggagcgggtggaacccgcgtccgtataagcccggccgccgggccgatacaaaaccagccggagagggaatcccctctccggctggtttgttttatttagagcccgggctcccccggcgcgttccctttttcgcgtagagcgcagcgaatgccataagcaggacgcagagcgccgcataaggccaaaagacccgatggtgcgcggtcccggatagaatcaggagcccgcccgacgccgccagcagggggacaaccccaccccgcaggatccctttgaccgcacccctccggtagaggcggaacacctgcccgtaaagcgccagatacagcgcgtagctcagccctaccgcgacctcggatacgtcggagtttgggagcagacgcagccgcacggcaaggatatggaacccgctccagacggcatacaccgccaaggccaagcccgcggccgcgagcggcattttcaggcggggatgctcccgggagaggatgcggctgccgggcagcaatccccgcagggccagcgcgtacggcagccggatgctgccgaggaccaggccattgaccgtccccatgacggagaccaacacgaaggtcagcagtaccttgccgccgcccggccctaacagccgcaccgccgccagctccacgtgcccgtctccccccgccatcacggtttcagggccgagatagtgcgaaatccctgcgaaatacaggatatacagcagcaggatgcatgccggtgcgatcaccagtgccaggggaacgttccgtttggcgcgtctgacctcactcgagatggaggcggagaccgtccatccgtcgaaggaaaaggcgatgggcgcgatcgcggtgatccagcccgccccctctgaggtcgcccggcccatcccgaaaacgggttccggccgcccaaacaagaggccgcacacccccacaaccagaagcggcaccagcttgcagagggcggcggtattctggaaccagccgcccagccgggcggagaggctgttgaccgtatagcacaacagcacgaaggccatcccgatccccatctggagcagaaaaaggccgttctcttcaaggctccggccccagccgaagagctggcaggcgtaaaccccgaccgcagaggagacgacggtgatgatggcgggcaggtaaacaaagacctgaaaccagccgaacaccgccgccgcaggcggacccgcgagatcctccgcataggcgatgaccccgcccggccggtcggtccgggccgccagctcaccgaggcagaggccgccgaaaacgatcccgatcccgcccagcaaaaaaaccgccacacccaacggcacattgccgccggtggcgaggaggatgttgtcgcttttgaaaaaaatgcccgacccgatcacgatccccacgatcatcgcgatcacggtcggcaagccgtaccgtcctttttccatccgcatccctgcccgtcccggacatccatccgggacattctatttgatagggccggtattagtatggttgtttcggacggtttcatgcgcagaaaagggcacggcacaaacgcgtgtacccgtcacaggggtcctggatagtggcaggaaacgaaatgccccggctcggccagaaccggctccggctgtttttccgcgcagagaggcccggccttggggcagcgggtgcagaacgggcagccggagggcacgtcgatggggctcggaatttcccctttcaggatcacccgctcccgcttgctgtccacgtccacatccagcaccgctgacagcagggactgggtgtagggatggaggggattgtcgaaaatcgtccgggtcacgccggtctccatgacgcagccaagatacatcaccgccaccgacgggcagatatccttcaccaccgccaaattgtgagagatgaagagataggtcatcccgagcttttgctgcaggtcagccaacaggttgaggatctgcgcgtggaccgacacgtccagcgccgataccggctcgtcgcagaccaggaattccggatggagggagatggcccgggcgatcccgatccgctgccgctgtccgcccgaaaaatcagaaggataccggtggagatcctcggcggacagccccaccagctcgagcagttcgagcacccgctgttccatctcagctttggtataaccgccccggatcagcatcggctcggacactaggcggaagacgtcgaaccggggattcagtgaggaaaacgggtcctggaagatcatctgcatatcccggcggagctcccgcaggccccggccggagagggcgtggacgtcttggcccttgaacagcacccggccgccggtcggcttcaccatcccgaggatggcgttggccagggtggatttcccacagccggattcccccaccaggccgaaggtttcgcctcgggggatacaaagggacacgtgggacaccgcccgcacttttttctttttaccaaaaggcacgccgccccggacagggaagtggacactcaggtcctccacccgtaccaggggcccgcccgtctgcttttgcggttcgttcatacccgcaccgtccttttatcgagtttcggcggcgtccccgccgtcgtccgtccattcccccggccgccagcagcggaccagccgcccgtccccggcagcggccagcgggggcagggtattccggcattgttcggtgcagagggcgcagcggggatggaaggtgcagccgtccggcttgtgcagggggctcggcaccgcgtccgggatctggatgaaacggcggcgttccgccgtcaggctcggcaccgcggccagcaggccccgggtatacggatggagcggccggtggaacagctcccgcagcggcgctttttccacaatccggccgcagtacatcacgtacaccgtgtctgccatatgggccaccacgctcagatcgtgggtgatgaggatcagggaggtcccctgctcccgctgcaggctcttgagtacatctaatacctgggcctggatggtgacgtccagggcggtggtgggctcgtcggcaatgatgagtttggggttgcaggcgaaggccatcgcgatgagcacccgctgacgcatgccgccgctgagctcatgggggaaatccccgtaccgccgttcgggggaggggacccccaccaggcgaagtgcctcgatggaggcctgcttggcctcacgccggttcatatgccggtggcggcggaacacctcgtcgagctggcggcccaccgtcatgaccgggttgagggcagtcagggcgtcctggaagatcatcgccatctcgctgccccggatgttctgcatttcccgttcagataagggaagcaggtcccggccctcaaattccagccggtcggcccgtaccacggcgggcggagtttccagcagcttcatgacggcaaggctggtcacactctttccgctgccgctctcgcccacgatggcggcgcattccccttcccggacttcgaggctgaccccttccaccgcccgcaccacgccggcggggccgggaaaaatcacctttaaattctccactgccagcgcggttttgtccgtcatggccggtcctgcctttctttccgggatgtctggagcttttataccccggccgtttctttctcctttaccggttccggtttggcggcggccggttcgtccatggaggcgaatacctcgtcgaaataggtgttgttgagggtcttgaacagcttatacaggccgctcgaccgcttcatgcggggattgaagatttcttccatcgccaggccgatccgcatgaaggaaaaaaccgacagaaaaatcccgatgccgggagccaggatccaccaccagtggccgaacagaagggcgccgccgctctgggcatcggccagcatcttgccccagctgatggcggtgggatccccgaggcccaggaaggagagtcccgcctcggctaccatgatgccggcgctggtcagcgcggtgctcatgataagcagatgggagacgccgggcaggatgtggcggaacatgatatggccccggcgggcaccggccagctcggccgccttgacgtagttgctgtttttgagcaccagaacctgagagcgcacaacccgggcaaggccggtccagccgaagatggtgaagatgaaaatgatcatgaaatagctcttgccaaagagattggtcagcacaatggtcagaggaagggtggggatgacgagaaggatatccaccacccgcatcaccaccatatccacgattccgccgagatagccggtcagaacccccatcagcgcaccgaggaaagcggtagcgaggccggtcgtgaccccgaccaccagggagacccgggtgccgtagatcagcatgctgaaaatatcctgcccggtggtgatagtggtgccgagcggatgggcgagggagggggagagccccttctcggcccgctgggtcacgtcatagggatcatagggcgcgatcaggggggcgaaaaccgccaggatgaccagcagccccgcgatgaatagaccgatccggcccttcggatgtttccacagcttggcgacaaaccggccgattccccggagtccgtccaggagcccggcggccagccgggagaaaacgcgtttcatcagcgggcaccccctaccgtgacccgcggatccagcaggcagtagcacagatccgtcaccaggttcgccaccagggcgaagaaagagaggaagagcataatgcccatcatcagcgggtaatcgttggtattgttggcgttgaggaacaaggtgcccatgccgttccagttgaaaatctgctcgatcacgaccgagccgcctatgaggccgctgacgctcatgccgaggttggtgacgatggggagcatcgcgttgcgcagcgtgtgcttgtacagcacctgccgggtgggcaggcctttggctcgggcggtgaggatgaagtcttcccccgagacggcgatgacgctgttccgggtattctgggcatagctgacgatgctgccgatactcatggagatcacaggcagggccgccgacgccgctaccaaagagatggaacggaggctccagtcgaaggacgcggccatgttgggatcggtataggcgggaaaccattcccattcaaacccgaggtacagcgataacagcagcgcgatgaaaaaggcgggcagggcagtggtgatggtggaggcgttgagcaccatggtgtctacccgccgcccccgcttccaggccgcgtaggagccgatgagcagccccagcaccaggccgatgaacagggtgctcaccgagagtaccaatgtccagggcagccgctcagcgatcaggtccgcgaccttgggggagcctgcctggaaggaggtgccgaggtccccgtgaagcagatcccccagataccgcagatactgctggaaggtcgaaacgtcgaagccgtactgctcccgggtgagctgcttgacgatgtcgtattcgatgtcgctcatattcccctggggcggatagtaccgctgcgccggatcctccaccccaatgcggggaataaagaaattcagcgtcaccacgataaaaaatatgaagatggtgtagaggatgcgcttgatcacataccccttgtgcataggcggacctcgtttctgtcccggcggggccggtatcggaccggtcacggccggaagagtgggcggcggctgatcagacccggcgcaagttctgcagcgatgtcagattgaaggcggtttcccccgcgtcggccgtccagccgtcgaaccggtcggtccgggcgacggagaggacatcggcgctgtacagggggattttgtaatattgctcggcggtgaggatctggatatcccggaccgcccggtatttttctgagagattaatagcccgccgcatcacgtcgatctgctcgttgacggcggacacctgcagcctcccgtagttggaggagcggttgaggttgctgaaatgggaattgtacatgatatcgatattcgagagggagaaggtaaccccctggatcgtcatgtcgaaattgcccccgtagagataggtagtctcaggcgagctgcccttggctgcgaacttgacctcgatcccgatcttttggaatagaacctgcaaaaacccgatggtctcctgctcgccgggcgaaccgaggatttggaaggaaatccgggtgccctccggggtcaggcggtagccggaggcatccttctgcggatagagttcatccaggatcgcgttggccctcgtccgcttttcctccatatccccggcgaggatatcggcctcgggattgtacagatccggcatgctcttgagaatcaggccggccggcaccgtggcaccggcgccgttgaggacattgcggatcagctcctcctgatccaccgccaaggcgatggcctcccgtacccggatgtcggtgagaatctcccgcatcgcggttttctgatccgcgggcggattgacgttgagaaccagcgcctggacaaacaaccccggaggggagagcagcgcgacgtcctcctcctgctcgaacagcccggcgtagttggggctgatcgagctgtccagcacatcgagatggccttttttcaaagcgtagatcgccacgttgatatcctggtacagaatgaagcggagggtatcgacggcgtagagatccccgccgtccgccccgcggaggtagtagtcctcccggcggcgaagcacaatttcctgggaattggtgagctccgcatcgagggtatagggcccgcagccgaccggattccggtaggcgtgggcgagcgcctcgttcggactggtgctgttgagggtgctgccgcccgccaggatcggagcgtagatatgctccggcagcacgaggacggtggacactaaaggggtgatcgcgccgaggactttgtttacctcgaaatagaaaacgtggtcccgttcctcttccgagatgggatacccggcttcattcgcaccgtggtcgtaggtgtagatcccctggcgggtcatccgcccggtctggctgtcgtacttgtgcagcagatcgctgacccacgcaagggcgcccgcatggttggaacgggtctggtcggcggcgatgtcgaaggtgaaatagatatcctccgccgtcaccggttccccgtcgctccaggtcgcgttggggttgagctcgaaccggacagggaaaaaggcggtgtcgtcccccccgtagacctcctccagccggtcataatccaccccgccgtccggggtgacgatcggattcccctccttatcgatatagcaccaggaatccgccagcaggggatggtattcccccgtgttctcatcgtattgggacagggtggaatacaccatgctcgagatggtgggggccacgccgtcccgggagagccagggcatgtacgaggtcgggaaagccgcccccacctctccgatatacaaggtggaggaggtgtcgcccctccggctcaccccgccgccggagcagcccggcaacagcacggcgcatacgagaagaaggccggccgtcaggccggccgctccccgccgcgcggctcttctatttcctgttcgctgtggtgtcttcataggctgtccgcgtgtcctttgcttcaggttggatttggactggggcatctgccgccatcagggcccgatcagtacggatactgcatcttgttgccgaagccctccggcgtcacgcagttgtcgtaaacctcttcgatccggaatatgtaggcgggccgggtgagccagcgggtcatatcgggagcgtgatagacgtcgtgctgcgcgttgatgaactgctgatagatctcccgtttgccggattcacactcgtcgtagatctccatcttgccccgcagctcataggagatggcaggcggctgataaaagatcagggttgcctcggggttgaccttataattggtgtagctatgcttcttcgccatttccaggctgccgaccttggtgaaatcgacccgcttctgtgcctcttcgccgtacatgtatttcaccagcagggcgaggccccgtttgctgtattccttgtcgtccttgtcatacgtcttgatatgctcgatatacgccgccagcgtctcctcgagatactcatccttgggcaggaagccgatgcccttgatgctggcgttgagtccggccgggccgttcgagacaaaggccggatcgtgggagcagaagctcaaaaacatcttttccggcgacaccatttcgccattgtagagcttgagaaccgaattggcccgggtccgaaaggcccagttgaagaagctttccgctgatttcataaagagtatcctccgatccttttgtccgtttaccggacgattggttttatcatagcacatttcgcccgtgtttgtacagcccgtctccggcgaaagttctgccaatacctcgtccattttgccgaaattgccttttcacggcccctttcggctgcttttacatggtaaatcattgacacaggccttcggttgcggtaaactggtgtcagatcgtgtcccgccggctccggccggccgatactagggataaaggagagtcgatatcctatgaaaaaatgccttgcttccctcggcgccctgaccatggccctgatggttgtcctgaccggatgcgacagcaagcccgcctcctccggcgcttcttccggccaagccgtgaatgacgccgccaaggacatcgcgggggattacatccttgacgccacgccgctgggcatgccgctgcagatctatctgaatatcggtgaagacggcagcttccgcctgagcaaccagctcaccgacgggcaggacaaaggcagtgggaaaatcgggaaaaacggcgatacctacatgctcctgttcagcgactccaccaccgaatcccccaagaccgcgaccttcaccgtggagggcaagcagctcgtgttcagcaccaagctcccttatgggaccagcggcttcgcccccaatacggaggacccggagaatccgatctatcccacggccaaggccatagcctataaggatgttctcggcgactacgtgggcagccacgaggaaaccattgccgcgatgaacgcgactctcacctactcctacaccctgaccctgtcctatggcgcggagtacaccttcgtcagcgagtataccgtgatgggccagccccagacctatacccagaccggcaccttcaccgtcgacggtgaaaagctgtccctgaccgccaagggcgaaagcacggcggaaacgggcaccatcaccgcggacaagacgatcacgaccaagatgctggtttccgcccagggcaaggagaagaaggatgtcaccctgaagcccgccaccaccggcgcctatgccggcacctatgccgggcggaaaaccatgagcatggggatgtccatgacggcggacgtgagcctggtgctggataagctcgggggatacacctataccgctaagatcgcgggtgaggacggggaatacaccgaatccggcacctttgccgtcgacgataccgccatcaccttcaccagcagcgccgaaggcgccgagcccatatccggcacactcgaaaatgacgtggtcaaggccaagttccgcatctcctctgcggtgccgatggcgaccgatctggtcttttattccggccggatccagggcaccttcaccgacacctccaccgacggggaacacgcgggatacacctctaccctggtgctgtcccccgacgcttcctacaccatcaccgtggtgaaagacggtaaggagacctatacggaaaaaggcaccttcgaaaccgccacctccccgatgggggtcagcctggtcctcaaatcggagaagggcgaaacctccggcgtggtgtccgacgcttcgatcaacatcaatcacccggtctcgaccggtgataccaccgccgtcgggttccagtacggcaaataaacccgttcgaacagatcccgggcgcctgtcgggcgcccgggacttttttgtgacatgcccgccttccaagttccggatttttccagggagccggtatacaaaccgccggttttgtagtataatacaaatgagtccaccggcttttccgggccctttccgacgcggcagcggacgggtgcgctttcagcccggcccggagcctatacgagcaaggaggatgccacatgaacaagaaaaccgtgatcaccatcggccggcagttcggcagcggcggccggcaggtcggccgccggattgccgacgagctgggcgtcccgttctacgataaggaattgctcgtccatgccgcaaaggagagcggcatggccaaggagctgtttgagaattacgacgaggcgcccaccaacagtctgctatattccctgtccatgggcgcgtattcgatgggcaacctgaacgcggccgcctttaacctgcccctcaatcacaaggtgttcctcgcgcaattcgacgcgatcaaaaagctggccgaacagggcggctgcgtcattgtgggccggtgcgcggattacgccctggcgaattacccccatctcgtcaatgtgttcatctacgcggacatcaaaaaacgggccgcccgggtagccgagtacgagggcatccctctcaaggaggcggaggagcgtgcgctgaagaccgataagaaacgcgccagctattataacttttattcgaacaaaaaatggggcgcggtggaaagctatcatctgtcggtggacagcggggccatcaatctcgacaacaccgcccggttgatcctggatttcgcacagatgaaagacccggtgtaaggccgaaagaaccccctcgggggcgaatccaggattcgcccccgagggggtttatcgtgcgcggaaagaccggcgcgcctatacctgcaccgtataatcccactcacccgccggattacggaacaccagcgccttcacaccgtacgcctccccgattttttcgggggtgaggacctcctccggcgggccgcttgcgagcacccgtccctctttcatcaaaaacaggcgggaacagaagcgcgccgcctggcgcaggtcatgcagcaccgctgtcaccagccgcccttccgcggccgccgtccggcaaagccggaaggcctcacaggcatgacggatgtccaggctggccgtcggctcgtcgagcagcaggcagggcgtatcctgcgcaagggcccgggcgagcatcacccgctggcgttcaccccccgacagacggctggccggacgagaggccagctccgcgcagcccgcctgggtcatagccgacgtgacccggggatccgagggggaggggaccgcgaacgccccgatccagggactgcgccccatcgcaacgacttgggcggcggtaaaatcgaagggtaccgtggtatcctggtgcatataggcgattttccgggcgaggacccgggggggataggaggaaaccggttttccgtccagccggatttcccccgccgccggcagcagccccgccagggcccgcagcagggtggtctttcccgccccgtttggcccgacgatgccggtaaaagtgccggccccggcctgaaaatccaccccccgcaggacggcaatggtttccccgctgccggacagagccgtatatgcaacgtttctggcttccagcaacctggctgccccctttccgtttatgtcgtttacagcccgcccatccggttctttttcgagcagagcaggaacaggaaatagggggcgccaagcagggccgtaacgatccccaccgaaaactcccggccctgaaatcccgcgagcccccgcaccaggctgtcgcagagcaccaggaacaaaccgccccctagagctgaggccaggcacagccgccggtgggacgggcctgtaagtatccgcatcatatgcggcaccatcaggcccacaaacccgatcggccctgttacacaaacgatacaggccgtacacagggaggcgagcaggatgaacaggagacggcagcgtcccgcgtggagccccagggcccgggcctgctcatccccgagcagcagcagatccagccgggaggataccagcagggttatcgtc

SEQ ID NO: 1151 - DNA, 4019 bp, Unknown
  16S sequences of unknown bacteria
tattcatacaggaaacatgcaacctcatgtccatttccaatatcttttaatgtaggaacttcctttttgcaccgctctgttgcataactgcatcgatcactaaacgggcatcctgccggacgattggtaagacttggtacctcaccccggatttctacccgctccctggtcttttctacctttggatccgcaacaggtaccgctcccaaaagaacctttgtataaggatgaagtgtattgttgtaaagttcttcacattcagcgatctcaacgatccttcccaaatacatgaccagaatacggtcactgatatgttttactactgccaggtcatgagcaataaacagataagtaagtcccagttttgcctgaagttcttccagcaagttaataatctgagcctggattgaaacatccagagcagagattggctcatcacagatgatcaaatccggattagaagaaagagctctcgcaataccgattctctgtctctgtccaccagaaaactcatggggaacacggtttttcatggacggatccagatctaccatacgcagcagttcatctaccctttgttcatattcttctctggtctttaccagcttatggatcagcagagattctccaactatagattccgctgtctgtcttggatcaagagaggaaaatggatcctggaagatcattgccattttctttctgtatggatacatctgcttgtcgttaaacttcgcaatatcagttcctgcgaaatcaatctcacctgtatccggctgatacacacgcataatgcatcttgccaatgttgtttttccacatccagactcccctacgattcctaatgtctctccttttctaactttgaaactgatatcctcaatggcttttacatctccgatatgtttgcgcatcattcctttatagatcgggaaatatttccttacatcttttacatccagacagatttcatcaccgattactgcgcgctgagctttctttacaggcttcccatcaatttctgccttcttcataaccttttctgcttctgttaaatggcaagcacagaaatggtccttctccagttctttcaattccggctttttctgctcccggcatttgtccatatgatactcgcaccggtcataaaacggacaatactcagggcgaagtgccgggttcggtggaagtccctcaatagggatcagtatacggtccctgtcatcatccagtcttgggatcgcccgaagcagagctcttgtatatggatgttccggattttcaaacagtctttctgcatccgttgtttcaacaataccccccgcatacataacataaatacgctctgcaaatcttgctacaatacccaggttatgggtaacgatcactactgctgtattggtctttttagcaatatcacggatcatttccaggatctgtgcctgggtagtaacatcaagagctgttgtagcctcatctgcaacaagaacagagggttcagaagacatcgccattgcgatcatgatcctctggcgcataccacctgaaaactgctgtggataatacgcaaaacgttcttctgcatctgggatatttaccatcttcatcatttcaatggcacgtttttttgcatcttccttacttagatgaaggtgttctatgatattttcctggatctgaaagcctactgtcagaaccggatttaaagaagtcatcggttcctggaagatcatactgactcttccgccacgcatcttacggacttcagcactgtttgaaccatattccagcatatttttatcatttccatccagatacacttctccaccagtcacctttcctggttcctggatcagctgcagtgcactcatcattgttactgatttaccacttccagactcgcctacgattccgatgatctcaccaggattcagataaagggaaacgtcttctattgctttaaacatttttccatctgtccgaaaactggtttcaatatgcttgatctcatataaatgcttctctgccatcttatgattcacctctcagtcttggatccaacgcatctcttacgccgtcacccaacatatttaatgaaataaccaggatcgcaacacaaactccaggtaccagagcatataccggattgtccatcaggaaatttcttccctcacttaccatgcttccccaggaagccgttggagcgctgataccaagtcccaggaagcttaaacctgcttcggccaggatagtggaacctacctgctgtgtcatcataacgatgatcggtgaaatactgtttggtaaaatatgtctgaacatcagacggaaatctttatttccttgaagctttccagccataatataatctgcctgtttaatggtaagtacctgacctctcatcattctcacatatcctgccatagatgagataccaaggataattgccagattacggataccgcttccaaaaacggcagttaatgccattgccagtataatctgaggaatcgcacggacagcttccattaatcgtgtgataacatcatcgatccagccgccaaagtaaccggcgatcataccaagcactgtaccaactgcacaggctacaacaactgccagaacaccaatgattaggctgactcttgttccgtaaatgatacggcttaatacatcacgaccgaaattatcagttcctaaaacatgagccgcacttggcagctgaagaaatgctgcaaaatcaggcttgtccggatcataaggtgccacaaatggtgcaaatatggccagaaagataaatattaacactatgattgcattgatcactgttacttttctggcaaatactgtttttaagaactttttgatattctttgtatctttcattttgtcctcccacttattcaaaacgtactcgtggatctacaactgcatacagaatatctgttgccagatttacgatgcatgataccagtgcaatggcaagtacacacgcctgtactaccggaatatctcttgactggatcgcttttaccattaaagatcccattcctggaatattaaaaacagattccacaaacatagaaccggcgatcaggtttccaagacgcattccaaggatcgtaataacaggaatcagagcattttttaaagcatgaagataaataactttgttgtttgcaatacctttgcttcgtgctgtacgtatgtagtcctgccggatcacttccagcatactggatcgtgtctgtcttgtagtagaagcaatacctccaagagaaaggcaaaacagaggcatgatcatctgtttccagcctgctgcattgatccagggccagtcaaaaccataagacggaagccaaccaagtttcattgcaaacacgaacatgatcagtaatgcaaaccagaactgtggaagacaggcagttacatttgcaataagagttaccactgtatcaagaggctttcctctgttcactgcactgatcactccaaaaaggattccaaatggaacactgataataaatgccgcaatggagaaaaacaatgtaattggtattcttgctgcgagtacttcggatgttttcatatgaaactgtgtagactcccccagatctccatgaagcgcatccgccagccagctgaagtacctgacgatcaccggttgatccaacttcaattcatggaatacacgattgtactcttccggagaaacttcctcacccagcatagcgtaaaccggatcacctggtatcattgataccaaaaggaaaataaaaatagaaagaagaaataccaccaatatcatttgtcctgttctttttaatacatatcccttcattttttcgtctgtcagaacaagttctgcacgtcctcccctcttcttgatatcttaattttaaatgtttttttataggaattccaatcatttgtagcacattttttatagcctgcgcctatggtttatatattttgcatcatttttccaatttattcccttgattttcctcttcagatag

SEQ ID NO: 1152 - DNA, 2058 bp, Unknown
  16S sequences of unknown bacteria
aaagttaaaatcaaaaataccccccgcctttgcagcctgccttttgtcgtcattcgttttcggctttgccgctcatttctaccgcatgacaaactggcttccgaactgggattccctcgttttcagggaggacccgcagcacatggaaagcctcggcagatggtttttgtcgtttgcctcgtcgctcagcaccgattatgagctgccttggctttgcggactaatttgtctgctgtttttcggcctcggggccgccgttatatgcaaaatgttcggggtggagaaaaagctttcggccgttcttatcggcgcgctgacggtcacctttcccgccgttacctccacctttacctactgctatgtctccgacgcatacgccctttcctttttgcttgcctgtctcggagcatactttgtttcaaaaaaaggtcttaaaaatgccgcggtcggcgtgggctttgccgtgctgtcgctgggaatttatcaggcctatataacggtttttgcggctctgctcaccgcccgcctgataatggatctgctttgcggggaaaatgccgcggcgtcgcttaaaaaggcgggaaaatatatcgtctgcgccgctcttgcggtggggatttatgcggggattttcgccgtcgtttgcgccgtttgcaaggtcaccccgtccgattatcaggaactttcaaacgcggtggagcttaaaaatctttctcccctttcctcggtggcctcatcgctttatatcttttggaagttttttgtggatttctcgacgggtataaacgcctattcgattgtgaatcttgcgtttttggctcttttggccgtgggatattccgccgctgcgctttcccgccttcggggcggacggattttcttgtgggcggtttattcgctgtcgattcccttcggctgctcggcgctctatttcgcaaaccccgagcttgattaccattcactcatgaaaatgagctttttcatagtgtatatatacgccgttatgctctatgagaaatttcccgcaaaaaacattaccgccgaaaaggtcaaggcctgggcggtgcttactttgtgctcggtcatcgtatatgtcaacatctgcacggcaaacgtggcctatcacaagctgcaaatggcctatgaaaaatcctacggcatacttatgagaatttccgaccgtatcgagtcgcttgacggctatgaaaaggcgaaaaacattttggttgtgggctggcttgaaaattccgaaagctattcggtgaatttcccgcccgaaatcgtcggaaccacggacggacttataatccgccacgacgacgaggcggtggggcagagcgtactgacctcggctcttaacgattacagcaacatttccctcgatttcctgtcgggtgatacggcaaaggagcttaaaaacaccgataaggtcaaatcgatgccctgctttcccgccgacggctcggtggatatgataggggacaccgttgtggtaaagctgtgcgaggaaaccgactgattaaggaggaaagggtcgtgaaaaaggagccttcggtatatttttgcgccgacgatttcggccttgacgggcaaagctgcgacagcattgccgaatgtgtaaaaaacggcgtcataaataaggtcagcgtttttgccaacagccgcctcgatgacctatcaaagcgcgtggcggcgcttgacggggcggttttgtgccctcatctgaattttgtcgagggctgctgcgttgggcaaaaggaaaagctgaccctgctgtgcgatgagaacggaattttcaaacatacctttgcggggctgctttttctttcgatttttaaaaggaagcgtctgcaagaggaaatatttcttgaaacctcggtacagctggaaaggttttttgcccttgcggggaaaaatcgccccctttttctcgatagtcatcagcacgtccacatgattccgcccgttctttgggcgatatgcggcgcggccgagaaaaatggcctttcgatttcgtatcttaggaccccgagtgaggccgccgctccctttcttgcc

SEQ ID NO: 1153 - DNA, 1677 bp, Unknown
  16S sequences of unknown bacteria
gctggacctgttcatgggcgtgcacggcggtgttcaggtcgtgcaggaccatcagtatcgttatcccgagagtcctgttgagccgccgcacgagctcgagcacctcaatctgatagcctatatcaagatatgtcgtcggctcgtcgaggacgagtatctcaggttcctgagcgaccgtcatggcgatccacgcgcgctgtctctcgccgccggacagcgttgagaggcgctgcgacgacagcttttcgagcccggtcattcttatgacctccgagacgacgtctccgtcctccttcgtcagtcctcttccgggtctcatgtacggatatctgccataggaaacgagcgtccgcacgtcgatgtccggcggggacgtgtgcacctgcgggagatacgcgattcttctcgcgatgaccttcggtctgtaccctctcagcggcttcgagtcgaggacgcatacgccggtcttcggggtcacggcacgcgggatgaccttcagaagggtcgattttccgcatccgttctgaccgatcagggtcatcacctttcccttcggcacatcgagcgtcagaccggaaagcacttttttcttcccgtagtcgaccgagatattctgaaatccgaaatacatcagtctccccccttcccgcgcgagcgcagcagaaacaggaagaacggcgcgccgatgaacgagattattatgctgaccggaacctctcccggcggcattatcacccgtccgaccgtgtcgcatatgacaatcagcgagaacccgagcagcgtcgacgccggaaagagaaacctgtgatccgacccgacgagcagtctcgcgatatgcggcacgataagcccgacaaagctgagcattccgaccgccgcgatagccgctccggagagcagcgacgataccgcgatgagaataaatctgaaaagctcagtccgcagcccgagcgagttcgccgtctcgtccccgagcatgagaatgttcatcttcgacggcaggaacaggcagatcgccattcccgcgagggcgtacggaagtatcatataaaagctcttccacccgcacccgttgagcccgccgacgagaaatccggacgcgtttccgagcgactccgcgaacagcgtctttattatgtcgttgaacgcgccgaacagcgccgagaccgccatgcccgagagtatcatccgcacaggactgacgcccttctggtacgcgagcgcgtaaatgagcatcgtcgtcacgaacgcgcccgccatcgccccgatcgggagaaggtacgagtatgacggaaagaccacgagcgtcagatacccgacaaagctcgctccgccggtgacgccgatggtagacggtgaggcgaggttattgcgcatgaccccctgaagaatacatcccgcgagagcgagacagattccaacaagcccgccggtcagtatccgcggaaatctgagattccagacgataagccgcgccgttgaatcatcttcaacgaagatcgcccgcacgacctcacgcggtgagaactctatagttccgatcccgacgcacacgatgacggcggcaaggctcagcgcgagcagaaccgcgatcacgatcacgccgcgcacatatttcttcgcgttcgtcatctcttcgcgagaaattccttcaccgcttcgcggcaggcggcgagg

SEQ ID NO: 1154 - DNA, 32759 bp, Unknown
  16S sequences of unknown bacteria
cgcaaaggcggtggaagaggggcgtcaggcgattgtcctggtgccggaaatctctctgacccctcagacgatcgagcgttttgtcagccggttcggtccggaaaacgtggcggtccttcacagcaggctgaccaggagacagcgctgggaacagtggctgcgggtgagaggcggcagggcaaaaatcctcatcggggctcgtctgggcgtattcgctcctttttctaatctgggtgcggttatcgtagatgaggaacatgaggcttcctataaatcggatatgacgccgaaatatgacgcgatagacgcggcggtgaagcggggggagctcaactccgctgtcgtgattctgggtaccgccacaccgtcggtggtgtccagattccgcgcgtcctcaggacagtatcaggaactgcgtcttccggtgcggtacaaccgtacgccgcttccgcgagtggaaatcgcggatatgagaaaggaactgagagagggaaaccgcagtattttcagcagagttctttatgaaaagtcgatgaaagctctgtcggaggggaagcaggtgattttctttctcaaccggagagggtattcttctttcatttcctgcagaaactgcggttttgccctgaaatgcgaaacctgcgggatctccatgacataccataagtccagtggcatggcggaatgccattactgcggccggaggataaaagtgcctgagatctgtccttcctgcggcagccggtatatccgtcatttcggcatcggtacggagcaggtggaagagctggcggcggaggcatttcccggcaggaaaatcgcccggctggatctggataccgcgaaaaaaaagggtgatgctcagaaaattttgaatgcttttcaccggggaaagacggatattctggtgggaacgcagctggtggccaaagggttggattttcagaatgtcggcgtggtgggaatcatcgcggcggatgtgacgctgaatattccggatttccgttcggcggagcggacctttcagctgatcacacaggcggcgggccgctgcggcagaggcgacgagcccggcgacgtggtgattcagacgtattgtccggaagaaaatgcggtaaaatatgcagcagagggagattacgaaggtttttacagaagagagctgatgatccggaatctggcgggatacccgccttttacgaatatcatccggctggtattttacgataaagaggaaagcacggcgcgaagagaagcacaggaagtcttttttcgggtgaaagaaaatcctgcggcgcagcagcgggaactgtttgcgcctcagccggcttatctgaataaaatgaacgaaaattacagatatcagtttatgataaaaagtccgttggaaaagacccgaaaatatcttaaaataatctcggagatcaaacgggaacggacagaacgcagcggaacgaagtctgtaatgctggtggaaatcgatccgtacagtatgacatagcgttttttcagaaaacagaagcgctgactgcaaaagacagccggattgtgccggtgtgcagcgcagacaggcggaggagagcggtgtactgttgctgctgaagaaaaccgcgtgcatgacaggagaagcaaggaggaaaacatggcattaagaaacatcgtgaaagagggcgacgaggttctcagaaaaaagtgcagggcagtcgacaagatcgatgacagaattctgacgattctggacgatatggcggagacgctgtatgattccggcggcgtggggctggcggcgcctcaggtgggaattctcagaagaatcgtggtgatcgacgtaggcgaggggctcatcgagctgatcaatcccgagattatagaaaaagacggagaagtcagcgacagcgagggctgtctgagcattcccggaaaatacggtgaagtggtgagacctgcctatgtgaaagtgaaggcgctcaaccggcagggagaagaagcggaatacgaggggacagagcttttggccagagctttttgtcacgagatcgatcatctggacggtattctttatatcgacagggcgcagcaggtatgggagacggaagaataatgaaagaaaacatgcgtattatttttatggggacgccggaatttgccgtacctcctctcagagcgatggcggagggaggatacgatgtgattctcgcggtgacacagccggacagagcgcgagaccggggaaagaagattcagcctacgccggtgaaggcggctgcgctcgaatacggtatcgaagtggttcagccggaccgggtgaaaaataatgaggaatttctggaacggatccggcgggaagcgccggatctcatcatcgtggcggcgtacggaaaaattctgccgaaggaacttttggaacttccgcgtctgggctgcgtcaatatccacgcctctcttctgccgcgcttccgcggcgccgcgccgattcagcgcagcatcatcgaaggcgacagagagaccggtatcactctgatgtatatggaagaggggctggataccggggatatgattgcgaagtcgtctacagaaatcgggaaaaaggatgcggacgcactccacgacgaactctcagagatgggagcagctctgttgatggaatatctgccgaaaatcgccgccggcgatatcgcgccggaaaaacaggacgattcgctgtcctgctatgcgccgatgctcacaaaagaagagggcagagccgatttttcgaagagcgcacagcagatcgaacgtctcgtgcgcgggatgggttcctggccgggcgtgacggcggaatacgggaaactgcgaatgaagatcaaagcggccggcgttatcgcggaagagacagatgcggctccaggcacgattctcgctgcggacaagaaggggctgaaggtggcctgcggagaagggattcttctgatcacggaactacagatgccgggaaagagggcgatgacagcagaggattacctgaaagggaacaaaatcgaaacaggaattattctgaagtgattctgtttcaaactgcaaattccagggaaaatatattattaagagttttttgtaatatgaagcgattttgggacggcgtcaagcggattgcggattaccgacggtctcgccggaattccccggcccggtttgcggcggaaaccgccgggacctgacggaagactcgcatccggcccggcgggggatggcaggattgttttattgttacagatgatatttcgatgttttgtttacaggaatttatctatgatatcggtgaacaagacggctttgatttcagcggggatttccgacggatctcagtgcggaattccggcatacaaaaaggagtaaattagggatgatctattttgattcgacgatgctgcttctgatacctgcgatcattctggctttttacgcgcagtttaaagtcaggaattcttaccgcaaatactcacaggctgcggcaagcagaggactcacgggatacgagacggcccggcgcattctcgacgcaaacggtctcaatcacataaagatcgaacgggtgggcggagagctcaccgaccactatgacccgcgcaccggggttgtgcggctgtccgacggaatttacggcggcaggtctatcgcctcggtcagtgtggcggcccacgaaatcgggcatgcgattcagcatgcagagggctataaggcgctgacgattcgaaacagtctggtaccggtggtaaatatcgcgtcgaatctcgcttggcctatggcgctgatcggccttctgatcggttctatgacgggaacgatgattttcgacatcgctatcattctctacgcggtagcggtactgtttcaggtgatcactctgccggtggagctcaatgccagcagcagggcgattcagcagctcaacggcttggggattctctccgacggagaagaacagagccaggcgaagagaatgctgggcgctgcggctctgacttatatcgctgctgcggcggtcgcggtagtaaacctgctgcggctgatactgattagaaataataacgattagcgagacgagacagcacagaatgaaatgaaaatgcagatacggcggatttccgccgtattttttgtgagctgatttcggtgtatccgcagaaaatgcagatctttagaagaaatctgtgttccaaagcgaaatctccttttcaaaacggtcctgcggagataaaatgatactattgtcaaaagaaggaaccaatcctcaggcaggttcccggaaagtatctgtgcagaaagaatatacagcgcgaaaagtatctgtggaaagaatatccgcgaagggcggatctctgagggaaacggcggacggcaaaagaaaaagcggagaaggaaaaattatgatcagatttaataatgactacaatcggagcgcgcatccggcggtactggaagcgctgatgaagagcagcggagaaagctacggcggttacggactggacttctggtgcgaaaaagcggcggaggagatcgggaaatacatcggaacggaagaagcggatattcattttctggtgggagggacgcaggccaattttacggtgatcacagcggctctgcgctcttatcagagcgttatcagcgcggatacgggccatattcaggggcatgagaccggagcggtggagaataccggacataagatcatcgctcttccttccgcggatggaaagatcacggcggcgcaggtgcgagaacaggcggagctctatctcggcagcggaatcaaggaacatatcactcagccgaagatggtatatctttcttttcctacggaattcggcacggtttattcgaaagccgaactggaggagatcagcggtgtctgcagaaggtatggactctttctctttatcgacggcgcgagactgggatatggtctgggtgcgtcggaagcggacgtcacgatggaggatatcgcccggctcgccgacgttttttactgcggaggcacgaagtgcggcgcgctcttcggagaggcggtggtgatcatcaatcctgttctcaagacggatttccgcagctacatcaagcagaacggagggatgctggcgaagggctggctgctggggattcagttttacaccctgtttcgggacgggctctattttaaaatcactcaggaggccgaccggcaggccatgaggattcggcaggctttccggcagaaaggaattcctttttttgtcgagagtccgacgaatcagcagtttgtcgtggtgaagaacagtgtcgcggaaaaactggcggaaaaatatatttacgaattcgagcaaaaaatagacgaagatcactgctgtatccgtttctgcaccagctggagcacgccggaagaggatgtggaagctctgatacgggacatcgcagatctttaaaatagcttcggttttttgcagcgtacgggttttcgcagatggggaataccggaaatatcgagggaaataaaagcggattaatgattatccggtggaattcaacggaaaaaaggaatctcatattcgagaacgatattttattatgagtcatctgccaaaatttacaaaaaatatgagagcgtcttttgcggagagccgttggatcaaagagggaagagaacgatgaatcacctgggaacacaaattattcataccggacgtctgttgctgcggccctatcgcagaggagacgagtatcagatgtacagaaattttctgggggattcccgggtgactgagtatgtctcgtgggagacatatcccagcgcggaggcggccagagagcttctgcagctgcatcttttcagctaccggcagaatccgcggggatattatgaatgggctatcgtgcggaacggtgagatcatcggttcagcggatgcttttgacatccgggaggagaccgaaagctgtgaagtggggtgtacggtgggcagccgtttctggggcgccggttttgcggaggaggcgcttcgggcggtgatttattttctgttcgaagaagttggatttcggcggatttccgcgtcctgcggggcggaaaatacctcagcccgcatgctcttggagaatgtaggaatgcggtgtgaagggcggtttcgccgggcggtcagataccgcagcggggaggaggacgatctgctgcattatgctgtgctgagggaggatttgtatggacaataacagaagaacggcgtatgaggttctgctcgcggtggagtcgaaggaagcttattccaatatcgctctcaacgatgcggtgaagagaaggtctccggaagacgaggcgtttgtgcggacgctggtttacggagtaatcgaaaatcagatctatttggattacaaactggcgcattttgtccgttccggtctgaagaaagttaagcgtcaggcactgatcctgctccgcatgggagcatatcagctggaatttctcggcggtgttcccgattacgccgcaatcgacgaatctgtgaagatcgcaaagaaagtatgccgggggctggaaggctttatcaacggtgttctcagggcgtatcagcgttcctcagggggaatctgcctgccggacagtgaattggatccggtccgggcgctttccgtccgctattcctataccgaggatatcgcggcgctgtgggtccgcatgttcggtctgaaagatgcggagcggctgatggccgccggcaatgaaacgcccccgctgacggtgagggtaaatcctttaaggaccgacggggaatcgctgtcggagacgcttcgcgccaaggggtttgaggcggaagtgattttggacggcatggcgctgaaattacggggaagcggcgtgctggctgacgagacggagaaaaagggtcttttctccgttcaggatgtgagttctatgaagatgattcaggcgctggcgccggaaaaaggagacactgtactggacctctgcgcggcgccgggaggcaaatcgctggcggcggcggagcggatgggcaacgaaggacgcgtcatttcctgcgatatttacgaccacaaactccgtctgatcgaaagagccgcgcagcggctcggcgtgactatcgtggagactcggaaaaacgacggcgcagtatttaacgaagaatttgccggaatcgcagataaagtcatcgtggatgctccctgttccggtctgggcgtcgtgcgccgcaagccggagataaagcttcacacatacgggaaagatctggaacatctggcggatcttcagctgcagatcctcgagacggcagcttgttatctcaagccggaaggcacgatgatctacagcacgtgcaccgtttcagaaatcgaaaatcggggtgtgatcgaccgatttcttaagaaaaataaaaatttttttgcggcggaggaaaaacagcttcttccacatattgacaatgctgacggcttttatttctgcgccctgcggcgatttgagtgaaaaaaataacgatgaaaaagagggcgaaatccggcttcatttttgcagttgttctccccaaaggatgatttttcgttgcaaaaatgggattcattgtgtataataggcactgtgttacgaatttatcggcaagtgcgccggctgaatcggcaaatttaagtcagcgcatttaaattcgaaagcataaaaagttgaaacagaattgaatattgagttgaaatgaaggagactgctttatgatttcgcgaaagacgataataagtttagccttagttttcgttatgtcattttcctgcgtcgcatcttatgcagatacggcggtcagcagtacaaatgccggcgaaagccaggcggcagcggaaaagttgtacacctacggactctttaaaggcggtgcttacgggtttaatctgaacggaaccacgacaaaggccgaagccgccgctatggtagtgcgtcttctcggcggagaagacgacgctttatccggtgcatatcatcatccgtacaaggatgtaaaggactggtcttccgattatatcggctatctttatgaaaacggcattctcgaagataccgcggacggttcttatcatccggatcagaacatcgatacaaagacatttctcactatggttctcaacgctttgggttatgtggaaagtggacaggacctcgatgaggaacagttatatgcgacggcggtgagctgcggacttctgaccgatgcggaagcaaaggaaatgaagaaagacagtttcacgagagcgacgctggtgctgatcgcggaagatgcgctgaatacgaagctcagcggtacggattacacgctgtatcagttcctggacaatatgggtgtaatcgaatctctcgccgctccgacagatgcggtaaagtacggcaatgttccgtcgaagccggctgtttcggagactgcggcgaacgaagatctcacaaagaagatcacgacaactgcgaagcagtacttgggaatccgctacagaagcggaggaaaatccccttctacgggatttgactgctctggatttgtcggttatgttatgatcaaaagcaatgtatgggataagttctacggaagctgcgacggtgtgatcgcacagtgcaagacggtttccaaggcggaagcaaagccgggagatctggtgttctttaagaatacatataagacctcaaagacatatacacatgtaggcatatatcttggtaataaccagatgattcattccgctaccagcagcggcatttcgatcagtaacatttcatcaggctactggggaagccattatgcttgtatagcgcgtcctacagcgatgatgtagattttacaaaagaaaaaatctgattttaccgagtgaccgccggctggcggtcactctttgtttgaagggctctgttttctggcagagcggaaatccgtcggagacggcggttttccgcggacggtctgtcaatacaaatggaggccggcgccggaaagcgaaactttttggtatacggagacagaaaatgcttgaatttggattcagaagcgataccggaaaaaagcgggaaaataatcaggacgcttttttcgtgatgcccgaggccggtatttttctcgtggccgacggggtgggaggtcataattccggcgaggtcgcaagccggacgacgatgacagatattgcgggatttatcagagaaaatccgattccggacagcgagggagacgatattctgatcgattattttctctctctgatcacggaagtgaatacacacgtccgtgagatggcgcaggatacggctcccagagggatggccaccacgctgctgatgttgtatattaaggctgataccgcatacgttataaatatcggggacagcagggcttatctgatccgcgacggcgggatttctcagatcacggaagatcatacctttgttcacgatctggtcaagaaaggcattatcacggaagtgcaggctcagacgcacccggacagaaatatgatcacccgggctatcggtgcggaaaagtctgtcgaacccgatttttatatgtttaaaatttatccgcaggatattattttaatgtgcaccgatgggttgtataatgaagtgagtaaagaagatatctgcaggatggctctcggagccaaaaatatgcgggaagcgtgcgcaaggcttgtagatgcagcgaatgacaatgcgggcagcgataatatcaccgttgtcggcgtcaaattttaatcagagggggaagacctgttatgggcagtaaaatattagcaggaagatacgagttaatcgaaaaaatcggagacggcggcatggcggtggtgtataaagccaaagaccgtctgctcaaccgtttcgttgccataaaaattctgaaaccggaattcatcaaagacccgaagtttatcgacagtttccggagggagtctcaggccgctgccggtctgtcccacccgaatatcgtttcggtatttgacgtgggcaaagaaggaaacatctattatatcgtcatggaagtcctggagggggatacgctcagcgatatcatccgcagagaagggcatctcagcgaaatgcgggccatcgacatcgccaagcagatcgctcaggcgctgagttccgcgcacaaaaagaatatcattcaccgcgatgtgaagcctcacaatattctgatgtccgaagacggtactgcgaagatcgcagacttcggaatcgcgaaagcggtgaacagcggtacgatcgtgaacaatacaagcactgtgatgggctcggttcactatctctcgccagagcaggcaagaggcggttatgtggacgcgcgatcggatatctattcgcttggaattgtgctgtatgagatgcttacgggaaatgtcccgttcgacggagataacccggtcagcgtggctatgatgcatatgaacgaggcggttccgcctccttccagaatcaacccgtcggtttctccggctctcgacaaggtcgtactcaaagctaccgccaagcatcagccggaccgctataagagtgcggacgagatgtatgaggctctggtacaggcggaaaacgccattgtctccgagcagagcggcatgggactgagagaattttatgcgattccgcgggattccgaaaagaatccgcaggacggcggttatgatgatttcggtaattaccgggattttgacgaggaggaagacgaggaaaaaggcctttttgcaggaaagttctccagaaagaagaaggaaggtccggagaaaaattcttcgggagggaacgatgccaaaaagacatcgaagaagaggaagattcttcccgtaattctggcgcttatctgcgcgattccgctgagcatcgtacttctgaatgctttcggagattcgggaaagacggttaaaattcccgatgtactgggtatgacggaggaagaagctgccaagacattggagaaggcggggctggaatacaccctgggcactccggtgatgagcgacgaatacgaggcgggggaagtggtctccaccgatccggatataggccgcgaggtaaagaaggggtataaggtccgtctgattctcagtaagggaaccgatgcggagacggtcaagacaccgaacactgtcggaaagaagctgcaggatgctaaggatcttctggagaaattcgatctgcagtgcggcagtattcaatacgatgaggaaagtgatcttcctgatggtacggtagtcagtcaggaccctgaagcgggtgaagaggtagagaccggaacgaaagtcaatctcgtggtaagccgcagcgcggcggatgcggagattccggatgtgagaggactctctcagagcgatgcgaaagccgcactggaagaaaaaggttttcagctgggcaaagtcagcaccgattacagcgatgaggtagaggaagggctggttatctcgcagagtccgaaacagggatcggaagaatccgaaggcacttccgtagatatcgtcatcagtcagggaccggagaaacaggagccgcagtatgtgtcgattcctctgactgtggattacggaaaagcggaaaacgaggtcttcattcttacggttaccgtgacggattccaacggcctgcgctatattgtaaacaaccagcagcgcaataaggcggacggttccgaaaaggtcgttctgacgggtgtcggtacggatgccaccgtcagagtgctcatggataatactatcgtaaatcagtacagtgcgaattttgagacaggtgatttaaattaacattgcagacaacagagaaaacagatcagaaaactcaaaatacggaacgattgtgaaaggaattgccggtttctactatgtggataccggcaatgctgtatatgagtgtaaagcgagaggcgttttcaagaataaaagtcagaaaccgtatgtgggcgacgaagtgctcctcgattttgccggaggtttgccagtgatttcggagatcggtccgcgcagaaatctgtttgaacgcccgccggtagccaatgtggagcagtttgtcgtcgtcagcgcctttcaaagtcccgcgccgaattttgcagtgatcgataaatttctgaccatggcggagctgaaagaggtagacgtggtgatgtgttttaataagatggacttggcggatgaggacgcggcgcggaaattgagagaagtctacgcgccggtctaccctgtgattttttccgacgccaaaagtgagaaagggatcgaagaactgatcccgtatctgaagggcagacgcagcgctttggccggtccttcaggggtgggaaaatctacgattatgaataatctgatccgcgggctcaatgcgcagacgggaacggtaagcgaaaagacaaagcggggccgtcacaccacgcgccatgtggagctcttccggctggaattcggcggtatgatcttcgatacgccggggtttacctcttttgacgctcctttggcagaggaatcggaactctctcatatgttccgggaattcggggatttttccgatgaatgcagattcagcggctgccgtcaccagaacgagccgggatgcgctgtaaaggaagcggtgagccggggagatatcgctgagagccggtataagtcttatctgggtcagctgaaagagatacgggaacgggagaggcggaagtatacctgacatccgtctgcgggcgttttgtccgcccgcggagaaagcgcgacagagcgctccggaaacgggcggcggggctttcggtattttacggagcgaagcctcgacgcagatcgaagtgcggacggaatcgccgcggggttttgaataagaaatatttgtcaaatgttacaggagagatgattatgaaaagactggcaccgtctgttttatcggcggatttttcaaaattaggagaagacgtaaagacaatcgaagatgcgggcgcgcatctgattcacgtggacgtcatggacgggcattttgttcccaatatcaccatcgggccggcggtgatgaaaagtctcgtacgatggacatcgatgcctttcgatgtccatctgatgatctccgatccggacaagtacgctccgctgtttgtaacgcctcagacggagtttatcaccgtacatgcagaggcctgcactcatctgcatcgaacgctgcagtcgatcagagcgctgggggtaaaagccggcgtagcgctcaatccggcgacatctctttccgctgtggaatatgtggcggacttggcggatctgattttggtcatgtcagtcaatccggggttcggcggacagtctttcatcccttcggcgctggaaaaggtacagcgtctggcggatctgagagccgagaaaggctatacttttgaaatcgagatcgacggaggcgtcggtctgggaaatatcgcggaggtttcggctgccggcgtggatatcgccgtggcgggcagcgcggtatacggcgcggaggatgtgggacagagagtgaaagagctcgtcgcacggatgggatgagattgtcttatgagcgtaaggaaatgcggcaaatttgtgctgatttcgtctccgcatgccgtatttgccgaagagcgggtctcattgacaaacaatagaaatggaatataatgaaaaagatagacattcagcgtggaggagttctttctcactgcgttcgatgaaggaggatttttacgatgattaagataacactggcagacggaagtgtcagggagatggaagacggaagcagtgtgctggatgcggcgaagagcatcagccgcggactggcgaaagaagcagtggccgcaaaggtaaacggagagatccggggactggagtatgtgctccccggagactgtacgctggaaattctgaagttttccgatgaagagggcgctcatacgttccgccacacggcttctcatattctcgcccaggcggtaaagaagctctatccggaagcaaagctggccatcggaccggcgatcgacaacggattttactatgatttcgatctggaacaccggtttacagaagaagattttgccgcgatagaaaaggaaatgaagaagatcgtggaatccggcctcaagctggagcggttcgaactgccgagagcggaagctctggcgcttatggaggaaaagaaagaagactacaaagtggaactgatcaacgatcttccggaggacgcggttatttctttctataagcagggcgattttacggatctctgcgcgggtccgcacctttcctctacgtctccggtaaaggcggttaagattcagagtgtggcgggcgcatactggagaggggacgaaaaaaataaaatgcttcagagaatttacgccaccgcatttccgaagcagaaagatctggacgagtatctcgcgatgctggaagaagcgaaaaagcgggatcaccggaagatcggcaaggagatggacctctttgctatctatgaagagggtcccggctttccgtttttcatgccgaagggaatggtgatccgaaatgaactggaatccttctggagacaggaacacgtgaagagaggctatcaggagatcaagacgcctctgatcctcaacgaagatctgtggcacagatccggacattgggaccattacaaggaaaatatgtattttacaaagatcgacggggctgattatgccatcaaaccgatgaattgtccgggttccatgctggcttacaagaggaagatgtactcctacagggattttccgatccggatgggagaactgggccaggtgcacagacatgaattatccggcgcccttcacggtctgatgagagtgcggactttcactcaggatgacgcgcatattttcatgctgccggaacagatcaaggaagaggtcgcaggagtcatcgattttatcgattatgtatacagtcttttcggcttcacttaccatatcgaactttccacgagaccggaggattctatgggatctgacgaagagtgggaaatggcgacgactgcgctgagagaatgtctcgaagaaaaaggcatcggctttgtagtcaatgaaggcgacggagcgttttacggtccgaaactggacttccatctggaggactgcctgaagagaacgtggcagtgcggtacgattcagctggattttcagatgccgcagagattcgatctcacttatgtgggcgccgacggcgaaaagcacagacctgtcatgatccacagagtaatcttcggttccatcgagagatttatcggtattctgacggagcattttgccggaaaatatcctctctggctggctccggtacagattaagcttctgacggttacggaaaaattcgctccgtttgcgcaggaactggcagataagtgcgcggcggcagggctcagagcggaaaccgacgtgagaaacgaaaagatcggctataagatcagagaggcgagaaacgagagaactccgtatatcgtcaccatcggtgaaaaggaactggaatccggtcttctttccgtgcgttccagcaaggaaggtgatttgggacagattccgacggatgaactcatcgaaatgctcaaagaagaaatcaaaacgaaaaaatgctgagcggtcaggctgaccggttcggctgttttctccatgccgctccgggagcaaacggtgcgcaaaacgaaagacagccggtgaaaaggcttgttgtgtgagagatgtcatacccgattcgcttgtgaatcgggtatggtttttttgcaggaaatgcggaaaggaaagcggaatatggcgaaaggtatacggagattgttcggcgacaccggcgacaaaaatccggcggaggaagaatggcgcggaggcgtttatctgacgacggtcacttccagttttgaagcggatattctggaatcaaagctgagagctgcggatattcccgtagtcagacgatatgagggcgcgtcgaattacctggagatcactttgggattcaacagcgtctatcccatcgaactgtatgtgccgaaggaggcattgacagaggctgtggagctgattcagcctgtgcctatcgaggacgattatatcgagacgcgggacggagaagatatagatgaagaataaaagagcgcagaaaagcaggagtttttctgacaaatcaatgatggaacgaatgccggagaagaaggaagaaagacgttgccctgccgaaggatcagagacctcccacgggtctgaaagaaaacacggagaaaaaaagaaacattccagaaattccgggaaggaggacggacatcattcttttgtgaaccaatctcaaagagggcagaaaaagaaaaaacgccgaaaaagcggcatgggcaggacatacggcagaaattttcagagcggaagtgagctttccaagacgatcgcagaaaatgttcctctgcagaaacgggagaacaccgagcgtgtcgttacggtaaaggacgtgaacatcggagaaggaataccgaaaatctgcgttcccatcgtcggcagatctgtagatgaaattttgaatcaggcaaatcagattctctattcccctgcggatatcgtggaatggagagtcgattatttccgccgcagcgatgacatcaaagctgtcttatcagctctgcgcaagctgacggagcgcctggagggacgcccgcttctctttacttttcggacggcggaagaaggaggagaaaaagatatcagtcggcggagctatttggcgctgtatgaggctgtcatggcgtcgggatatgtcgatctggcagatatcgagtacaacctgggagaggaggtgacgggtccgctgacttctctggcgcgaagcagcggtacagccgttgttttttcctatcacgattttcggaagactccttcggagggagagataataaggcggctgaacaccatgaaggaactgggggcggatatcgcaaagatcgccgtaatgccgcgaagtgcgcgggatgtgctgactcttctgtccgctacggaaaaaatgaaacatcaggagaatccgattccgatcatatgtcagcagaagggctgatcagccggatttccggagaaattttcggatctgcggtgacgtttgcttcggcgggacgcagttccgcgccgggacagatcagcgcggatcaggcggatcgtctgctgctcacgatacatcgggggtcggatgagagccggatcaagggacgtccttgtgagggaaagaagaatgtgattctcatcgggtttatgggtaccgggaagtctacggtagccagaaagatttcaaagaaaaccggtatgaaagtaaaagaaatggacgatatgatcgtaaagcaggaaaaaatgtctgtcaaggatatctttgaacgctatggggaggcatatttccgagatgcggagacgcggcagacgaaaatcatatctgaatcctccggcgttatcgtctcctgcggcggcgggacggtaatgagacagaaaaatgtggattatctgagaaaaaacggaacgatcatccttcttcaggcgtcgcctgataccgtcttcgaacgggtgaaacgcggcggcgataaacgccctttgctgaataaacatatggccagaggttttatctcctggctgatgaagaaacgcgatgaggcttaccgctccgcagctgatgtgattatctatacggacggcatggattcagatcaggtggcggacgagatcattcggctgatgaaactttaatacagattacaaccgggatttctgcttacggaatcccggatttttttgtgaagcgggaagctcttgttcacggcagggtacttcgtgaaaggaaatactgaaatggaaataccggcatgaaataagttaccgctccgcatttcattcgatgacgttctcatcgttataaaccgcagaaaaagtaaaacggcagactgactctgatattaaatgccgtgttgataaggacgtatgatttttcaggagcggttcgtgacttttatgatctccttttggaaaccggacgggaatggaaaaaagatcgcgcccgccggattttcggcgggcgcggttgtgcgatcggtgtgttctcgtgattttgcgatttcaagaatgtttgatttagtgctgcttgtttttctgtctgtttttctatttttcttctgcagcggatgcgtcagcttctgtctcagtagtagtggttaccgaaccttcggctttggcgccggtgccggtgccggagtcaccgtcagtgatactgaaactgccctctgtgccgtcgggagttaccgtaaagtctgcttcatagcctgcatcttcagcctgttttgacagggaagaggagactgtgcttccgtctgtcatttccgcgtccaggcggtcgccttttttcatgtgaacggtgtaggatccgtcttcgtttttctgcatagccgcgtcgagctcttcgccgttgatatagatttttaccgctttgaacggatttgcggtagcgccgtccgtcgcggcataagcgatgccggaggtagctcccaccagaagtgcgacgctcatacaagcggctgctaatttactgaagcgaattgttttctttgcttttaacattttttcttccttcctgattactgcttcggaagcgtggagcttcgaaaaagcagccttatataattctctgttattcttcgttccagacatctgataatctctcctttaaagtttttcgcgcccgcagaagccgggtgcgcaccgtgggttctttgagtctcagcatttccgcgatctcccgggtgctgtaatcctcgtaataatacagatggacgatggcgcggtactttttcggcagagccatgaccgcgaaaaacaggtcgctttcctccggtgtttcgtactgaagcgactcagcgtactcctccagaggcatgtttttcctgaaccaggacgaaatcgatatttttttgcactgattgacagctacccgcaaaagccagtttctgacgtgttcgtcgctctcaaatgtgcattctgtcctgtacagcttcagcagcacatcctgaacgacgtcgtccgcatccgaactgtttttgaaaaaattgaatgcgatggcatatatgttatcgcgatatttttctgcggctgtctcaaagtcacttcctctcaaagaatgctttaccccctttgccgtccggagatagagattaattccggacttctgaaatgcatttcactaattatatccctgagaaggtcaaaatgtttcaccggctgaaaaaaatttttgcatctgttttttcctgcgggcggatcaaaatgaaaatatggcgaaaacggcgctccggtaagggccgacgaaatccgcagttgcgagatacctgctgcggatcagagagctctgacgccggccggcggcaggcgcagacagcgtttatcacttatggtatgatagcttcaacttagcgatttgcgaatgaaagaaagcaagagtttagttggacgaaggaagctctgtccctgtttgcggcgcatgcagcgcaaacagaggaacgtctgactgaagaattatatccggctgggaccggacaattgctgtatgagttttgagcgccgcatcaaagatacgggcaaaacttcaatgcagatgttttcaaaatctgtgattttgaggaacatactgcgacctgttcctcgggcggcaggtgaggccgggcaggaagaaaacgaagactgagccgtagtcggcatggtataataaagcggatagattttttctgtgaaaaatcatggaagaacaagacagagtaaagatctgatttgaaaggagtattttgattatgggacttatcaaagcggcttttgccgccaccgggggaacactggcggatcagtggaaggaatttttttactgcgatgctctcgacagcgatgtactggcggcaaagggaaagaagaggatctcatcgcgctcttccaataccaaaggcgacgataatgtgatttccagcggcagcgggatcgctgtagcggacggacagtgtatgataatcgtggagcaggggcaggtggtggaagtttgtacggaaccgggagaattcacctatgatgcttccgcggaacccagtatttttgccgacggcggttcgattctcgatactttcgagactatcggaagacgtttcacttacggcggcgacaccgggcgggatcagcgaatttattattttaatatgaaagaactggtgggaaataagttcggtacgcccaatcccgttcctttccgggtggtagactcgaaaatcggtctggacatcgacgtctctgtccgctgttccggtgtgtattcttaccggatttccgatcctctgctgttttacacgaaagtctgcggcaacgtggagcgggaatatacccgggaggaactggacggtcagctgaaagcggagtttatcagcgctctgcagccggctttcggaagactttcggacatggagctacgaccgaatcagattgtgagtcataactccgatctggaaaaagcgatgaacgacgcgctttccgaaaaatggggaaagctgcggggactggagatcgtcagtatcgctctcggttcggtgacgctgccgccggaagatgcggagctgattaagcaggcacaacgcactgcgattatgagagatccgacgatggctgccgccgctttagcgggggctcaggcggatgccatgaaagcagcagcggccaatgagggcggagcgacgactggttttatgggtatgggcatggcgatgaacgccggcggagttcatgcggaagatcttttcgctatggggcagcagagagcatccggcgccgcgacggtacagcagtctgtaagaagcgcggggaaaggagatttttcggaaaacgaaaaaagcggaggactacagccgggcgatgtctggacctgcggctgcggcgcggtgagcggcagtaagttctgtccggagtgcggcgccgcaagaccggaacctgagacacagaagggctggatctgccgctgcggcgcggaaaataaaggcaaattctgtacggaatgcggtgcaaaaaagccggcggaggcgctgctgtaccgctgcgataagtgcggctgggaaccggaagatccggcaaagcctccgaagttctgcccggagtgcggagatccctttaatgaagatgacgcccggtaaatgaaataaatacgaaaaaaggaggggatcaaatggcagaacttcaggaattcaagtgcccgtgctgcggcggagcgatcggtttcgacagcacgatacagaaaatgaaatgtccctattgtgatacggagttcgatatcgagacgctgatttcttatgaccgcgaactgaaaaatgaaagacccgaggatctgacatgggagacgcaggcaggcggccggtggcaggagggggagactgacggtctccgttcttatatctgcaactcctgcggcggagaaatcgttacggatgcgaatacggcggctgccgcttgtccgtactgcgacagtccggtggtgatgacggagcagttcgccggacttttgaagccggattttgtgattccgtttcagatggacgcaaaggccgctaaagcggctctgacgaaacattacaagggaaagtgcctgctgccgaaggtctttaaggatcagaatcacatcgaagaaatcaagggaatttacgtaccgttctggctctttgacgcggaagcggaggcggatatccgctacagagggacgcgggttcagacttggagcgacagtgattaccattatacgaggacgagttattattccataaggagaggcggtacgctggcgtttgagagggttccggtggatggatcctcaaagatggcagacgatctgatggaatccatcgaacccttcgatttcagcgatgcggtggattttcagacggcttatctggcggggtattttgcggataaatacgatgtagatgcggagcagagcaccgaccgggcaaacctcagagtccggaccagtacagaggatactttttcttccactgtccgcggttacgcctcggtaattccagaatcttccagcatccgcctgcaaaacggcagagcaaaatacgctctctatccggtatggcttttaaataccagctggaagggacagagatatacttttgcgatgaacggccagaccggaaagttcgcgggagatcttccgatggacaaggggctcttctggaagtggttttccggggtggcaggcggagtcagtctggcggctctggcgatttcttatctcgtatggttgttttaagagagggggcgaagacgtgaaaaagaagaagacaacggtaattttagcgctgtttctgtgtatcgtcacagcgttccccgtctttgcggcgggagacttgccaagacttgtggacggagcgtcccttctgagtcctgaggaggcggaggaacttctcggaaagctggatggaatcagcgaacggcagcagatggatatcgtcgtagtgaccgtaaatacgctggatggaaagacgccgcaggcatatgcggacgatttttttgattataacggttacggtatcggaccggatcgggatggtattctgcttctggtcagtatggaggaccgggactggtatatcagcacccgcgggtacgggattacagctgttaccgacgccggcctggactatctgtcggcacggtttctcgacgatctgagcgcgggaaactatctgcaggcatttctcacttatgcggaacagtgcgatcagtttatcgcacaggcgaaaaccgggcaggcttatgatgtgggcaatgaaccgaaggagcccttcggctggttaaaatttatcggaatttctctggcggtcggactggcggcggcgctgatcgtcacaggtgtgatgcgcggtcagctgaagtccgtgcgcggtcggacgagcgccggcgattatgtaaagcgggacagcctgaggattacggagagcagcgatatgttcctctattctcatgtcagccgaaccgcgataccgaaaaataattccggaagcggaggaggctcaggcgtacatatttcctcttccggtgcttctcacggcgggggaggaggcaagttctgatctctgaaaatgaggtggcggatatgccggatacggacgcgtcgcagcgcggctttcaccaagggcaggtaccgcttttatctgccggcgggaaaaggattgagaggatatgaggatattcagaataggaaagacagaaaaaacacagatatattgagagttttaacggcaaggagatgacagagtgaaaaagatatttaagcggctgtttgcctcggcgctcatcgccgtatgcgcattaacagcgattccggtatacgcggcggcgcagacagaagaggtccgggcagtctatctcggggtactcgattatggtacagagacttccgcaaataaagataattttatccatcggttttatgccgatggagaggagatccgtctgctcgtatcttctgagggcgattatgctgttcagaatggattgcaggaaggttgtctcttatgacctgactctaaagaacagcgaagtgatttccgcagtatcaccgaaagcagatggagagggaaagactacagccgccggcgaaaatcatgtgacggtgggaggaaaagccttttcgtttacagaaatctatgagatatctaattagtgtgcaggagcggcgcaggttttcagagtatctgcagaagatcttaaagcgggagagacggttcggatttacggagagacggtatgtctcacttttgtggcggagccgtatcgcgctccggtcagcggaacgccgggtcttaaaacgctgaagaaccttctggcgactgcattggaaccggtgggtacgacgctgtatgtctacggcgggtcctgggactggcaggattcctgttcggcgaatcaggcgatgaccatcggtctgcctcagagctggatcgatttctttcagcagcaggatgtcgattatgatttcaaggcagaggatgaggaacacagctattatcctttcggcggatggaatcagtattattataccggagcggattgttccggatatatgggctggacgctctacaatgtgatgcataccgccgacggaacggtatcggaggaagatgggtatgtgatgggatctacttctatggccggaacgctggcgtcgaagggatggggttcgctgagccgaaatgaccggggcgacggcgctgtaatatccggggagttccgtccgggagatattttcagtctgggcggtcatgtgtggatgtgtgtcggcgtctgcgatgacggcagtatcgtattcgttcactccaatccttccccgaaccgaaagggcagcggccagggaggcggaggcgtgcagctcagcgcgctgaatccgcagaatgatacggatacggactgcgaagcttacgagctggtccagcgctatatggcagagtattatccggagtggaattcccgttatgaagcggggctgcgtagctatctgcagtatgctgcgtttaccgataacgagaaatccggacggttcagctgggatctgcacgctgtgctgacagatcccgacggttatgcagacctgggcgccgcagagattctcgccgatctcttcggagaaaaggacgcggagttttccgacgtcgcagaagatgcgtggtatgccgatgcggtgcggtatgtctgtaaaaagggaattatgtcaggtacttccgatgccacatttagcccggatctgacggccagccgggcgatgatcgtcacgatgctctatcgtctggcgggttcgcctgatatcgaagatgaaaactggggctacgcgtacgccgatgtggatgcggaaagctggtacggcacagcggtctactgggcgcgtctcaacggcatcgtcagcggatacagcgaagagcggttcggaccggccgacccggtcagccgcgaacagtttgcggtgatgctgtaccgtttcgcacagaagcagggacttgatgtgagcggagaggcggacctgtccggttatgcggacagcggcaaatcagcggttatgctttgaaagccgtgcagtgggctaacgcccggggaatcataaccggcacgggcgcctccgttctctctcctcaggcagagactgcgcgagctcaggcagctgcggtctttatgagattttgtgaaaatacgaaagaataaagctccgagattctctgatctgcagatttcccgccgcgatgatgcaaattgcggcaggatgaaagaagttttaaaaataagagcgaaaaactctctcgggtttttcgctcttatttttgtagaataaaatgacatatgcctgatataaaacgcagcgaatcgctgaaatctctccttcagaccggtgagggcaggcggtgtatccgacaggagaagatctttcagcgtatcgtgctgaaatttctcgcggatcattataacaccgcgccggccggagttccgaaagaagatcttcagaaaattgtcgggtaagggcgcagctttgcggagatcgtttacagattgctgtgtcttttatccgtatttttccgtagatagtttccgatatttgtgacgcacaggagcgcggtcaccaggaaaaaaccgggaatcaggataatccaccaggacgcggtcatcacggcctgttcggaaagggagagcatactgccccaggagatcattttcagcggaagtcccacgccgataaagctgagggtggattcggcggtgatggcgtttcggatgttcatgacgatcatgaataaaattgagggcagaaagtttggcgtcagatgcttccgcagaatgtggaagaagccggctcccatggtacgtgcggcggcgacgtatccgctgctgcggatctggcggacttcggtgcggacgacttttgcgattgcgggccagccggtcagaccgatgacgagggagagactcaggatggtggcctctcccagtgtcgcctgaagcaggaggatgatcagcagactgggaatactcaggatcagttcggtaacgcgcatcagaagggcgtccagccacggaggcgccagaccgctgagagcgccgaagatgacggcggtcaccgcagcgacggctgcggacagaaatccgatgagcagcgagatccggccgccgtaccagatcatggaaaagatatcccgtccgagaagatcggttccgaagagaaattccgggctgggcgggagattgctgttgtccagatccataaaagaagggtcttttgtcatgagaaaccggcagaaaaggcagcccagcaggatcgcagaaagaaggaagacggagatcagaggaaaggatttcggatatctgaaccttcttcggagggatttttccttcgcagacgggagagcggggcgaattcctgcgaatgtgaaatcttcatcttcacagccttccgggtggtgaacggcggcatggagatccgagctgtcgtcagggaattcctccccgccggtctttttgaatattttgatctgattttcattttttacattttgcacattgctttttacagtgttatcttgcatggcattgtcatcatcaggtttgctgatacgtgacgtatccgtgttttttgtcatgttgtttttcatgtttcgtccgccgctccggcggcgggcagatgcgccgtctctatttttttcgatgtcgtttttcacggtatcgtcaccccgaacttttctgaccttctctccgcgcggatcctcggatcgatctgttcgatgatgatctggctgaacatactgcacaggatcacgacggcgccggacagcaggcagagaatcatcagcagattataatcctggtaccgggcgctctcataggccagagtaccgataccgggataagaaaagacggtctccacgatgtaggtgccgcccaggatatgggggacggaaatggccatgatgctcagataggaagggacggcgttgcgcagacagtggcggaaaaggattttcctttcgcttagtcctttggattttgcgcagagtacatagccggcccgcacttcttccaggatccgattgcggatcatataagcataataccagagatgaccggtcaggacgacggtcagaggcaaaagcagatgcagcatccggtcaccggcaccgccggctccgcctgcgctgtaagcgccgctgctgggcagcagcctgagctgtacgcagaagatcagaatcaggagcagcgagagccagaattcgggaatacagctaatcaccgtccccattctacagatgatccggtcgggccaccggtcctcaaaccaggcgcacaatattccgagaagaagcgccagagtaaagatgagaataaaacccgttcctcccagaatcagcgtatttcccagccggcttccgatgacctccagcacgtcggttttatatttgaaagaaatgccgaaatccccctgcagagcgccggtcagccagtgttcgtactgaacaatgaggggatcgtttaaaccgagccgttcttccgccagttcgcgctgctgcggactcatccgttcggcctgatctccgtagtaggagaccaaagggtctccgggagacaggcgtgagatacagaaaacagctatcgagagcagaaagatactggcggcgaagatcagtaattttttcagaaagtaaagaaggatattctttctcacgtttttctcacctccgttctggttttgccgtgaagaatagtcgttataggaaaaaggcaaatgccgcagaatgcgcgttctcagatgctgtttttccgctttgcgttttacggattttatcggatattgcaggacctttcgaagaccgattctctctgacagggaaagaatacgaagtgctccggcgaatattcttttaagacgccgccgcggatatcctcctgtggttcatagatctgcagtttcctttttctctcgatgaggggatccggccgggggacggcggagagaagggacttcgtgtaaggatgcagcggattttcgaataattcctcagaggctgctgattcgatcagtctgccccggtacatgacacctacccggtcgcagagataacggacgagggtcaggtcgtgagcgatgaagagaagggtgaagcctcgttccctctgcaggcggcggaaaaggttgataatctgagcctgaatcgagacgtccagtgaagctaccggctcgtcggcggcaagaaattccggattcatgctgagcgcccgcgcgatggccacgcgctgacgctgtccccccgatagttcggaaggatatttgtgaagataaaccggatccattcccaccgctttcagctgaagttccgcttcgccgcgcagactgccggagaccggccggatccggtggatagacagaggctctgtgatgatgttctctactttcatccgcggattcaggctggagtcggagtcctgaaaaatcagctgtctgcggctctggagggcttttttcttcgcggagaactgtttttcatcacagatgtcagtaccgtcgtagaagatctctccgcgggttggctgcaggagattcatgacgcagcgggccagtgtggtttttccagagccggattctccgaccaggccgaaaatttcaccccggcggatctgaagggtgacgtcatccagtgcggcgacagaagtttttctggaaagcggaaagcgatgcgtcacatggcggatgtcgatcagcggagctgcggctgtcatttcggaggtttctgcaggattggatcccgaattcacggaggaagtgattctcctcgcgtccgtcgtctgtgccgcagaagattttttttcggcgctgttttctgattttccataaaatggattttggaggtgcgtaccggcagtgtttttcaagtgaaaaacgggaggcgtgattttcggcgcccgcggatccaaaagccaggtagctgcaaaatgggtttcactgacgggaaacatcgggggagcttttttgtggtcgatagtcagggcatattcatttcggggcgcgaagctgtcgccttccggcggacggatcagcaccggaggcatgccggggatctcatacagttcttcccggccgtcggaaaatgaaggagtggaacgcatcagagcccaggtatacgggtggcggggatcgtaaaagatctcctctgccgttccgatctctgcgatttttcccgcgtacatgacggcgatccggtccgctgcccgggcggctgcgcccagatcatgagtgacaagaatcatagacgtcccgaagtttttctgcatctggcggagaagatcgagaatctgcgtctgaatcgtcgcgtccagcgaggtggtgggttcgtcggcaaagaggatcctgggacgggaggaaagcgccacggcgattgccgcccgctgaagcattccgccggaaaaatgatggggaaagaggcggtaccgttcctccggattttcgattcccaccagtttcatcagatgtataactttctttcggacttgttccgccggcaattttttgttgtgaatgcgcacggcttccgcgatctgtccgccgacggagatcgtgggattcagcgaagtcatgggatcctgaaatatcatggaaaacagcgcgccgcggagctgtctcatctctttttggctgtaatctgtgatgttcgcgttgttgacctgtatcgtgcctgtcttgatgtatgcgtttttggggatcagtttcatgatggtcctgcagaggacactttttccgcagccggattctccgacgacggccagaatttctccgggtttcagagaaaaagagacgtcccgaagagcttcgatctcgccgtcaggagtgtggaaactgaccgatagattttttacttctaaaatattttctgtattttccatagctgtgttctctgcagcaatctgctgtaaatcgtaaagttgtgaaagaccatgccggttttttgtctgccgaaattcatatgtttattccgaaatggtccaatctgccgcgttccagaaaatgcccacgccgtgatgtcccatcacggtgtcttcatcgattccacggatggaggagttcgctacataactggcgtcgatgtagcagagaaaagcgaaggggggatcctctgccagaacttcctgaaatctgtcataggcttccgctcgtgcggcggtatcgtctgtctgacgcgcccggagcagataacggtccgccagatcgttggaatagccggagtagttagctcctttgccggtgccgaagactttatatgtatgatcgtccgcatcaaagggacttccccagccgatgagataggccatctgaccatcccagtccacttgggtggggatatccacggtgacgtcgattcccacggaggaaagctgttgcgcggcgatctgagctatatcgatgcggacctgatcaccggaactcacactgatgacgaagccgactttttctccgttccggtggtagaatccgtcatcttccattttacagccggcattttccaatatcttgcgggatttctccggatcgtaatcgtaatggttgatatcctcgttgttatagatattgcgctgcagcgggccgtaggcgggaatcccctgaccaaggaggacggcgtccacgatggcctgacggtcgattccataacagacagccgggatcagatctctgttgttctgccagtattcgtttttaaaattgaagaggatgccccggtaatcggaagtctgcatgtgatagcgggtaaaaccgctttcctcagcgaaagtctgcgcgtctttcggcgtcaggagagccatatccagttcaccggagcgcagctgcatcgctttcgcattgtcgtccggtacgatcttgaagatgatattttcgatattcggcattcctttgaaatagtcttcatttctgacgagagtgatcgactggccttcctcccagccggccagacagtacgggccggtgcccataggatgacgaaaaaagtcagaagtctgcatgtcctctcccttcagcaggtgttccgggagaaccggcatagtcatgtagtccagaaacgccgcgttaggagcggagaggcgaaaggagaccgtgtgagcgtcgatgacggtaatctcttctacatcttcaaaattcgcagcattttcagagccattggagggatccataatcgcttcgatggtgaattttacatcatcggcggtgaaaggttctccgtcgtgccacgttacattttcctcgagatgaaaagtgtaggtacaggaggagcggtcgaattcccagtttctggcgagaccggcgacgacttcgttatctccgttgtgtgccgtgagaccgttgaaaagcaggaggttgatctcaccgtgttcatccatggccgggttgatcctggtgtagtcgccgctgccgtagacgagcgtggaggtgttttctgatgacagggcttcccgggaagccgccggatggttttggccgcaggcggacaggagcagcagcatcgtcagcagtgtcgctgcggcgggcagaatctttcgtctttttttctctttcatatctcatttttcctttctcgtttgtgacatcgggactgaactctcgcagatctgccggattcgcgttcacagttgattttcatgtaatattgaaagtagtctgtctttgacggatctgaacgactgcggatcacgctgaaaaccggaaatggaatccgctgaccgcgatcagctgttttgcaccggaacgcaggccgacggcatccgggcgggacagctgcagcctgtgacaagaaaaaaggcatatgatttttcttctgaaaaatcatatgccttcacagcataaatctcggatcggtttccgggcagatggtttccgggcgcagtcagcgctgtttttatgcaagatgcaaaacgctgagaatacaggattgacgcctttcggggatttcatcggcagacgggtctgcggctgcgcggctcttcggagccgaagagcccgcttcgtgcgggcatgtgtatgatgttgctttgccgctcttggaaatctttgtccgctcgttctataccggaacttacagattataccggcaatgggacgcgctgtcaatcccgcggcgtattttgtttttccggggaaatccggttaagaacgggtaatttctttcaccgcctgctggacgagggtggagagattcagatcctgaacacctgcgacgatgttgtcgcagtgattaatgggaattaaaatgcgtttcgcagaactctgacctacggacagagccattttcggagtgatctcaccgaagagggcgtcggcgatgacgatgccgacggggcccatgatgatgtccgctttgcggcatcctgtgacgacggcattttccccggtagccgcgttgtgcgctcccgctttcagcattgctgatgtagccgcgctgttggccccgacagctgtgattaccgcgtcaggcacattttttctgacggcggataccagagcttttccgattccgccgccctgagcgtcgatgattaatatgttcattgttttatatcctctgttttctttccgtatggcggcagtccggcgagggctccctgggacagctgatctggcgtttttctccgatgcggcggaaagcaggaaccggcgtccgccccattatag

SEQ ID NO: 1155 - DNA, 32759 bp, Unknown
  16S sequences of unknown bacteria
cgacgctcaatgcgagcagggccgatataccgagcccagccgacacgagcattgcagacctatttcgagataggactgtaatcgcttgtgtcggctttttttatcggaaccagcaggaaatttcttccaacgaatttctcaaaccggaaaataggcttccggtttgagtgatagcatacggccagagccaagggaaagggggtgaatcgaccgtgacgatgaatgagcgcagggcggagatcatgcgcatactggtcgcccgccgcgcccttgacgccgaaagacgcgccacatggagcttctcccccgtgacgcgcaaggtggaaaacaaaaagcactatgaccgtaagaaaagcgctcgtgtctggaaggatgacttcggcatgagcgttttttgtttgtcttaggattattcagccatgaaccccttcgcctgcagcgccgtcaccagcgcttgtgccgcctacccttcattggcaaaattgtcttttacacattgaataaacgctttgagcgccggattgtcttggacggttttatagtaaatgccaaaggacatgggggctgtatctttcagtgggatcttggcgatcagcggcgaatccggcaccagggaatccggcagaacggaaactccataccccgccgttacaagaaccgtaatcgcctccgccgattcgcagaaataaaactccgagggcgggcgttcccccataagctgcccctgcatttgcacaatggaaatggtggccttggcggggaccaacaaaaccagcttttcattcctcagttcttccagactgacttcgcttcggcctgccagaggatgcttgcaggagcagaggcaaaccaacggaacctctgtgatctctttatactgtgctttgattttcattttggccgactcgcgaaaccccacgactgcgtccaaatcctcttcctccaacattcgatagatatgctgaaacgggatcgtctgaaggcgagggtgcagctccggccggatggagcgaaggacttccagagcatccgataacaagaacatacagggaaagttatagcagccaatggtcagcgtttcaatgtttccatccatggcattgccgaagcgcttcttggcccgctcggaaagcgctacgatctgttgcgcgtcccgcaaaaacgcttttccctcttcggtcagccggacggtgcgggtcgtgcgcctaaagagcttcacattcaattctttctctagcgactggatctgctggctgacggccggatgcgtcacatggagcgactgtgccgcctgcgcaaagttcagatattccgccactgccagaaagcaggagagctgaaagatattcacggcaatccctccttttgattggtaaggtttcctttctaattgtaacagattctaacttcactttcaaggggaaatccgtataatactattgggacaggcggtcaggagataaaccgtttgccaaaaaaacgcaaaaaaagcagcccacatcgcaaaatcatctcatgtaggctcattggaaaaaatggaggcaacgatatgataaaaacgctattggcgcaggtgaagcagtacaaatccgcttccctcctcgcgccggtctttaccgcgggcgaagtgttgatggaagtgctgatccccttcgtcaccgcttcgatcatcgacaagggaatcgaagcgggaaatatccatcaggtctattggtacggcggcatcatgctggtcatggcttttctgagcctggcgttcggcgttctggcgggcaggtgcgcagcgaaagcgtcttccggcctggcctgcaatctgcgggaaggaatatatgaaaaggtacagaccttcgccttttccaacatcgacaagtacagcaccgccggtctcgtcacccggatgaccaccgacgtgaccaatgtgcaaaacgcctatcaaatgatcctgcgaatcgcggttcgcgcgccgttaatgctgatttgcagcatgttcatgtgcttcttcatcagcgcaaagctgagcacgatcttcttggtagccattgtcattttggccgcgggattgatcttcatcatgacccgcacattgccggtattcaatgaggtgttccgcaaatacgacgacctgaacgccagcgtacaggagaacgtctccgccatccgcgtggtcaaggcgttcgtgcgggaggaccacgaaaacaagaagttcagcaaagcggcgcagacgctttataacctgtttgtcaaggccgagagcaatctggccttgaataacccggtgatgatgctggtggtctatggctgtatccttgccatctcctggttcggcgcgcatttcatcgtggcgggcgacctgtccaccggcaatctgaccagcttgttcagctatgtgatgagcgttctcatgtccctgatgatgctctctatgatctttgtcatgatcaccatgagcgccgccagcggccgccggattgcggaagtgctaattgaggttcccgatatggccgatcctgcccagccagaggaaaccgtcgccgacggcagcattgacttcaaccatgtggacttctcctataaacatggcagcggcgaaaagacgctccaggatattgacctgcacatccgctccggcgagaccatcggcattatcggcggaaccggctgcgggaaatccagtttggttagtctcatcagccggctatacgatgtggacagcggcagcgtctgcgtcggcggcaaggatgtccgttcttatgacatggaagccctgcgcaatcaggtggcggtggtgctgcaaaagaatgtgttgttctccggcacgattctggataacctccgctggggcaaagaggacgccacggaggaggaatgcgccgaagcctgccgcctggcctgtgccgatgagttcatcgagcggttcccggatggatacaatacctggatcgagcagggcggcagcaatgtttccggcggccagaagcaacggctctgtatcgcccgcgccctgctaaagaagccgaaggtgctgattttggacgactccaccagcgccgtggatacggccaccgacgcgaagatccgggaggcgtttgccaaaaagattcctggcacaacaaagctgatcgtggcccagcgaatttccagcgtacaggacgcagatcgcatccttgtgctagagagtgggaaggtcaacggctttgatacccacgaaaaccttctaaaaaccaatcccatctatcgcgaaatttacgaagcacagacccagggcggcggcgacttcgaccagccggccctcggcgaaaaggatggtgtttttgcatgagcgcacaaaatagcaacaaaatgagcgccagtcagcagctgcgcgccatgggccgagtgttggggctgatgctgaaaaattacaagtttcccttctttatggtggtggtgtgcatcctcggctccgccttggcgaccctccggggcaccctgttcatgcagagcctgatcgacgattacatcgcgccgctgacccgggcccagacgccggattactccgatttggcggcggcgctggtctccgttgcgatgacctacggcatcggcatactctgcgcctacgcctacaaccgaattatggttaatatcagccagggaactatgcgaaacctccgcgtagcgctgttccagcacatggagagcttgcccattcgctacttcgacacccatgcccacggcaacatcatgtccgtctacaccaacgatgtggacacccttcggcagctcatgagccagagtatcccccaggtcatcaactccggcgtgaccatcgtgacttcctttgtcagtatgttcattctggacatcccgctgaccattatcactctggcagtgattggcgtgatggtctttgctacctcgaagatcgccgcgaagtcctctacctactttgcccgtcagcaaaaggacctgggcgcggtcaacggctatatcgaggaaatgatggatggtcagaaggtggtcaaggtattctgccatgaggacaagagcctggagcagttccgcaggctgaacgacgagttgcgggagagcgcggacaaggccaacaccttctccaacatcagtatgccggtcaatgtaaatctgggcaatatcagctatgtgctgtgcgcggtggtaggcgcggtattcgccctaaatggatacctgggtctgaccctgggcaccttggtttccttcctgacactgaacaaaaactccacccagccggtcagccagatcagccagcagctcaatagcattgtcatggcaatggccggtgctcagcggatcttcgacctgatggacgagcagccggaggaggacaacggctatgtggagctggtcaacgtgaaggaaaatgcggatggcactttgaccgagaccagcgagcggacggatgtttgggcctggaaacatccccataaggcggacgggagcgtcacctacaaaaagctggagggggacatcactttcgacgatgtggatttcggctatgaggatggcaagatcatcctgcacaacatcaagctgtacgccacgccagggcagaaaatcgcctttgtcggctccaccggcgcgggaaaaaccaccatcaccaacctgatcaaccgcttctatgacatcgcggacggcaaaatccgctacgacggcatcaatatcaacaagatcaaaaaagccgacctgcgccgctccctgggcatggtgcttcaggacacccacctgtttaccgggacggtcatggacaatatccgctatgggcggctggacgccaccgacgaggagtgcgtggccgccgcgaaactggccaatgcggacggattcatccgccgcctgccggacgggtatcaaacggtgctcactggggacggagccaacctctcccagggccagcgccagctattggcgattgctcgcgccgccgtggccgacccgccagtgctgattttggatgaggccacttcctccatcgatacccggacggagactttggtgcagcagggtatggacagcctgatggtcgggcgcaccaccttcgtgatcgcccaccgcctgtccacggttaaaaacgcggactgcatcatggttctggagcagggccacatcattgagcggggcacccacgatcaattgatcgctgaaaagggacggtactaccagctttatacgggaaacgcagcgacctgacaatctcgttaaacaaccgaaggttttcaacgaacaaaagccccggaaaccacattgttccggggcttttgagcactttggataaagtttagcgcttggagaactgcggagcgcgacgggctgctttgagaccgtactttttgcgctccttcatgcgcgggtcgcgtgtgaggaaaccggccttcttgatggaatccttcaattcctcatcggccttcaccagcgcgcgggcgatgccgtggcggattgcgccagcctggcccgtatagccgccgccggtcacattcacgatcacatcgaacttagcaagcgtatcggtgagcgtcaaaggctgacgaaccaccgtcttcagcgtttccagcccgaaatattcatcgatcgggcgcttattgatcacaatattgccttcgccaggaatcagacgaacgcgcgcgatcgccttcttccttctacccactgcgtggaagcaaacctctgccatgttgcgtcctcctcccttacagcttgacctggtacgccacgggcttctgggcctggtgcgcgtgctccgcgccagcgtacacatgcagcttcttcagcatcttatagccgagcggattcttcggaagcatgccgcgcacggcttccttcagaaggaaatcgctctttttcgccatcatcttgcgatacgaaacctctttcaggccgcccggataaccggtgtggtggcgatacatttttttatcgagctttttgcccgtcagcaccattttatcggcgttcacgacgatgacgtaatcgccggtgtcaacatgaggcgtaaaggtgggcttgtgcttgccgcgcagaagcatggcgacttgcgacgccaggcggcccagcaccataccctccgcgtcgatcacgtaccaggtgcgctcgacgtcggcaggcttggccatatacgtattcacggtaaaaccctccagtgtgaaatggttctttcgcgtcgcggccgcttggtcagggcggcacaccgcgctatggctccggggcttggaaaccaatgcgccggttgacacacaaaggttattatacccatttcaccccattttgtcaaccacccgcagccttatggcgggcttcccgaagaaatttaacgcgttttggccaatccacaaaagccgtgagcgcaagcagcgccatggcgcacagccagcccaacagcggatacagcgaccgcaccaaaaaatcaaaacccgatagcgcaaaaagcgcgctcagcgccaggatgcccgcgagcgcccagccgccagatcgtacgcctgccaattgcgcgcgcagcgaggcgatggacgcggccatggtggaaaccacggccagttccatgcacagcgcgcacaaataaaatcccgccgtgccccagcgcgcggcaagaatcacactgggcatggcgacaaattgcaattcctcccggtggcgcaggagggccgcattcgccggaatgagcagcgccgccaggagcaacgccgtatacaatcccacctttttcggctccgcgcggttcaaaagcaccacgcctccggcgagcgaaaggtttagggcggcatagaccgcgcccagcaacagggccagcggcgcgctggcctgaatctcataggcgcgctgcgcgtatacagaggcgtctacgggccgcccatccgcggccaacgccgcgaaaaacgccaggattagcgggaaaaccgcgccacccagccgcgccagcatgccgccgcgtgcggcccacaagccgcaggcgagggtaaaccccatgccgatatagcgcgctccgcccaccggcagcgtaagcgcgcccagttcgccgcctgccgcaagcatcaccgatgccaaaatcgccatcaaaaggccgtgcgacatgtgcatcgcgtcttcgcaggcttgtcccatcagcgcgccaaaaagaccgggaaagcttttcgcttccgtgcgtgcgcccaactgcgcgagcatagccgttataccgcccaccagcgcgcaggcgacgcccacgcccagccaggaagccgcgcccatctcggaaaaaaaggtcataacctcgcgcccggaggcaaaccccgcgcccacaatcgccgccacaattgccagcgcgctgcgcaatgccgctggtatccgcataaaaatcacccccggccaatgtatgtagccaggggcaaattctatgaacagagccgccgcaaattttgtgtgcgattagggctgcgtctcctgcgcactctccacgcggatggtgaaggcctcgctttgcgtgctttcccccgcgcgcgccgtgaacacgcattcgctggttccctcggtctgcgcgttgcccgccaatagttcaaagctatactggttgccattgatttccggctcggacaaatacaaatccacaatctcgctcccgccagccacatcggcagtgagcacatcctccccgccaacctcggcagttaccgttacattgcccagggaaacatatccctcttcccccgccgaaacggttcgatccaagccgctcaaatcgatatcctgcaccacagaaccggcctgggctgcgctttcctgctgcgccgccggcgcggtcccgctcacagtgatggaaccggtaagcggcgcgaaggcataattcccactcgtgagggaaagcgaccattgcgccgtgccctcggatacagccgtgtattccgcctcaccggtctgcgcaaagcacgccccctccagagagaattcgctgcgcgtgccctccggcagcaaagcgccgtttgaatactgaaccgcgggcggcacagagaggcgctggccaatgcccatcaccgaaggcacatccgccacaagcccttcctgcggcggcgcgccttccaccacggtgatggcaaacggctccgcatacgaaacgccatcgatgagaagagaaagcgtgtattcctccgttcccggcgcaaccacggcatccaattgcagatcaatcacaaagccgccatcctgcatgtacgcgctccagctcaggcgcgcgttcgtgcccgcgccgatcagggcaatctgctgcaccttggccccatcgaccatgccgatctcaaaaccgccgatcccagaggggatacagccttccgtgtacaccagcgggctgacgttgttctgcacggtcagcgcggaagaggattcctccgccgccgcggcgacgcaagtcacaatcaaaagcgtcgccatccagatatatattttatatttcataatcaattcctccacaaccatagatagtgtaataatatcacaacgaagcagaaagtagcactcttatgttgttactttattgtgaaaatacagtaatatcatatacacatttccaggatgcagccaatgcggccgaaaaactggcccccaccactggaaaccaaatggaaaaaaagccgcacagcacagccggattttgcaagcttttctttataaaaaaatgagatttcgaaaagaaagctgccgaaaaatgtaccgcgctctcaagcaagagaaacggcccatttcccggcagacgctaagcgtttatgaccttgctacgctcgccaacgcacccgttccctgtagcgcgcttgcgcctattgggccgccggatttgcgagggcaagcttgccttccgccatttcaagcacccgatcatagcgcgcaagcaacgtcgagtggtgcgtgatcgtgatcagtgtgagctcttccatggcaagcagcgcgctctcaatatcctccgcggttttgctgtcaatggcggaggtgccctcgtccaggatcaaaatgggcgtgttgcggatgagcgcgcgggcaatcgccacgcgctgtttctgcccgcccgacaggcggttgccattttagcccacgccatattccagcccgccttccagcgagccgaggaaacggttcaccccgctatgttccagcgcgcgcgtaagcgcgtcccgcgggaaggtttcatagaggcaaatgttgttatagacgctatcgtcaaacagatacacatcctgatggatgagggaaaccagcgcgtgcagctttgcgttgttcagttggtgcaactccacaccgtcgtaataaatctcgccactatattcgccaaaatcgccgcacagcgcgcggatcagcgtggtcttgccgctgccgctctcgcccacaatggcgtatttttcgccctttctcagcgcgagatcgacgccgcgcagcacctccaccccctccggataggaaaaacgcaggttctccgtgcggatgccctcgcgaaacgtgggcacaatccgcccggccagagccgggttgggcgtggaatccgccatgccctggatgcgctccacgatggggcgcgtggacttcatcagaggaacggcttccaacgccatgctcaaaccggaggaaacggtgctttgcagggccgaaaacaccgcgagcgcgccgaacgacatgcgcccctgcgccagcataacgcaagcgacaatgatcgtgagtgcgttggaaagtgcgctaaagtgcgctaaagacctgcgccaagccggaagacatttggttcatgctgcccgtgcgggcctcggcatcgcaaaacgcctcgtgcgcctggcgaaaaatcttgtccatatacagctttgcgccaaaggaagcgatgacttcaaaccccgcgagcaaattgctgagcgccgacaccaattccgccgaccgcttcgattgcaatgcctggcatttttccagctttttggaaaagagcatgggcaccacgaacatggccgcacaggaaaggagcgcgcacagggcgacgatgggctggtagaaaaacatcaaaacgatcgaagtgctcgcgccaacagcgctaaccaccagcaaatgcagcatatcgaaatagtggtgctttaaacttctgatatcgtttgtgagcgcggaaatgtaatcccccaccggtgcttggcgaaaatcggccacgcatttgcgcatgaggcctccaaaggcatcctgccggatttcccccgtggtgcgcacgacatagcgcgcatagcatacgccagcgacaactaccagggcgacagccaccagcgtgcccaccagggataggggcaaatagaaggtaaacgcgttgtccttgccttcagtcacggcgtcaatcagcatttgatcgagaattgtagtcgccgttatcaaagcgaagcccaaaaaattcagtcccaatgtgccgagcagccggaatggatgcctcttcatgtaacggaacacatcgcagccccccgaatatgaaattttccacaattctccttgcagcaatagcttatataagcaattttattgtatcaaccagaaatataattgtcaatctatagcaagcaaaaaatcataaaacaaaaacagccccgcgccggcaaaaccggcgcaaggccctgcgccaaaactcattgcatcatgcgaagcaacacatccaccagtttttccaacacgcggtacgcgccttccacgccagtgcgcatacggcgcagcggtgtgagcaacgcatattctagcccagtgcggtcgatggccaccgagtgtgggacatgctcacatacgctgtcgtaagaaagaagcaccgtttcttccgcctggaagcgcgcgatgcactcgtctatcgaagatacaggcaggcccgccgcgtttttgtgcgagcagatgtactccgcctgcacgcccagctcgcgaaagagcgcttgcatcagccggatgcggtcgatatcgccatagcaggcaagcggcttaccggcaaaagcaatcacattcctggcctgcaaagccaccgcatcgtaaaccgcgtccgtccgcagcacatactcctttttaaggagcgcagagaggccctgcagcgcggcgtcctgcgccgccttgcccaaaggaaaccattcaaaatacggcacgccaaaccgttcttgcaaaaaccgcgcggccttaagcgcgctttgcgaggtaacgacgttgacctgcgccgccagtcgagaatggagcggggattgaggttgtcaaaggcgagcggaatgcccagcgcgccctcaatcgcctccgtgatgtaggcgttgtcatgcccggaagcgctggaaaaaaagccgcccagcaggcagaacccactttttccagctttctcctccggccgggcaaactggcgcgcgagcgcgagcgaaagctgctcgctgccggcaaaaaaatccgcgtccatgcgggcgggcgctgtaaagagcgtaaaattcggcccggaaagttcctcgcacagcgctttgagatccagccccaatacgctggccacggatgaaggcatgaggaacgcctgccggaaccccttttcccgcagctcttcggccgctcgccgcaggcggcccgtatcgcccagagcaatgtccagctccgtcatgtgggtgctgtacgactggcgcgaaacgacctgttcgctcaaccagggcaggctgccataattatacagcgcgtgcccattcatcgaaaaatccaacaccgccaaatcgggatagcgcatggcggaataaaacatctccatgcgcgccgtcggcagacaggcatattgtatcagtggcatatttcctccgcgcgccgcagcaaaaagagcagctgcccgctcccgcgcaagcgcgcaatttcctcagaatccggggtaaaatccagcgccgtttcgcccggcacggcctcgagcgcgccgttttccgggcaaacgagaatcccctccggcaatttcaggcaacgctcataggcatacctgtgaaaatcaccaaagctcacccggcgaacctgcgcgcccgcatggcatagatacagcgcaaattcataggcgaacggaccgcgcagagcgagagggccccgggccgccagcgcgcgcgtaagcgcgtccatggcttccagcgtcccgcccggcaggcgcagcgtctgcgcgtgccgcgcataccaatcgaggggatgaaaactgtaatcgtcgagccacacgcctgcgcccgcacgttcgcgctcgcgcaacaggcccaaaaacctgcgagaacgcacgatatgcactcccgctcgcaggcgttccctgagggccgccaatccggcgggcgcttcatcccacacagccacgccggcatcctgcccggcgggcgcgcccgccaacagggcgcaatacagcgtttccaaagaatccgtgggcgaaatcccctgaaacgacggcgcttcgacgcacgccaccgagggatatttccgggcaatcagttccggcaccgccaggtgcatgatggaaggaacgcaggtggaaatgcacaccgcagcgcggttgtcttccgccaggcgagcgagcgccgcgtccagaccggacagctcgccaaaaatgatttcccggtcctccagctggtacgcccagttgcgccgcccaccggaaaagggcattttgcgcgaataataggcgcattcccccacgcccaccaccagcacatccacatcgcccatttcgtggagttcttccagcaggatatccatcgggcaatgctgtgcgcaatcaatcgcgcaggaagcgcgcagcggctcttttttgagcgctttcacgggcacaaaatcaggcatgggcaatcctttccgccagccgcgcatacaggccgctcatttcgcaatcggggaacgcgtccaccacggtcttgcgcagcgcttccgcccgctgcaccatcgggtcgcgcggcagaatgaaggcgatttccgtttccatttcgcgggcggccttttcggcaagctcctcctccgcctcaatgttctttttgttgaggatcagcccctttagcttcgcgcagccggaggcgcgcaggttgcgcacggcctgggcgatgttgctcgcggcatacaaagacatcatttcgcccgatgtcacgatatacagttcgtccgcatagccgctgcgcagcggcatggcgaatcccccgcacacgacgtcgcccagcacgtcgtacagcacgaaatccggccggtatttttcgtacacgtccagttcatccagcttttcaaacgcggcgatgatgccccggcccgcgcagccggtgccaggcaatggtccacccgcttccatgcaatacacgccggaaggactgatgcgcagaaaatcgcgctcatcgtctccaccgccctggcgcacgacatccaaaatcgtggggatgcgctcgccgccgttgtgattgaccgtggaatccgccttgggatcgcagccgatttgaaacacgcgatacccctggcgcgcgagcgcgctggccagattggataccgtggtcgatttgccaatgccgcccttgccgtaaaaggcgattttcttcataccctgccctcctttgccgccagcagatcgtaagacaggcaaacgggcttgccgctgcgccggtcggtcaccacgtcgccatcgatgaaaaaacactcggcgagcacatcgcgggtcatcacttcctcgggtgtgccatagcgggcgatttgcccatccttcatggcgagcaggtaatccgaatagcgcgaggcgaggttgagatcgtgcagcaccatcacgatggtcgtgccctgttcgcggttgagatgcttcaaaatttccagcacttccagctggtgggacagatccagataggtggtcggctcgtcgagcagcacgatattcgtctgctgggcgagcgccatggccacccacacgcgctggcgctgcccgcccgacaggcaggcgatttcgcgctggcggaattcgagcatgcccgtggcctccaacgcccaggagacgacgtccctgtcctccttcgtcaaccggcccatgcccttctgataaggatagcggccgtaagcgaccaattcttcgcaggtgagcgtgccgggcgcggtgggcgtctgcggcaggatggccagccacttggccacatcccggctcttcatcgttttgatgtccacatcgttcacgatgaccgtcccgccctcagcaggcagaatgcgcccgatcgccttgagcacggtggatttgccacagccgttggccccgatgatagaagtgatcttgcccttgcgcagttccacatcgaaccccggcacgatgatcactccgtcgtagccgaccttcagccggcgcgttacaatgctgttcatacgatatatcgtcctctacgatttgatcagaaggtacagaaaatacggcaccgaaagcacggaaacgatgatccccgtgggaatgttggcaaacaggctgatgccctgcaccagcatgtccgccagcatcacgatgatgccagccacgatgccggaagctggaaggagcacgcgcgcgtccgtgcccacgaggcggcgggcgatgtgcgggccgatcagccccagaaaaaagaaattcccgccaaaggccaccgaggaggaggacaacgccaccgcgcaaaacgataaaaacacaaattgccgccccacgttcacgcccagcccgcgcgccacgtcgtacccgatgttgatgacgttgagcacgtagctttgcctgtaagtcaacaccaaaaatacgagcagccacacgccaaaaatggcaatgtaattccactgcgtgccccacagctcgcccgactgccagcgctgcaaaaattccagccggttttcatcgatgagcagggtgaggaacgtgccaaacgcgccatatgcactgctcatggccacgcccgtcataatcagccgggtgggttgcagcggcttgcgccggttggcgcccagcaaaaagatcagccccgcggaaaccagcccgccagccatggccagcacgggcaacatcagcgccatgccccgctgtgaactgaaaaacgccgcatatagcgtaacgaacaggcccgacccggcgctcacgcccagcgtacccggggaagccaggtcgttgtgcagcagatcctgcatgatcacgccggacatgcccatgcccaggccgaccatcgccgccaggcacagccgcggcaggcggaactcgatcagcaccagttgcgccgtgggcgagcccttgcccagcagcgtccagaacacttccagcggcgcgacacggtattgccccgtgttgcagcccagcaggaacaccgccgcgagcagcgccagcaaccaaagattgcgatacaccccgcgccggagtggggataccttttcccttttttgaaccatttgcatcgtatttcccccgcgcctttcccgcatcacgaaaatgtgccccgctgcctgcgcgaaacaaagatgaagaagggcacgccgatcatggtgatgagaatgcccaccgggaattccagcggtgcaatgatcacgcgcgccagcagatccaccagcaccaccagcaccgcgccgagcaccgcgcaggagggcaaaatcagccggtaatccgtgcccacgatgtggcgcacgatgtgcggcaccatgaggcccacatagcccacgggcccgatgatgatcaccgcgatggcgctgagtaccagcaccacaatggtgcccaccaggcgaatgagccgggtgtttgcgcccaactcgcgtgaaacttcgtcgcccaagcccataatcgtgagcgagcgcgccataaccagcgcggcgatcagcccggcggcgaaaaagggcgcagagaggcccacatccagccagatggtgttggcggaactgcccgccgtgtatttcatcatcgcgttgacgttgccagatttgaggatcaccgccgaggaaaccgagctgaacagcgtggatatcgccatgccggaaagcaccatccggtcagcactgcggcccgtgtgcccgagcagcgccacgccatagatgagcaatgtagccgccagcgctcccaggcaggaatagccaatgcgctccagacgggaggcatccggcaggaaagccatcatcagcacgatggcgaacacagaacccgcgctgatgcccatgatgccggaatccgccatgggatttttcgtgttcccctgcatcaccgcgcccgccactgccagcgaaacgcccacgataatatccgccagcaggcgcggcaggcggatgtcccgcgcgataacatgcttgaactcgccctcgtcaaaagcgaaaaaggcgttcaggatatcggaaagcgaaaggctttccgccccaaaacgcaaaaaaaggaaggacagggcggcaaggatcaccccaccgcccagcatcaacacgagaaacttttcggcgttgctcttcctgcgccgcgccgtttgctccacggtctgcattatgcgcccatcgccttctcgagcgcgctgagaatgccctcatactgcgcccggagatacagaacatccttctccgcgtagagcaccgcgtccagcacgccaatgcggtcttccttcacggccgcaagattttgccagccgggattggtggagagcgcctcgggaatctcgcccgtgcccataatgtccgcgtacagcacgaggtcgccctcatagtttgccagcagttcgttgctgatgggcgtgaaggggccgttgttcgggtcgctgaggaaatcctgcgccgcctgcgtataggccatgcccagataatcatagagaatcttgttgaaataccagtattcgctcggcggaatggaaacgccgtccatgtaatagaacacggaaaccgtcttatcgctcaggcccagatcgctgatggcagttagcgcactctcctgcaactgcgcagcgtaatcgatcagcgcctgtgcctgctcctccaggccgaagatttcgccaatatagcccagccgctcggcaaaatcaaagctttcgcgatagagcgggatcaccggcgcgatcttttccagctgctcaatattttcttcttccatcagctgatagaccaggatcagctccggctcgtagcttaagatttcttccaggttgaagggctgcgagtattccagtacggaaacgccctcgaagaacgtgggataggaatccaataccgcctgctccgccagcacggccaggggcttgatgccaaaggcggccaggtcgcccgcgccggaaagcgccacgatgcgccgcgtattgcggttatacgtcacgctatcgccattaagcgtggtgaacgtgtactcttccgcttccagcgggcgcgtatcctcgagcactgggatttccggcagagccgccgtttcctcttccgccacagcgcacgccgcaaaaacggtcaacaacaccgcggccaaaaaaacactcgccatccgacgcagcccaacattttttgtttgattcatatccccgcctccttagttctttacccgcgcttgcgcgcaaaaatttccgtgcggcaacagcgtcagtttatgtacactaactccagccacgaaaagtattttaccttgctatatccatatgtgtcaatacccgaatcatctcaacttttttgtcaaacatatatcatttatcgaaaaacaaaatttttacttcctcaccggccattctatccgcaagaaataacttgacaagcgttccgccttatagtatgatacagaaaattgcatacggtattgatagaggcgcaaagccgatgggtgcgggcgagccggcaggcagcgaccccgcgcgaggcgtctttgccgaatcggttccgcgggcgcgcggtgccggtggggccgtggagaaaatccccggcactgtccgcacatgactgtgtggttgcgctatcttgttcgaaagggaaacggcaagcaggcgcttgccgtctttgtttaaaaccggcaagatacggttgccactcacaaacgctacaccatatagaggaggcatcatccatgaatctgagcgggagttatgtcgcgttgatcacgcccttccatccggatggcagcgtgaactttgaaaagctggctgaactgtgcgaatggcacgtgcaaaacggcacggacggcatcgtggccctgggcaccacgggcgaatccagcaccatgacgcacgaggaggacgacgccgtcatccgccgcgtgctggacacggtgaacgggcgcattcccgtcatcgccggcacgggttccaactgcacggaaaccgccatcatgaaatccaaggccgcgcgcgatatgggcgcggacggcatcctggtgatcacgccctattacaacaaggcgaatgaaaagggcatgtaccgccactttgccgacgtggcggacgcggtgggcctgcccaccattctctacaacgtaccgggccgcacgggctgcgcgctctcgcccgcgtgcgtggaagcgctctcgcaccatccgcacatcgtggcgctcaaggaggccagcggcaacatttcctacgccgccaaggtcgcgcgctacatccgcgaggattttcagattctttccggcaacgacgatatgatcgtgcccatgatggcgctgggcgcctcaggcgtgatctcggtgttcgcgaacatctgcccgggcatttgccgcgatatgacgcactccttcctggatggcaatgtggcgcgcgcccgcgaattgcagctgaaatacctcgatctgatcaacgcgctgttcattgaggtgaaccccattcccatcaaggaagccatgaatctgctgggcatggaggtgggcggctatcgcctgccgctgtgcgaaatggacgaaaagaaccgcgccgcgctccagagcgcgctggcaattttgagggggtaagcgcatgctaaagatctggattgtgggccgcggccgcatgggcggcgcggtggaggcggaaatcgccgcctgcgaagatctggcgctggccggcgcctccgaatacgtgccggaggcggattccatcggcgcggcggacgtgatcatcgatttttcccaccccaacaacacccgcgccgtatgcgagcgcgcggcgcgagacggtacagcgctggtgctgggcaccacgggcctgggcgacgcgcaccgccagtatattgcccaagccgcgcaaaaagcgcccgtcgtgcattcggcgaatttctccacgggcattgcgatttttgagcgcctgctggccgaaatgcgcggcgtgagccacctgttcgatatcgaggtggtagaggcgcaccaccgctataagcaggacgcgcccagcggcaccgccaagctgctgcttgccgccatcgacccggaaaacgagcgcgaacgcatctatgggcgcggcggcatgggcgcgcgcggcaacgaaatcggcgtacactccatccgcggcggcaccgtggcgggcgagcattcggtgctctttttgggcgaagacgaggtgctggaaattcgccattccgcggccagccgtcgcatcttcgcgcgcggcgcgctcaccgcggcgcgcttcgcggccggcaaggcgcccggcctctattccatgcaggacgtattgtggggaggaaaagacgcatgaacaccgaggaaatcatccgcgccattcacgaatccaaaaagaccacgcccgtgaaactctacttgcgcgaaaaggaacccattccctttgaaaacgtgaagtcctttggcgtgggcgaccgcattgtgttcggcgactgggcagacatcggccccatgctggaaaaatacgccgaccgcatcgaggactatgtggtggaatccgaccggcgcaacagcgccattccgctgctggacgccaagaacctgcgcgcgcgcatcgagccgggcgcgatcatccgcgaccgcgtggaaattggcgagcgcgcggtgatcatgatgggcgcggtgatcaacatcggcgcggtgatcggcgaggataccatgatcgacatgggcgcggtgctgggcggccgggcgaccgtgggcaagcgctgccacgtgggcgcgggcgcggtgctcgcgggcgtggtggaacccgccagcgccaagcccgtgatcgtgggcgacgacgtgctcatcggcgcgaacgccgtggtgctcgaaggcgtggaaatcggcaaaaacgccgtgatcgccgcgggcgcggtcgtggtgaaagacgtgccggaaaacgccgtggtcgcaggcgtgcctgcgcgcttcatcaaatggaaggacgagggaacccaggccaaaaccgccctggtcgacgcgttgcgctcgctgtgagcgcgacatgctctgccgcatgcaaaaccattgcatgcggttttttatgcgcaccctttcctggaaaaatgcggaaccaatcgcggccttcttccgtcaaattcataacaaaaaaaacgaaaaggaggtcctatcgtggagaaacgcaaaaacttgcccgcgcgcctgggtgcgtgcctgctagcgctgctcttgctcgccccggccgcgagcgcggacgaagtctacccgaaagcgctcaccgcgcaggaataccagaccttaaacctgttcttgagcaatttcacggaagtgggcgttggggaaatctccccgttctcgccggatcaggtgctagtcgatttcgcgcacgaccacctgtggtgcaaccgccacgatgattttgaattcggcgaatatttcgacggctacaactgccgcgtggcggatacggacatccagagcgtgatcgacgactatttctacgacgcgccccaggtggatctgagccagacgcgcctgacctatcgcgacgggtattactatcatcaggaaaccggcggctggtcctcgggcggcttcgccctttccgccagcgcctgcgcgctgggcgatggcaaatggctcgtatccttcctggtattcggcgcctgtgaaatctgggacaacaacgagttgggcctctcttttgcggaagccatcgacaaatatggcgccccctgcaaccagggcgcggcagtggtccattccaccgacctggccgaccgctccacctacaagatggtttcttacacgctggtataggcccattccaagatcactggagaaaaggcgcagaggtcagtcctctacgccttccctttcaaaaaattgtgcaacagtcatgcactttggatgttccatatccaggcttaaaaaatccttatcgccggtgaggataatatccacatccgacacgatggccgcgtttaagatcggctggtcttttgcgtcgcgtatcagcttttccgcatggtctaccgcagggattaactcataggacatctctgccagcagcacttcagcatccgggagatactttggcgctttccgtccaagaatatcccgcaatgttgcggtcacacaggacgacttcatgattgtctgcgatatagagcaacgctcgcgccggtttggaacggggaaagaccaatgcggaaaacagaatgtttgtatctaccaatatccgcattttaccgtccctttccatagcgcgcttcgtctacaagcgcctgaatatcctcctcgccggatacgcccagcgcttcagccaccccggcaaaggcggcctgtgctttgcggatggccgcagcggaggcgttgctgacaacgatttccccattctgcttttggagaaagaggattttatcgccggattatagcccaagctgtcgccggatttccaccggcacagtgatttgaccgttcgcagagattttcgccaggtgcatgcaagccaccctttctattctttagaactcaagttttctttatctctgctcatattatatcccatgcccggagaaaataaacgcatccgcacaaaaaagaagccgccatttgtaaacttttcgaatcaaattaaaaaagcctcaatacctcgtttcgcgcgcaaaccacaaaactttatccttcccgctgataatactgcgcctgcgcgcgccacagccgggcatacaatccctcctcctcgcccagcagcgcttcatgcgcgccctgttgcacaaggcggcccccatcgaacacccagattgcccggcaaaagcggcaggaggccagccggtggctgatgtacacggcggtgcgctcgcccacaatttcgtcaaagcgcgagtacacctcgaattcggccacgggatcgagcgcggcggtgggctcatccagcacgatgaagggcgcgtgacgatacaccgctcgcgcgagcgcgatcttctgcgcctcgcccccagagacctccacgccgcccgcctccttatacaggggcgtttccagcccttccggcatggcggccagccgcccgcccaggcccgcgcgtgccaggcattcccgcgcgcgctgcgcgtccacatcctgggaagcggccacattttcgcccagcgggaacgccagcaggcggaaatcctgaaacaccacagagaacagccgcaggtactcctcataatcgtatttgcggatatcgatgccgttgagcagaatctcgccctcgtcgggatcgtacaggcggcagagcagcttaataagcgtggttttgccgctgccattcggcccgacgatggccaccttatcccctgcgcaaagccgggcgctgacgccgcgcagcgcccaggcttcgctgccgggatagcggaaggacacgttgcgcaattcgatttcatattccatgtcgccatcctggcagaacgcgcgcttttccacgggcagcgtgccctggtatttgcggttgggcaaatccaaaaacgcgtacaggctttccagatgccggcaatacacggcgttgtccgccagcacaaacagcatctcctgaatccccgcgccaaactgttgcagcgcgcccacatattgcaccacgctgcccacgccaaacgcgccaaagagcgccttgagcgccacgaaaccataggacaggacataactcagccccacagccagccgccccagcgccggatacgcggccatttgcgcataagtgcggcaatccgcgtcgtcgtgccggagcagcgcctgcagcgcccggtccgccgcgccctgctgcgcgtagatgcgcacatccttggcgcgcgcgggctccatatacagttcgcgcccaaagaacatgaacacccggttgtaccacaccgtgcccgcgcaccatttttcgaacacgcggttttcccgcactgtgcaccacgattggcacaggcccgcgagcagcgcgcacaaaaacagcgccagcgcccacagcggcgaattgagccagcccacccggccgctttgcaggaacagcgaaacggtcatcgccgcggaggccgccaggctcaccgcgccccgcaccagccccgtggtgccccacaccaattgcgccagcccattgccaaacatgaagaggttttcctcggcctgctttttctgcgcctgcacgcgcgcgttttccaaatccacatagtccatgcgcatctgcttatcggaaaagaccttgccaaacagcgcccacatctgcgcttccttctggctgcacaccttttccacggcgcttttgaacagctgcagcacaaagttgcccgccagcgtagcgagcgcgtagcccagcaggatctctgcgcggcgcaatccggcgatttcatccaggatccgcgccgaaaaccacacggtaaacaggggctgcacggccaggatcagcgcgcagagcgccttatcgcgcacgaggccggggcaatagccgccgagcatgcggtagccgcgcgcggtgagggcggcgcgctttttaagcggcatccgttccatgcgtttcatggcgctccctcctctcccgccggaggatcgcggtaccagcgcgcctgcgtttcgaacagctgggcataccggccgcccattttgagcagcgattcgtgcgtgccctcttccacaatcgccccgttttccagcaaaacgatccggtcgcaaaagcgcgtggaggccagccggtgcgaaataaagagcgccggtttgccgcgcatggtttcggcatacgtctgatacaggcggctttccgccagaggatcgagcgcggcggtgggttcatccaaaaggacaaagggcgcgtcgcgatacagcgcgcgggcaaacagcagcttttgcacctcgccgccggaaaattccacgccatcatcaaaaatcgcgcggccaaactggctgtccatcccctgcggcagggcggcgattttctcccacagcccggcgcggcgcaggcacgcctccacgcgcgcggcgtccgtttcctccggcgcgcacgccgaaacgatctccgccaggcgcaccggcaacaggctgtgctcctgaaacaccgcggaaaacaggcggtaatagctttcgcggttgtattccttcacgtttgcgccgccatagcagacctcgccctgccctggatcgatgaggccgcaaatcagcttggccagcgtggttttgcccgcgccgttgagccccacgagcgcaacgtgctcgcccgggcggatggtgagcgcaatatcgaaaagcgcgtcctcctgcgcgccggggtagcggtaggaaacccctttcagctcgatggcttgcggcgcggcgtgaggatcgcattcgaggccgcccgcgcggcggtacgtttcgggataggaaagatactcgtgcaaatggctgaaggacagattcaagcggcccagcgcgtgcacctgcgccaaaaacgtgcccagatagagcgagaagccggaaaccacggcgaaatacagcgtgaaatcccccgcgcccatgcgccccgccagcacccggtgcaaaaggaacgcgtaggctgcgccctcccgcaacagggacagcgtgcaatcgcccgccgccgcgccaaacaccttgcgcgcatagcgcgcgtaccagcgcgaaagcgcccgcagcacattttgatacgcggcgttcagccacggccccatggcatagaggcggatgtccttgccgaacgccgcgttccccgccacgccgctgatgtatatggccctttgctggcaggccattctttcctccgcgttggcctccgtccagcgcagcacccgccggttgaaggcaaagctcgccgcgccggtcgccagcagatacagcacgagccagggattgagctgcgcaagcaacgcgaaatagacgcatagccccacgctgctgagcagcatgtctgtgaacacgccatagacctgcgtaaacggcgaaaaattgccattgcagctttggaagcattccgcctgcagctggcgaaacgcgtcttcctcctggttgcaatagtccgtcgtcaatcccttgcgcgcaacgcgctgcagataaaaggcattcattctgaatttgtaaaaataggtgtacttttccagaaatccacccgcgcaacccagcagcgccagcggcaaagtgaagccgaacacgcgcagcgcgagcgccctggcgtttccttgtaaaatggcgtcgatcgcggccctgggcaaaaaggtgttcagcagcgccgtgctaacgctacaagccgcgcccagcacgcaaaagagcaacagcagcggcgcgcattggcgcgtgctcgccaggcaaaagcgcaaattccggcccaacgcgcggctttgccccttttctcccgtttgcatagaattcctcctttcgcacccagtataccgccatttccctgcggcgtggaaaatctggcgcgaacggcagccctatggcgcgaacggcgcggatggcaaaggcagcaggatttccgtggcgaaaacgccctcctcctgctggcggttgacaaaaccaccgtgcttgcccacgagcccatccacgcggcccagccccagcccgtgcccctcgcccttttcgctgcgcagggcgcgtgctcgcccaccggccatggtgttcacaacggaaatgtaaagctgctctttcaaaacccccatatacacgcggataaagcgctcctgcccctctccctggcgcaggcacgcctccagtgcgttgtcgagcaggttgcccacgatggcgcacagatccaccggcggcacgcgcaccgccggcggcaaggcggccttggcgctcaccgcgacgccgcgcgcgcgaatgagcgaaagcttgctatttagaatggcatcgaccatgaggttgccggttttgagcacgggatcgacccgcgccaaatcgtcgttgagcgcggagagataggcgcgcagctcgtccggttcgtctacgagcgcgagcattgcctggatatggttgtggtaatcgtgccgccaggcgcgcatggtggcataaatgtgctgcacttcctcgcagtgccgcgccatgagcgcgttctgatatttcgcaacgcgcccttccatccagcgcgcgagcagggcatcaaggatcttcatggatttcctcccggcacagcgccaaaaacgcccggttcacctccggccaggcccggcgcgcgagcggaaccgtgcggccatcgtccagcagcaaatcggttttgcgaatctgccgcacgcggcacagattcacgatatacgagcggtggcagcgcataaagccctcgcccagcgccgcctgcgcctgcgcgaccgtcatgcgcgcctcaaagcgcgcgccatccgcgtgaaaaaccatgctgtgggaaaacacctcggcatagaggatttcctccgcaaaaaggcgcgccaccccatcgccgcagggcaggagcaccgcgcgccggggtttgggcaaatgggcgcgcgccctgtccagcacggaaaagagcttttccctcgaaaccggcttgagcagataatggagcgcgcccacatcgtatccttcggccatgcaatccgcgtacccggtgataaaaacgatttgcgccccgcacccctgcgcgcgcagttcgcgcgccagttccatgccgctcatgccgcgtatcccaatatccagcagcaaaagatcgaattcttcccctccggcgcggtgaaaaacgaacgcctccgccgaggcaaacgcctcgagggaaacgcgcgcgcccgcgccccgcgcccaatcgcgcgccagggagagcagcagttcccgctccgatggaacgtcttcgcaaatggcgatggataagcccctgcacatacgattctccacccgctcaaaagatcagccgcaggggccgccgctccagcgcctcccgcgcccaatgctgccgcagggccaccggttgcgccgttgcctcgtcctcgccgcccagaatagatcctcatgctaatcaaataaaccattcgacaaatatcgtcgcaatgcaaatcctcatcatcgcatatttcttttcaccttctttattgcattttttgccaacttgcacgccaactctctagacttatccacatcaccagacagttccagaataataaaatcaaccgcctcatcagcgctcataattcccacatcccgtgtacgagcaaaagattctatcatcatttttcgaatttcataagaatccgcatttagttttcccagaattcgaaacagatcctccttatgaaatggataaagttgaacattattatagtaattttctatacaagtatcttcagaatccacaccattcatacgcaatctatattcattaagaagagataaaccgccataaacatttatcctctcaaacagataccacgaatacaaatttaatacatctacataagatctcccctcctcctcgataaaaaggctcatcatacgataacattcacaataacgatgcggcattgccgttcccgattccggattcgtgctaatttgtatatacatttcattcgcaaccaaatttagctgcctgtaaataatatcacgatacttcatctttggtgcttcaatgacagcattattaatcatccatatatccactccaacttcagtagtatcataactatgtttctccaaaaaatactgaatatacggatttgctttaacggcctcaattcccttatttgttagccgccacatgcgctttttaataacattgctcagtacatcctctggaacactagtcagtcgttcaataatctctgtcttttttcctttatccgatacatttaaagctatagccaattctttaagctctgccaatttaagcctcggcaaatagtccattacattcccaatttccaaaaacattctatcttgtaaatttttcaatatatttacaggattgtaaatttcaaatttgtgaattaaccatcttggaaaatcagtttccgacacttcatatcgttctgcaattgaaagcataataagctctgctggatacaatccatatatatccggtttaccttttaagtgaagcactggtatattcttactttcttcatgcatctctgccgtcttaatgggaagttgtcgcgtgtctaaagacttttttctaaatagcgaagcaaaaaaagacattaactcacctcattaactgtatttactagtatcaagtatctttgtattcaagcgctcttactcttatccaactttcaaaaacacgaaatcaatccctactttgttttccaaacacacttcgcgcgcaatccagtatcccatccgcaaaagcggaaagagccgcgctctccgccgcgaacggctctcctccttcataggctcgccgcgcggcgcgaatgaggggcgcaaattccggcacgttttcctcgccccacgcgccgccagcggccttggagcgcatccgcccatcgcgcgcaaacgccagcgtgcggcacagattcaatatggtatagactggatcgctatggatgctctcccgcgcagaggcgacgtcctgccagacgctggcaaagaccatctcccgcggcacgggagcgaacaccatccgcgcggccgggccgcacagcgcgatgcccgcctcccgggccacggcaaagtgcgcggccagatcgggatcttcgccccgcatggcggcgcaggcgcccgccaaatccccgcgaaagcgcggccagtgcatgggggaaccgtgcaattcaaacggcgcgggatggccgggatgcgcgcaggcctccgccagcaccacgctcatttccagccctttgggcgggcaatccgcttccagcgccaaaagcgcccgtacaaaggacatcttattttccagtgctggtggcgcacatacaacgaccagcaaatcgatatcgctcgcttcccagcgaaaaccgcccagcgcgagcgaaccgtgcgcatacgcgcccagcaaattttcgccaaagccggcttcgcacgcggcgcgcaaacggggcaaaagggcccaaacccgcgcgtccacggtttacgcctggcgcgcggcttcggcggccttgagcacgcggaacaggtttccgcccgcgatcttctccagcacttcgggcgcgtagccgccgcgcgcggccaagaaattcaatagcgcggggaaatccgcagggttggccaatccttccggccaggcgtcgatgccatcaaaatcgctgccaaagcccaccacgtcttcgccgcccagctgcaaaatcgcgtccacatggcggtagacgtcctccagcgttgctgcgcgcccatttgccaaaaacgcgctatagaaattcacgccaatgtagcccttcttttcgatcacggcgcggatctgcgcctcggtgaggttgcgcgtgtgctcgcacagggcgcgcgcgttcgaatggctggccacgggcggcaacgtggaatgctcgatcacatcccaaaatcccgcctcgttgaggtgggaaacatcgcacagcacgcccttgcggttcatttcgcgcacgaacgaaagtccaaaaggcttgagtccgccttccgggccgttcttggccggatggccgatttcgttttcaaagttccaggtgagcgcgatcatgcgcacgcgcgccgccgcgtcgaactccgcaaagcgttccagcgagccctgcaaaatctcgccgccctcgatggagaacacgcccgtgggcgcgtccggcagtgcggcgggcaaagcgcccgtgagcacgggcacgggaaactccccggcggccgaaagcatcctgcgcgccttttcgtaaggctcgatgccgcggccataggtcgcgaagagcgcgaacacttgcagcgaaaccccgcccgcggcgagccgctcgggcgtgatggtcgcgttttccagcgtgcccccgctcaccaggtgggaaagcgtatcgcagtgcgcgtcgcaaaccttatattgcataaccattcctcccaattatcccagcgccagccgcagggcgttgagcgcgttcacacaggtgagttcgcgaatccaatcgcgttcgccgcgcaggtgcaattcctgcgcttcgcagccgctcgtgctggccacgcccacataaaccaggcccacaggcttttcgggggtgccgccatccggcccggcaatgccggtggtggaaagcgcgaaatccgcgcccgcagcgagccgcgcaccctcggccatttcgcgcgcgcactgcgcgctcaccgcgccaaactggcgcaacgtatctttcgaaacgcctagcaggcgcatcttggcctcgttggaatacgtaacatacgcctcgcccagcacgctggacgcgccgggcacatccaccagcttggaggccagcatgccgccggtgaggctttccgcgcaggccacggtttggcccgcggcgcgcagcgcgttcaccacggcggcggccagcgtcaaattccggccttcgccatacaccgcgcggcccgcgcggcggcggatttctttctccagcggatcgagcaggggcgcgctatcctcgttcgcgcccacgcgggccgaaagccgcgcctgcacctcgcccgcgccacagtagagcgccagagtgggattttcgctgtggaacaaatcgagcagcagcgtttccagcgagctttcgccaatgccgcacacgtgcaaaaagcgcgaatcgatgcgcacacccgtgcgcgcgtgcaggtagggcgcgagctggcgctcgaacatatcctgcatttcgtgcggcgggccgggaaggatggccacggccttctgcccgttttccacgattgcgccaggcgcggtgccgcgcaaattgggcatcacaatcgcgccccggggcatcatggcctgcttataattgttgggcgtgatctcgcggcccagccggttcatgcgctcggtgagcgcttccaggctgggcgcgtgcatttccatgggcaggccgaagaattccgccaccatttccttggtgaggtcgtcttccgtggggccaaggccgccggtggtgatcacgatatccgcgcgcgcaatcgcctcgcccagcgcttccttcacgcgggcggggttatcgcccacggtggtgtgccggtagaggtttacgcccagttccgccaaacggcgagaaatatactgcgcgtcggtattggcgatttggcccatgagcagctcggtgccgatggataaaatttccgcgatcattggtatccctcccgctatgtttatcccctgaggaatttccggtttttccagatataatccgcgccgctgagcgccgtgaggaacacggaaatgtacagcatgatccgcgcgatgatttcatacggcccgggaaccagcacgatggtcaaaagcacggcgaacatctgcgaagcggttttgtatttggcgatggtgctggccgcgatcaccacgccgccctcggcggccaccagccggaagccgctcacgatgaattcccgggcgaggatcaccaccacggcccaggcttccatgcgattttgcgcggccagcatcacgaacgcgctcatcaccagaattttgtcggcaatgggatccataaacttgccgaagttggtcaccagattgcgcctgcgcgcgatctggccatccaaccagtccgtcaggcaggcgagcgcgaacacgcaaagcgacagccagcgccacagcgtgctatccggcgaaaaatgcaaaaacacgcaaaacaccgggatcatcaaaacgcgcagaagcgtcagcttattgggaagattcattgtatcgcctccccatagaggtcatagggctccgcgcgggtgattttcacgcgcacgaattcgccgggcgcgatgggccgctcgctggtgaaccagattttgccatcgctctcgggcgcttccatctgcgagcggccataatacgatttgccctttttgccctcgcacagcaccagcggctgcgtgcccaggcgcgcctcgctcttttccatggcgatgctctgctgcaacatcatcaaatcgtccagccgctcagccttgatgtcctcgtcgatctgcccgtccatctccgccgcggcggtgccttcctcgggcgaaaaggtgaacgcgcccagtcggtcaaactgcgcctcgtccacaaaatcgagcaattcctcgaattcctcctcggtttcgccggggaagcccacaatcatcgtcgtgcgcagggtgatgcccagcgcgtggcacttttccaccagcgcgcgaatgtattccgggctgccgcgccggttcatggcccgcagcagccgcgcgttgatgtgctgcaggggcaaatcgagatagggcaccacgtgcggcgtgtgcgcgagcgtatcgagcaacacatcgtccaccgtgtccggatagcaatacagcacgcgcacccattcaaagcccatgcccgccacctggcgcaagagcgcgggcagcaggcgcgtgccgggcgcgaaatccgtgccgtagcgcgaggtatcctgggcgatgagcgtcacttcctttacgccctccttcgccagccgctcgcactcggcgaggatgctctccatggggcgcgaagcgtacg

SEQ ID NO: 1156 - DNA, 32759 bp, Unknown
  16S sequences of unknown bacteria
tgtatttattatttttattatatcatacttaatatttttttcaatagctttgtcccattttaaatccgaaaatcgggaaagagtttgtattttgccgcttcttttctcttaaattcgtccatgacgtgcgtatagacatttaacgtcatgtcggcggtcgcatggtccataaaccattaaatacccttacgttcccgcctcttaaaccgcctttcctgttttgtccgttgaagaaacgcttttctatcctttactttttgccttgaaagctaaagagaaccgaacttcaaaagtccgattctcttttttatcgtatgggaattattctttcggttcgtccggcatcagccatgccttatggtcggtgtgcagaagttcgtgcgcacggtgcgacatcggcttttgcagatagttttcgtaacatttgacgacggaaggattttcgtgcgagaatctcaaagcgctctctttatccaatttacgcaaattgtcgccgcgttccgccgccaactccgcgccctcgtggataggctgcccgccgccgcccgcacaaccgcccggacaagccatgatctcgacgaaatcgtatttcgcttcgccgcgttctatcgcatccatcagtttgcgggtattgcccaagccgtgcgccaccgcgacggaaatttccgtgcccgccacgtcgaatttagcttccttccagccgtccatgccgcgcacggcatagaaagcgtcgggatcgggattcttgcccgtcacgaggaaatacgcgctgcgcagcgccgcttccataacgccgcccgtcgtgccgaaaatgaccgccgcacccgtacctacgccgagcggagtatcgaattcctcctccttcaaatcctgcgggatgatatgttccgcgcggataagcctgtctacctcgcgggtggtgagcactacgtccacatcctgtcccgcgcccgcgtcgttcatatttggaagcgcgcactcgtgcttcttggcaaggcagggcatcaccgagatacagaagattttattcggatccacacccaaaaggtcggcatagtagctcttggcgatcgcaccgaacatctgctgcggggatttcgccgtcgagaggcgggaaacgtacccgggatactgcgatttgataaaccgcacccagcccggacagcaggacgtaaacataggcttgcccgatttcttgatttcgggcaggcgcttcaagaactcgctgccttcctccataatggtgagatcggcggaaaagttagtgtcgaaaacgtagttgacgcccatgcggcggagcgccgaaaccaggcgtttggtggtggcgaactcgcggggaagcccgaacgtttccccccatgcggcgcgcacggcgggcgcgatctgcaccaccgtgatcttttcgggatccgcgagggcatccagaactctgtccgtatcgtccctttccctcagcgcgcccgtgggacaatgggtgatgcactgtccgcaaagggcgcagtccgtttctttaatcctgcggccgcgggaaacgtccaccgtcgtgcgggagcccgtgttggtgacgtcccaaacgtgcatatcctgtatcttatcgcatacctggatacacctcatgcacttgatgcacttattcgcgtcgcgcacgagcgggaagtccttaggccagtttgccttgacgaattccttttcgaagcgctgatcgataatatccagatcgttggcgagattttgcagagaacaattgcggcttctcacgcaggtggcgcagtgcgcgtcgtgctgggagaggataagctctacgttgattttgcgggtgttgcggactttgggactgttggtgtagatctccattccctctttcacttcgttattgcaggcgggaatgagtttctccttgcccttgatctccaccacgcagacgcggcaggcgccgatctcgttgatatctttcaaaaagcaaagggtgggaatagatacgcccgcggcggcggcggcgtttaaaatcgtcgtgccttcctcgacggaaacgggaatattattgattttcagatttaccatttttcgactctgcctcctttaaagataccgtaaccgaaatgatcgcagcgaaggcagcggcgcgcttcctgcaacgcctcctcttcgctcatgccgcattccatcaatttgaaatcgtttttgcgctcggacgcgttccgctccgtcatattcacgcggccgcagggacagcggtcgtccagacgaatgggcgggatctccacgtccactttgagttcgtggcggaagccgagatattcgtcgatattcgccgccgcgacctttcccgccgcaatggcgcggatgaccgtcgcgggccccgtgacgcagtctccgcccgcaaatacgcccggaatgtccttgatgccgctccaattgagcgcgtcgatgactccgcgcttgacgggaatgccgtgtttttcgaaattgcgggactcgataccctgcccgatggcgacgagcaccctgtcgcaggcgagccgctcttccgctttttccgaattgcagggcttgggcctgcctctatcgtaagcgccgatgatctggggcttgacccacagcgcggcgaccttgccctgcgcgtccttttcgatgcgcagaggggactgcaattccaaaacttcgcagccttcctgaatggcgccctccacttcttcgcgcatggcggtcatatccacctgacggcggcggtagacgatgcggacgcgctttgcgcccaaacggatggaagagcgcgccacgtccatggccacgttgccgccgccgatgacgatgatgtctttgcctttgaagtcgggcatttcgtcgtcgccgatgccgcgcagcatctccaccgcggacaaaacgccttttgcgtcctcgccctcgatgccgatcttcttatccgtctgcgcgccgatcgctatgtataccgcgtcgtaatccttctttaaatccaaaatgctgggattttcgcccacgggagtttccgtcctgacgtcgatccccaccgagatcaattccgcgatctctttgtcgagaatctctctcggaaggcgatagctgggaatgccgtaacgaagcattcccccaagcttctttttcgcctcgaacaacgtgacggaatgtcccatcagcgccagataatacgccgcagagatgccgccgggaccgccgccgatgacggcgaccttcttgcctgtcgtgggcaggggcgcggggacgggcacgtcgcccgcgtgctctacggcaaaacgctttaagccgcggatattgatggaagcgtccatcatactgcggcggcagcggacttcgcagggatgttcgcagatgagtccgcagactgcgggaagcggattgtccttgcggatgaggcgcaccgcgtccgcgttgcgtcccgcctccaccagcgagatatagcccggaatgtccacgcccgcgggacactgcgccacacaggggacgggctgattgagcgcgcatttgcagcgcccgtgttcgatatgctccacgaaatcgtctcggaagccctcgatgcctttaagcaccattttcgccgcttcgtagccgatggcgcaatccgcggaaaaatagatgctttccgccgtcttttggatgaggtcgatggtatcgagcgaagcgttgccgtccagaacgtcgtccaaaagcttttccagcgttcccaagccgatgcggcagggaacgcatttcccgcaggactgggcgtggcacatcttcaaaaaagacgccgccatgtccacggggcagagtcccgaggggctggcactgatgcggcgttccacatccttgtacaactcttccacggtggcttgcgccttattctgcgtgatgatactgagtctgctcatagttcctcccgtgattcaacgattgaaaaaaatttcctctttcgtttttctaatcgttataatttttaccgatagtaattattttatcataaggacgcccggaagtcaaataaaaatgaatgtttacaacaaagaccgaacgtatttttacatctttcgacaaaggggcggctctattttttcgtcctttttcagcgccttcttcctcctcccgcccccttcttttttctatggttctttcccctttccgaatcggcggaaaaagcggaaacgacaagcgttcacacggggagaaaacaggcgagccaaaaaagcggcgcagacgccaaaatccgttttttacggcgcgcagcggcgcagccgtttttttccgcttttcccccgacgtcgaaagaagtctaagccttgactttgcgcttttcttatgctatacttacttcaagacaacggcagggaggaaaaatcatgacggatcttacggaaattttatacgagggaatcaaaaagacgattgagaattggacggaagcaggtatttatgcgatctctttttttgtttacgacgagtgcgacgatccgaacaagccgaccgtaacggtgggctataacacggaagcgtgtttccaggactccgtggaggacgcgtcggacgagggagaagcgagatggaactatgccttctggctgcaaaacagggaatttgtgttcggcagaggaaaaacggcggcggtcgtttccaaatggcgaaaagagaacggatataaatgcgaggaagaggacgaagacggcgaggaggaatacgatgaaaacggctactatatcggcaagccgcccctcgtcacggaaaaatttatagaggtcctcatagaaacggcgcgacggctgcacgaaagcggcgttatccgcgcgcatttcggcaaagagatccccattctcattcacgaactggaatactatgacgccatcgccgaagaaacgcggcgcgcgaatcccgaaggcgttgcggacgattttattcaatgggtccaaaacgggcaataaaaccaaaaacgtaaggggcgattcttttttaagaaccgccccctttttctattcttttactctcacacttctcttattcccgcactttttactctgccctaagcctctttacgtccgccgtttcccccgcagaaggcagggagtcccccgaagacggctccttcgaagcctccgcgtcgggaacggcgtaatagccgatgttaagggtcgcgggcgcggcgcagttattggaaagtccgaagctgccgctttcgaggagaggcagcgtgccgcccgccgtcagatcgaccgcgaggcaacccgcccccgcgggattcgccgcgtattcgtccgcccaccaaattttgagaacgccgccctctatcgacaaacgaagagtcgttccttcggcggtttttcccagatccgaacagacgatgccgcccagatagacgaaagttcccgcgctgtggttggaagcaaaccaattggaataacggaacacctgcacgaaattatttgccgtctggatatttacgaggtaagcgtccagacccgtattctcggtctgcgtggcgcgcagcagaacgccgcttaaatcgatattcgactccgaagccttatttactttaaattccaagacggcgtcgttcatcggccgatccaagagccaccattgatcggcgggcatagaaatgctgccgtcgtcgtttaccgtatacggcgtttcgggaacgaacgaagcggaagcccccgcgttcagggcggccgtcagatctttttgcgtccagcccgacgccagcgattttaccttttcgtccgccaccgtttcgagcgtcagatcgaagccgacgttttccgtccacgtgatgccgccgacaaagcccgaaggatacacttcatacgtgccgttataggtgagatcgacgataatcgccgaggaaaaaccgtatttctcgtaatcttcctgcgtcgtcagatacagggtgctgcccgaaatgcccgcgtgaaagagcgttcccgtcacgctgccgggatatacccagccgccgatgtattgcagcgtgatcgcgctgccgttggtattgtaacaattttggaaataatagacttgcagatagttgaggtccgtcacgtaattgatgagatagccgttgagtcccgtatttcccgagagagaagttctcagaaataccccgccgaccgccaccgcgcccgtgggagcgtcgaggcggaacgtcacctccgtatcccgatacacggcggtggcgtcgagcgcatacccgaatccgctcatcctgatgccgcccgactccgtcttcgtccagccctctgcggaaagcgagaagcgatcggacgcggacaggagatgctccgtcacatatctggcgttgttctttatctttttcagcgcgtccagctcttccgacaaatccagattttctatctgtaagagggtgccgcaagcctctatcttttgcttcgcgtcttcgtacaacgcccgcgcctgtttccattccgccgcccgaagcgccgtttccgagtaggcatccagcccgcgcagagccgccgcccgcgcggaagccagcttttcggcgtctatggtgggatccttttcgggctgattttcccccgccgccgcgcttctgatcgattcggcaatcatgccgtaagcggcttttgtcgggtgcagatcgtccgtgaaataggacttttgcgagctggtaggatccgttttgtccgagcagaacagatactccgtttccgcataatagatccaatcgtaagaggcggcgagattgcggaaaagcaggtttgttctggcaatctgttccgtataagcctttctcgaagggcagtgattgacggaaacgaggaccaccttaaaatcgggcagctgtcttttgacttccgtcagcatccgttccgcgctgtccgcgatcttttccgccgcgacgccgcccgaaatgtcgttgatgccgatcatgtatatcccgagtttgggcgcataggacgtcacctgatcgatcatatcctcccaatgggaggccaccgaaccgccgatgccgatattgtcgatggaggaatattcggggaaatccgttttataatccgtccacatttccatatacgaatgcccgaacaacagcgtttccgcgctgcgcgtctgcgtgcccgcgctaatttcgggagccgaatacagcgtgcccgcgccgcccgcttttatccctatccgcgcgcccgtcaaaggctcggcgtccgtataggaagcgtaacagatccgctcggcgtccgtaaagtcgaaatagcaggagatctttccctcctcccgcacgacggtcaggcggtgactgcccgaaggcgtatagcccgcggacaaaacgccgcgctgcaacatggtttccgtgccgccgctcaccttggaaagcaccgcgtaccgcgaggtgctcaaataaaagcgataatagctgtccgcctcatcgtccgcgccgaaaatcacgccgttatccgaggaagacgaaggcattatcgagatcgtaaacgtcccgttttccaaacgcgcggtattgtgcagagcgagagtcgcctccttcgttttcgccatatcgccggccgccctcacgaggctgcccgaaatcgcccgatactcggctgcggcctcgggggtatacgcctcctcggattcacacaaaacatcggaaaactccacccccgacgcgccggcacgcatcccgtagcccttgccccaaaggggattcgcatcggtgtaggagagatacaattcgccgtccacatagcagtagatcgtcgtgtcgtccctcgtcactttcaaacggtaggttcccgaaggatcgtaattcgccagcgtttttaccccgcagaccgtccagccgtttgacaccttgccgagatatgccgtccccgaaaggctgacgaaaaagaaataataggaaacgccgttttcccagtatgtattcgcgccgccgtccgttaaagcgaaaacgatgccgttatccgcgcgggcgcccgacagtttgaccgtcgcttgaagactgccgtaaacaaattccccttcctttttcaccgccagcgcgtttgcggaagaggagataacggacgctttcgtcgcttccctgtacccgccgtttacgattttatatccgtccagcattcccttttcctccgaggatgaatcgacagaagaatccgaagaagaatcggagctttcgctcgacgattgttcggacgaacttcccgaggagtcggacgtttccgaggaagcattgccggaagaggatggggacgaggaatctttttccgaagcgctttccgaaacagcggaagaagaatcggagcttccgtccacaaccgtgccgcaggaagccgcaaacagtgtgcacgacatcccgagagccagcaaaaacaacaaaattttacgctttttcattttcgttctcctttatttctattttctcaaaacgagtaatcgcctgccattttcttcccaattgtaatatttcagggcttttcttcccccataaggcaatttttcaagctgaaaagaaactcttgacaaactttttcgtttatactataattaagtatagagaaagagcggtgtaaaagcaagaccgttttttgtcagaatactatattatcttgtcgttctatatgaaattcaaagccaacattcaaaaaaactttcaatcggggactcgttcctatcaatacacgggcaaaagcagcagcaatcccctgcgctacgtgatggatatgacggggcacgaaatcgtgggcggcgcctaccgcctggacagagagggatactatacctatctcctcaattataccgtgagcgggagcgcctctttcacctatttaggacgcactcacgagctgcgtccgggagatcttgtctttatagactgcaatctgccccatcatttcgaatcgggaaacgcgggctggaacttctattttctgcactgcaacggccccgcgctgcccgaattttacgaaacgttcgtccgctgtacggaatacgtattctccaatttccgtcccgccgcgtttatcaaagagctggacgccattcacgcgcttttggagaaacatcccgaagccatggagtgcggcactaagactcatcccttcgaggacgaagaactgttcgccgatttttccgtgcgcatttacagcctgctcacggatatttatttgcagcttcgccagcaaaagagcttcttcccgccctctatcgtcaaggcgcgggactttatcgcggagcatttcgcggaaaaaatttccttggaagacgcggcgagcgccgcctgtcttagcgtctatcatttttcccatcagttccgccgctatacgggcaccacggtgggcgcttacatcaacggtttgagaatgcaaaaagccatcgaactcttgtccaccaccgataaaaaaatcatcgatattgccgtggaatgcggtttttcggatattcagatgctgaataagctcttcaagacgaatttttccatgacgcccacgcagtacagaaaatcccatcgtccctttttttccgattgaaagatatgtttataaaaaaacaaagccatccgtaaaacggatggcttttaatcgacgccgaaaaagcgccggatttcaatacgtccttctctttaaaaatcaatcttcgagcaaaaattcgttttgggaatcgatgccgacgcccacctgttccgtctttctgtacccgccgtcgggcaaaaatacccgcgccttgatattgtcggagagcatcaccgtcagcatatggaatatcttttcctcgatgcgtttatccagcacgggcgtggcaatttccacccttttatccgtgttgcgggtcatgaggtccgcgctggaaatatacatttttcgggccgcgccctccccgaaacaataaatccgcgaatgttccagaaatctgcccacgatggaaacgatgcggatattgtccgtttcgcccgggatcccgggcaaaaggcagcagattccccttacgatgagggagattttgacgccgctcttgcccgcgagatagagcctatctatcatctgccgatcggtgagcgaattcatcttggctacgatgcttgcggagccgcccgctttggcaagctctatctgctcgtcgatgcatttcaaaagccctttcttcaagccctgcggcgcgattaagagtctgtcgtaatgatattcggtattgcaaatggcgatattgcggaagaatgccgccgcatcctcaccgatttctctgtccgccgtgatgatattgaggtcggtatattgtttggatgtgctctcgttgtaattgcccgtacccaggtgagtgatgtatccgatctctccgttctcgctcaaaagcacggaaatgattttcgaatgcactttataattctgcattccgtaaatgatcgtgcagcccgcctcctgcaagatgcccgcgaaatacatattgttttcttcgtcgaagcgcgcgcaaagttcgatgaccaccgtcacctctttgccgttttcgctcgcccgcttcaacgcttccacgatgcgggaatgattatccaggcgatagatggtgattttgatggaaaccaccctcttatcgtccgcgcactcgttgagaagccggacgagcggatccatggaatcgaacggataggcgagaaacacgtcccgttccttcacgcgctcgatcaggctgacgggaggcatcagctccgaggcgacgcggcctttaaaaggcggatatttaagtatcgaaagcttttcctcggggaaatatttgcccagagaaaagagaaatttatagtcgagatagtgctccaccttaaaacagaaagatttttttaagtcgagatttttgaggacgaaagagcgaaggcggtcgctgtttttgtcgatttccaagcgcacggcgtccagcgtcgagcgcattcccacttttcgcttcatatatttggaaaaatcgaaatcgtgttcgagatccgcgtcgtccacgttcgtatcgaaatcggcgttgcgagtcacccgcagcatcgcctttcccttcaccgtatatcccgggaaagcgtacgctccgaactccgataccagatcttccaccgtaacgagattgatcttcttgcctccctcgatacggaacaggcgctccgcggcgggagggatcgccatcacgccgaacatatcccgctcttccttttccagctcgaacatcatgtaaagatgtttattttcaaagcggatcatgggatgctttgcgtccagcaccatgggcgagagaagggggagtacggattcgaaaaaatgcgcttcacactgcgcgcgctggcggatcgtcagttcgttagggcgcagaatgcgcattccgtttttcgcaagctccgctttcaggcgcgaaaagaccaccgaacattccttatagagcggtttgacgacttccaggattccgttcacctgttcctccgcggtgagttccgtcttattctcgcgcgcggcgggatccagcttgctctcgttgagcagacttcccacgcgcaccatgaaaaattcgtcgagattagaacagaagatggccaaaaatttgcagcgttccaagagcggattggtcagatcgttcgcctgatcgagaactcgtcggttaaattgcagccaggagtattccctgttgcagtaaatgccttttacgaaggcgttttctcctttcgccacgattattcctccttctcctccgtttttgcgttctcgtccgtttttgcaacggcgttctccttcgcttcgttcccctcttccgtccggggactttgaacgggcgccgctatttcctgccgtatttccttttcgagcggagaactctctttaaaaggcatcccggctttgttcacccgcgggcgcctgatcctcttgacgggcgccgtgtctgttttttcctctattccctcttcgcccgcggagctctccgctttcctcgcgcgaggacgtctgactctcctgacgggcgccgattcctcttcgtttgcgctcgtttcgaccgcgggattttccgtcttctttatgcgggggcggcgcggcgtcctttgggagtgttgcgtcgtatcttgtccttcttcccccgtagacgcagatatgggcgctccttccgtttgcactttacggggacgtcccctgcgggcgggagaggcgggagtcggagcggactgctcttcgggaaggtatgattttctctccgtttcttcctttttcttgtgggaagaggactttttctcaggcgatttcaccgattcgaaatccgctttctccgccttgcggagagatttcttctttgacgtcttctctgttttttcttcgggggattccaagaaaacctcccgatccgccgcgggaatctcttggagatcggtttctacaccctgccattttccgcccgtcaccaaagcgagatagccctccttgacgccgaaatcggaaacgacgatattggcgacgccgaaatatttgagcatcgccctcagcaccaccgccgcggtcgtcagcgtataaattttttcgggcgcgtttttaaggacgagcatactcctgtccgaagaacgcacgagatgtttgcacagctttttcagtctgtcgtattcgatgcgcttttcgccgcccgtttccgtttcgtcgtaataatcgcaatagacgtcgtaaatcgcccgattggtggcgccgacaagcaccgccgtcgcaaaggcgctttctccgggaagccccgatttttccagcttctttttgacgtgtttttgaatgatcttcgtctccgcttcgtcggggtgaatatgtttgacgaacttgcggctgatctgaatggggccgaaatcgagatacgtgagcgcttcgggattgtccttggtgaggtcgcaaagttcgatgctgccgccgccgatatcggcgaggacggcacgattgagcgctttatattgctcgttggaaacgaggtcgcaatacgcttcctcctgtccgtcgagaagattgacgttaaccgcagcccgacgtttgatctccgacgtcacccagccgaaattttcgaagttgcgcatggacgccgtggaaatgacgtaacatttttccacgcccgtctttttgcagatttccttcatcttgttgaggttttccaccaatttttccacaccccgttcggagaggttacgtccttccatatagtggagaatggaaatattctcccgctccctcagcagtatgtcgaaattcttttctccttccgccgccagcagagaaatgctgctggaactgatgtctatgatcgcgtatttcattttttactccttgtatctgtcgccgatgttctttatttatacggatttcttaactttttaaagggaacgggtcgggtccgattccccgaaactgacgcctatcgcctttgccgccctcaccatctgatgagagggcgggacgctcttggttttgcccgcgatatccgccagcgaattataggtgacttttccgcccgaaaccgccacggtgacgccgaatttctttttctcggcgagttctcccgcataacttcccatcagcgtgcataaagcgcgatcataaggattgggagagccgcccctctgcaagtagccgatgacctgcgtacgcgtttccacgcccgtcctcgcttcgatattccgcgccagacgctgggtgacggtggtttcgccgcgcgcggcgcgaagggtcaggcggtcctttttcttcaaggacgcttcttctttgctcagcgcgccttcggcgacggcgacgatgctgtacctcgcgcccgcctttctcctcttttcgagaaccgccaccacggcgtcctcatcgtaaggaatctcgggaatgaggatgatgtttgcgccgcccgcaagtcccgcgtataaggtgagccagcccactttattgcccattacctccaccagcatggtgcgcccgtggctggcggcggtactgtgcatacggtcgatacattcggtggcgatctccatagccgaattgaatccgaacgtgacgtccgtgccccagatgtcgttgtcgatggtcttgggcagaccgatgacgttgcagccttccgccgcgaggagcgccgccgtcttgtgggtgcccgcgccgccgagcgtcacgaggcaatccaagcccaatctattgtagttttccttcattttatccagcttcgaacggttgttttcatccgtcacggtcatctgcttgaagggctggcgcttgctgccgagcatggtgccgcccgccaaaagcaggtcctcgaaatccttttccgccaacgtttcaaaatcgccttcgatgagtcccgtatagccgttgaggaatcctataattttcacgtcttcgatatgcgaataggcgtatttcgcaaacgccctcatcactgcgttcagtccggggcaatccccgccgctcgtcaacattcctattttcataaacctttctcctgcgtaaagtatgcccgttcgcggcgcattttatagcacttctccccgaagggttttcttttttcctattttaccacaattttactccgctgtctaccccttcccccaaatttctcgtcaaaaacggcacaaaagacactttttcaaaacgcgactgcgtttttatccgcaagagccgacttttctgctttgatttttcgatctccgaaatctcaaaaatactcctttgtttttcggcggcttcgtttgccgtcttctattatacgctccgtttgtaaaaaattttacgatattttgtaaccaaacggtaaatttttgacgagaactatgttttaaagtgaaattctgcctatatttttgtgctccctgcggccatttttgaacgtgaaggggagaaaactcctctttttccaaaaaaatccttttaaaacagtataaaacgataaacggcgggagatacttgtattgaacaggaaaagctcgcctttacatataatgcactaagggagtctttttcttacgagagaggtgttttatatgaacgttaaacgcggagaactttattatgccgatttgtcgcctgtggtcggcagcgaacagggcggtatccgtcccgttctcgtcgttcagaacgacgtcgggaacaaatactcccccaccgtcatcgccgccgcagtcaccagcaaaatcaacaaagcaaagctccccacccatatcgagctgccctccgcctacgggcttgccaaggacagcgtcatccttttggaacaaatcagaaccatcgacaaaaggcggctcaaagaacgcataggagaacttcctcccgccaccatgaaccgcgtaaataaggcgatactcatcagcctgggcttttcccagacgccttaacagagcctatacgatgtttttcatcatcttcccccatatatccgaaaatcggtacggagctgcctgccccgtaccgatttttcgccctttgcgcaatatttttttgcttttaaaaataggaatatgaccggataagcccctgtttttaatagggacttcgtcgggagattcaatttcttttaaactctccgccccttcgtcgtcaggatctataaattttaaaagcttccgttttaatattgttcaagacttctaaatttttcaaagactcccgatttaatatcgccctcccgcggctctcgtacgttccatttttcccgcataaaaaagagtttcgccgatttcgcgcggaaaagcgaaaatagcgcaaaaacagtcaaattccgcgccgccgtttttgttatagtggagggcgaaagacaaatcggaggacctctatgagcgaacgacaaaaatctatccgccgcctcgaaagaaaaaacgcagacgggagaatcgtatgaacgaaaaacaaaaatttaatttttccaccgtttttttatacatactctgctttacggcgatgttctgcctgtattacgtcggcgacaacggcgagcccttttcactggcgctcctctacgccatgctttcctgcggacttcatcccgtcgtttcctgtctgctctacgtcgtgtcgggactttcgggcttttctatccaatacctgcccgtctatgcgggacaggcggcgattttatgtatcctcttttgcgtatacaggaggcttaaaaagaaggcgacggtgttgccgctcgtctgcgtttctttgtccctcgtgctgttcgtggcgttctctccgttcgttccctacaacattcctttaaaactgccctttgcgctcggttccatcagtcagaaaaccattctcgcggggcttatccttctgctttccgccatgctgacggtcgccttaaaagcgcttttaaacaagctgttgaagtgccgtctgaaagcggaagaaattattttttccgttcttttcttcgttctcatcggcgtgggaatctgccgcgccgcgaccgtcgtcgcttacatgggtatcgcatttttcgctttactgctctttgcctgcgcgacaaaggacgccaccgccctcgtgtgcgcttttgcgctgagcctgccgccggcactcgtcggagatatttcccccgaacgcttttttatttacggcgtcgccgtcgtcctcttcatcaaaatgggacgtctgcccgctgtgctggcccttttagccgtattcttttcctacggatatttcgacggattgtattcgatgcccacttcgctcctggtgcaatccattctttccgcgctcattccctgccttttatttctgctcattccgccgccgctggtacggaagatggaaaataaactcgttttctatcgggaaaagcacctatcccgcatcgccatcaaccgaaaccgcgccgccatcggagaacagcttttcgaaatctcgggcgtatttcgggagatacagaccacctttgccgccctgggcaccaatgaagccgaggaaggcgccaaggaatacatacgcggctgcgtcatcgagagcgtctgcaaatcctgcgtcaattaccgcacctgcatgatacacggcttggaaaacggcttaaacaagctgatcgacatcggctgcgcgaagggcaagaccagcctcatcgatattcccacagacctcgcggaatcctgtatcaatcaaagcggcgtgctgtatgcggtcaaccgtcaaataggcgattaccgcaaatatatgctggaaacggaaaatgctgcctcgggcagacaactgcttgccaatcaggcgcagggcgtgagcgagatattaaaaaatatcgcgctcgaacagagcgaaccgctgaatatctattcggaaaaggaaaaacagctcaacatctcgcttttgaaagcgggaatcgtctgttcggaagtgttgatagcgggcgacgacgacaatatcaccctttccctgatcaccttcggaaaagcggacgtcaaaaagatcgcggcaatcgcgtcccatgtcctggggatgcccttgatcatttccgagcgcctgacgctcagcaaagataaattctgctgcattctgcacaagaaaccctatttcgacgcggctttcggcgtagcatctttgacaaagacgggcgaaaccgccagcggggacacccattccgtcatcaaaatagacgagcggcggttcatgatcgccctgtccgacggcatgggcagcggagaatacgcgcggcgtatctccgaaagcaccatctccctgctcgaaagtttttaccgagccaagatgccttcctccctcgttctctccaccatcaacaagctgttgacgttcagcagagaggaaaccttcgcgtgcgtggatatcgccgtcgtcgatctcgacagcggcgccgcggacatcgtcaaaatcgggtcgccgctgggatttatcctttcggggaatacgctgcgtattttagagagtgcttccctgccgctggggatactcgaatccctgcatcccgacgcgtcctcctataccttacaggaaaacgacgtgctgctgtttttgagcgacggtatcacctccgcgttcggctcttcctccgatttatacgaggcgcttaaaaagatccccgcttccaatcctcaacagcttgccgataccctgctgcaacaggcggtgacgctgtacggaggcaccgccaaagacgatatgaccgtgcttgccgtccgtctgtttaaaagcctcgaaaccgtatagaacggatttccaagttttgaaaagaccgtttccgaagactatctttgggaaacggtcttattttatttttcgccgcgctctttttcaccgacagactttatgctgcgttcttccccgtttgtccgtttcttaaagcctcggcgacgatgttgctcatccgctgcattcccgccgcgttgggatgcagtctgtccaccgtgtaggcggaaattgtttgcggcgtgatgccgctgtccgcatacaggtcaatgagattcactcccatgtttccggcgatctttttgatagattcgttgtaagcgctttcctcaatgccgttttgattgacgctgcccgaaaagcgtttcctgtcgggcaaaaaggtgcaacagtaaatctccacgccttcgtaagcgtcgagaatgttggcgaccgtccgcccgtatgcttcactgaaattgccgggcgagagaggcggcgcgaacgcgccgccgtaatttcccacggcagcgcccgccgcataatcgttgacgcccattagaatcaccaccacgtcaggcgcctgtcccgatgcgttatgcagattcttcgcccgcacattgtacgtctgagaggtggtcacctgcgatccggaccaagaattattgacgcagagcgcgtaatcgagcgccttgaccgtctgataccaccacgttttctccaccgccatatccgcgcccgtataattggagttgggaaaccacacggcattggaagagatcgtggcgttatatttcccgttattcgaccatcccgcataggtggaaatgctgtcgcctaaaaaggaaatatatgtggcatctgcggtttccttcgcctttgccttataaccggcgatcttaaagatgagggaatgattgttctgccccttggttccgaaaatgcggttccaaaaaccatatgcggcgttatctctcaaaaacatcggcaaaaccgccatctgagcatcgccgaaagcgagcgtttcttccgtgccgacttctatgtgaagattatcggcggtcagccaatctcccgcagatacgccgccgagtttgcccgtaaaatcgagattgatctttttgccgttttcgacggtacattccgactgcggcgtgctgaaatcggatttaacgacgtaaacgggcatatacagattgggcgaatctgccgtataaccgcccgcaagccccgaataggggaaggaaatgctcgtgatgacggcgccggagaatactgaggtgtcatagagcgcgaagggcgcataaccgggcaggaaaggcgcgctgtaatttttcatgtccgaactatcgaacagatattctgaaaacacgtattccccgcccgaaaaagtcaccgtataatttttgttggagtacgttccgcggatctgcttgacgccgctttccgtcttttccacggaaagctctatattcaattcgtcgccttccaaagcgccttcgacagtgaacgtcagttctttcacgtcttccagcatggaagcctgatcgtcgatgacgactgacgacttttgcctcccttttttctatcttcaacgtcgctgtcagcgtatcgatctgcttttcgcccgcgtacagctttgccgtcgcccgatacgttcccgcgtccttagctttattattttcatagaccgcttccacgcctgcgggcagccccgaaaccgttatcgtatgcacttgaccgtcgtaaacgcaggagaaatcggcaaataccacagcggaaacgtcgggcagagcggacgacgaatcggtccgagaggaggagcttatctgagaaaaggaatcccggggcgaagagtcggaagaggaaaaattgccgtcctctccacttctgcaagcgcccagccccatcgaaagcacaagcagccctgtcaacagcatttttaaaatttttcttttcataacgacctccaaaattatttaaagtatacaaattatcccttttattatctcttttgtcaataggctttttctaaaaattgtcattattttgagctttatagcttaaattctgcaccttgttcgcgccaatttttacggcgcacctcccatcgaaagcgttttttaagcggccggagagcgacgcattttttaaaagggacgctcggtaaaaaggcggtagccgatacacacaaaacttttttataaagtcccgtttaaaaatccgcccgacaacatacggaccggatcttttaaatagtccctcaaacttttttgaatggaaaactcttcgaaagcgcatttttccattgtaacgcgcccttagagcaaaaaagaaagcggtcccttttgaggatcgccttcttcttataggcttcggattgaattgttacatcgtttcggtgttcccggtcttttgttttgctctgaaaactttgcgaagctggaatacgccgccgcattcggggcaacgatatgcaaacgcaccgtcctttaccgtgagtttcatggcgcaatcggggcaagtgaccgtccattttttgggaggaaggggctttgtcaggtcttcttcggtcaaatccatcgcttcgggataaatgggattatgcgcgggctgagcgggacgctgatatgcgtacgtttccatcaccgcttccttgggaagggcgggtacgtaagcgggcgccatcgtcgtgacgggagtcgccgccggcttaggctcttccgcgggagcggatacctctacgggagcaggggcgggcgtttccgcgggaacagagttctccgcagggacggaagcttttgcgtccgtcggcgcgttagccgcgatccccgcttcttccgccaccggctgtttcgctttcttcatccatttttcagccaaagccctttcgactgccgctctttccgcagccgctttgttttcctttttcgccatcgccgcttccgcacggagggattttttatccgccgcgagattcgccttgcgttctttcaaatcgggttttttcgcagtttcaggcgcagcgggtgcggtcttctcttccgcaacgggttcttccgccttgttttccgcaaccgtttccggctccgcaggctcttccgccgcgggttcctgcacgtactgatagggagtgaacggacggtaaggtctgccgtttgcccaatattgtccctgaccgtatgcgtaaggatttgcatagggattggcgtaaggatttgcataggaatatccgtacatgggctgcatattttcctgtccttcgggcgcgggaggcgccatcggaggcatgatctgcggtcctgccaccatgggcatcatcatcacgggctgaccgttcggctgcataaatacgcccggctgagaaatgcactgcaaaggaatatgatacatggcgggaactgccgcaggaactgctgcgggcgcttcttctccgttttcgggagtttccgtactttcctctttcgccgcgacgggctgatcgagatcgatctccacctcttcttccccgacgacctttttttccttcgtttcttccgcgagcttacccttagcattgggcaggcggcacatacagaattcctcgatcaaagcggcggccgcgatgatcgcaataaacagcgtgcctaaggacggcatgatataagtgcgtttggaagcggccacgcacatcaatgcgaacgttccgcccgccgtcagcaggagcagaatggagaaaatacgaaaattcttcatgccggaagcctgcataccgtcgcgatggaattccgtcggcgcggtggcgtgtttcaaaagcacaatcgtccagatacacgcgaaaagctgcgcgagaggaatgacgccgtaatagacgagatccattttggcgcccttaaaaagattggagaaggcgcctttttccagccatttgagcgcgttgagcatcaaattggtcctggaaatgaaatacatgatcagtccgacgaacacgagctgagcgatattacggaagaagggagcgagtcttccgagcgtgcgtttttcttccgccacgttttcacccacggtgaacagactgacgttgccgccgaccagccccgcccagaaatgaacgataagtcctatcgccaaagcgaaatagaacaaaacggtaaatccggcgcccgcgatcagatgaatcataaaggtgaacacgatgatggagcaatatgtaccggagaaaatttttcccatctcctccatcgctatggcgtttcgattgaagccgttgagcttcgatgctttctttttaaagaggcggctaagcctggaaaggcatctgatgacgttgatgactgcggtgagcagcatgatcgcgtaaagcgccgctacgcccgcgttcaggcaaacgggaaggtaggaacccctgacgtttttcagttctaaaaaaggcttccagaaattgacgacgcccatcgaaccgaccgaggtgccgtaaacgaacgggaagaatgcgacgaccgctaaaaataccgtgccgatgagatagagcattccgacgaattcggctttggaatgcgctttttggactctctttttgagaatcatgggtctttccgctatattttctttcattgctggttccctccccatgccttcgaatcctttaacgaatcgggtatattcacctcggtattattgaggttggaatagtgaagcgccatcgtcgagctcccataataatcgggagagtctttcgaggaggtttccatataataatagatcgtaggacaagtgccggccgtaagcgtgcaggtgcccttttctccttttgtacaaagaggcgcgagatcgaaataatattcgcccgtcaatatattcatgaaacattcgttcccttccctgacggcggtaaaaaggttggaaaacagcagaactacgttttgcgcgtcagtccctgcgctggatattctcgcccattccgctttatccagaagcagcagatcgtttacggcttcggtctgaggcgtggaggccgtattggtacgggaaaacgccatgttctcttcttttctgtaaacatactcgtaaaccgaaactttcgcttcgcgaccggacatcgtgcgttctacttctttgagatatgtatagtttttgtccgtataaattttgccttcgagctgtatggttacggacgtaacgcgattggtgttcttgtcctttaccgccgacgtcgtacttcctgaatacgaagcggaaaacgaactgtaagcggcgtctttaatttcctcgccgtttatcaacggggccgattcgtccaccaattttttcgttttgtcaaacccctcctgattgatccaattgtcgacgatgttccccgtcgacgcgccgccgaacggcttttccgcttttccgacggcgttgccatggaacatcgttccatagacgacggtaccgccggccagtgcgagagaaaggatcaagccgatcgccccgcagattctgcctttctttttcatccgaagcctcctgatatttttcattttttaccggtcccatatttatcccgttattacaaatatttacaccgattttattcttttatattataccctgtttttcacgtattgtcaatatgatttttcaattttttcggcatgaattttcaatattttttttacaatttgctttttgtgcctcaaattcaaaaatttcgtttcaacaaaagaaaatttcgttcttttttcgtttttttactcgatctgcgcctgacaggaacgcatcgtcaaaagagcggcttcatgcgccgccgcagaagttcccgcgcagcactttgcgcagacgctcacttccgtttcgggagaaaacgccttcgtcaaaagcacgttggaaacgacgcagatatccgtgcatacgccgataaattccactctttcaaagttctcgcggcggatatactccgcaagttccacgcttgcgaacaaaggtttatcgaataccttgtcccccgatttttgcagtcccccgacgatctgccacccttcgctgtcctttaaacaatgtctgacgggcagacgctttccctcctgcgtcgaaaggtaatcctccccatgcgtgtcgcgggtgaataccaccgtttttcccgcctgacgcgccgcggagatcctttcctcgacggcgggcagaatcgcctgcgcgtccgagcttcccaaagccccgaatacaaaatcgttctgcatatctatcactgccagcagttctttcatttcccttctcctcgctgtcttttctatctttatttcattcgcggcacccttcgtttatgctctctttcccgcccgaattttgtcggattcgcaggcttttccggggaatgcaaaaaataataaagcgcgcgtttatgcgttttttatgaaaattatttacttctcaaatttatctttatacatggaaatgcacttgtttataatttccaccgcatcgtcgcggtgacagatctcctttacggtcgtctgtttatgttccagcgtcttatatacttcgaagaagtgcatcatttcgtcgaacacgtggttgggcagttcgtggatgtcgtaataattgttatacgtggggtctttgaaaggaatggcgatgattttttcgtccagcgaaccgccgtctatcatcttgatgacgccgataggatagcaattgacgagggtcatgggataaatcgtttccccgcagagcaccaagacgtccaaaggatcgccgtcttccgccagcgtgcggggaatgaaaccgtaattggcgggatatacagtagaggtatacaagactctgtccagcttcaaaagccccgtttctttatcgagttcgtacttcgccttgcagcctttgggaatttcgataagagattcgaaactgcgcgcggtgatccgctctttggaaatatcgtgccagatgttcataatttttcacttccttattccgaacttttttaatttccgacgcccgaaaaatttttaccgatacttatccttattgtaacacattttttttcttttcgcaaggactcaggctcttattttttgccgattcgaggcttttttcgcataaatgtattttaggcgtatttttcctctctccacgatccccccgccattactttttgaaactttttaagacaaaaaatagaagagctgcttggaaaagcgctctcgatatttataatgtttaaacgtttttcaacaaaacggaaaaccgaggaaaatagcgtataaaagatagccgaccatactactccgaaaaattttccggtatatttgtaacttgccgattgcgataaaaagccgaacaattttttattttaccgcgaaaaagctttgacaatgcagaaaaaatatggtatagtattatagcgttttggttgaacggagtctaagcagaagtacccaagtggctcaaggggctcccctgctaagggagtagtatgggataaccgtagcgcgggttcaaatcccgccttctgcgccaaattgcctcgcctgtttttaaggatttttcccttaaaaacaggcggtttttttattcttttttctctttcccggtattttttcgaaagacacccggctcaaattgcgcggaatgttgtttcttaaataaataaccattcgcattactgttgcagcgctgcacattgcggagaacataaagaaaatttcatgtgaaagcacacaaaatacttgtcttattcaaaaaaatgtactatatagcagaaaagaatacaggaacctttcaaagatagtaaaaagagtgaaaaatccgagtaaaaaacattggtcgtgctccgcccttaaatttgcggacattcttctgtactatgcctttttgcacaaacaagtctttgacactccaagctttgtttactttttgcgttcatattcttcaatgagcgcgagctttttcgagcggggcattctcttgatgaagtattcccgactcatcgcttcattcttcgtggcaaatttctctcgatagacgagccgaacgggcagacgggaacgggtgtactttgcgccctttcccgccccgtgcgccttcaagcgtttttcaaggtcacccgtaaatccgcagtacagcgttccgtcgcgacattgcaaaagataggtataatacgcgaatttcttttccttttttgtctttatcaaatctgcgcccccttttttcttttgttttcgccaaattcccgattttctctttttccgttttcccctttaaaacgcgtctttggaaattttgctccaacgccgagcgataaaccggagtttcaagggaagcgggacgagtttcgttcccacgttcataacgttgttccacaacccgggaatgatctttctcttatttttcgctaccgcgcgcaggctttttgcggctacgaattcaggagattttgccgcgagctttccccacacgccctgtcccgcaatctgttccttcacgtcggcgcgggtgggcatcgcgccgggcagcaccgccgtcacctttaccccctttcccttcatctcctctctcagcgccgccgaaaaggaggtcaaagccgcttttgcggcgctgtaaagggcgaaatagggcatgggacaaatccccgacacgctggaaatattgacgatttccaactcttttgccctattgccgacggcaaatcggcacagcgccgcagccgcctcgaaattgacgcggcattgaaaagaaattttttcctgcgtatattcttcgaaagatttttggatgtccgcacccgcgacgttgacgagccttccgatcttccacccttcctccgcgatctttttcatcatggcgctccgctccgattcctctgccaaatcgcaggcaaaaatccgcacgtctattcccgcgttttccgcgagcgctttttcctttatcaaccgcagtttgccttcgtatctgcccgtcagaatgagattttccccgcttttcgccgcgaggcgcacaaacgcgccgcccagtccgcccgtagcgcccgttatcatcgtatactccgctctcataaacgcacttccttccgccgttttctatccatagaatatcacacccgagaaaaaattgcaagcgacttcccgagcctctcgctttttccgaaaatttttctcttttacggttgacaaatgcgcccggggggattataatgaagtaagagagaaaatttctttgcgggacgcgccgatcgcggccaagcgagaatggaaaaaactttcaaaatacggaaaagcgggatttcgccttttaaaattgtttggaggctgtaaatctcagtatgtaagcaaaaaaaatttttatcattcgcagggcgcgcgagggaaaaatatcaaaggcgcgcaactctcggcagatgcgaaaaaaatgatggcggtatccttaattttacggaggcatggctgtggacataagccgatcgcaagtacaacttcatcgacgcggcaaacggcgtttcttttgccgtgcggattttcggggatagcttttcagactcgccccgttcttcgtacgggcatttgaatttttgatattccgtcttttaccgccgtcggcactcgtatgcgacgacggtctttttatgtcttttcgccccttcggattccattctcgcccaaacgtaaaccccggaaaaatcccgcgcttttagcgcgtattttatatagataaaaaatacaaggaggtaaaaaagatgcagtccgacagtagaagcggctccgcgcccgacccagacggcttatcgacgcagagaaaaagacagacgaaatattgccggaaaggcgtatttcagcctccttttgcgcatatctgacgcaaggaaccgcggcgcggcgtccgtttctccttaaacatccaaggaggtacagacccgtgataagaaaaacgaataaaaaactcgccgctctcgaagcggaaaacacggcgaaagaggaagcgcgcgtcaaagaactcgctctgctttcccccgcccagacattagacaaactcgattcctccacggcgggactgagcgaattcctcgtgaacgcttcccgcagctgctacggaaagaatcagaccacccaaggcaaaaagaacggccttttcaaaaggctcctcggcgcgttcgtcaatcccttttcagctattttgacggcgctcggcgttctttcgctgttcaccgacgtcatcttcgcccccgtgggcgacaaaaatcccgccgccgccatcatcgtattcgtgatggtgacgatttcaggcgttttacgcttcgtacaggaaacccgttcgggccgcgccgcggcggggctttccgaactcattaagacaaaggcggaagtcgtccgcaaaaacgagggcacgatcgagctgcccatcgaggaaatcgtcgtgggagatattgtgctcctcgcggcgggcgacgtcgtccccgcagaccttcggctcctttccgcaaaagatctcttcgtcaaccaatcggcattgacgggagagagcgaacccgtggaaaaacgcgcctctttcggaaacgccgacgacgcaaaactcctttccctttcggaaattcccacgctcgcattcgcgggaagcgcggtggtgtcgggcagcgcgtcctgcgttgccgtcgccgtcggggataataccgttttgggcagaacggcgaaaaaactttcccagggaaagcgcgagccgacttctttcgaaaagggagtcagctccgtttctcatgtcctgctccgctttatggcggtgatggtgcccgtcgtgctcctcgtaaacggattcacgaaaggcgattggctgcacgcgtttctcttcgctgtatccgtcgctgtgggactgacgcccgaaatgctgcccgtcattgtcaccacctgcctcgcaaaaggcgccgtggcgatggcgaaaaagaagacggtggtaaaaaatctcgactccatccagaatctcggctgcatcgacattctttgcacggacaagacgggtacgctgacgcaggacgagatcattctcgaatatcatctcgacgtgcacggcgacgaaaacgcgcgcgttttgcgctatgcctttctcaacgcctattatcagacggggctgagaagccgcatcgatttcgccgtcatcgaacgcacgcgcgccgagtctgtgggcgccgaggaattgcgcgggctggaaaacaggtattccaagacggacgagatccccttcgatttcgaacgccgccgtttgagcgtcgtcgtccgcgacgaaaagacgggcaagacccagctcgtcaccaagggcgccgcggaagagatgctgagcgtgtgttcctttgccgaatacgagggggaggtgcagccgctcacccgcgaactgcgcgcggagatcctgcaacggatagattcgctcaacgatcaggggcttcgcgttttggttttggcgcgcaaagacaatcccgcgcccgcggaaaaatgttcgcccgcggacgaatcggatatggtgctgatgggctatctcgccttcctcgatccgcccaaggaaagcgcgaaaacggcgatcgccgctttgaaagaatacggcgtcgccaccaagatcctcacgggcgacaacgagcgcgtggcgcttcgcgtgtgcagacaggtgggactgaacggggatcgggtgctgctgggcagcgacgtggataagctggacgacaaaacgctttttgaagaagcggaaaagacggacgtcttcgccaaactctcccccgcgcagaaagcgaggatcgtcacggcgctgcgttcgggcggacactccgtcggctttctcggcgacggcatcaacgacgcggaagcgatgcgcgcggcggacgtcgggatttccgtggacagcggcgccgatattgccaaagaagcggcggacgtcgtgctgctcgaaaaggacctcaatgtgctggaagcgggaatcctcgaaggcagaaaggtatacgccaatatgctcaaatacatccgcatgacggcgtcttccaatttcggaaatatgttttccgtgctgacggcgagcgcctttctccccttccttcccatggaatccctgcaattgctctttctcaatctgctgtacgacatcacctgcacgacggtgccctgggataacgctgacaaggaatttttgctccgtccgaaaaagtgggacgcctcttcgacgggtaaattcatgctctttatcggtcccgtgagttcggtctttgacattctctgctttgcggcgctctattttatcgtctgtccgcaggcgatgggtggggcaggctatcgcgccctctccgacgccgcctcgcgtgaacagtttgcggcgcttttccaatcgggctggtttatcctttccatgtggacgcaggcgcttgccattcacatgatccgcacgcccaaaattccctttatccaaagccgcgcttctctttccgtgactttatcggggctggcgggctgcgtcgcggcgacggtgattccctttactccgttaggcgcttttctcggcttcgcgcccctgcccgccgtttggtttctctatctgacgggaatcgtcgcgggctatatgatcgccgtcacgttggtgaagaatctctatgtgaaaaagtacggaaatctcttgtgaatcgttcgctcttgcaaggaaggtttctcaaaaatttttaacgcataaacggagcagaaatgatctgctccgtttgcttttcgtccgcttgaatttatctcatcaattgcttgatatatgccttttcctttaaggaaactttcccgtcgacggcgcagataagcaggcagacgaagatgatgtccgcctttaactcctcggagagcgtaccgagaaaatccacgaggtaatccacttcttttttcaattcccgcccctctttgcgaaacgccttcgtcaaagccttggctgcctcgaaatcgaaatcctcgccgaaaaaggactttaagagcggggacatcacggcatactccgtttcgtcgagttttccgtccgcgtacacggacgcgatgaggaaggaggcgaggatcttcgcgcattctatcccgtcttccgaaaacgcgcgtatcgcgggcataatgcgcagggaggctctgcccaatacggcggcgtattcgacgggattcaattcttccacagtcttgcaaagttcgttaaaatctttcatttgtcttctccttgtccccgcggcaatccgccgctcaggcgcccttacgggctttgtttacctcatatataaacgggctttcaaggcataaaacaaatttgtttggttttcaacaaaaagtcttctcttcgtcacttattatacaaaactcaatcgcaatgaggaacatagtcgatttccgaacggatctccgttttctctattttaaagatcacaggccttaatccgtcgttacagctgcatattgccacgccctcttttccgatccaatcgccgtagtaaaactttccgcagccgtgcgagagcgcgaaaacgtactgatagatcgccttccaggcttcgtcgcaaaagccctcgggtttggcgtaatcggcatagaatacctgaccttcccgcagcatcgggcatctgcccagcccctccgcgccgtattctttggcgagttcctcgtcaaagcccctttttaaaacggtgattttacactttgtcatccttatcctccgtaaactattttatccgccctaaaacttgctccaaagctgctgaggatgaaaaccgaaaatctgcacgatctccacatacggagaattggcgatctcgggcggcgtaacgacaagaccgccattggaatcgaggtcgacgtcgaaatgccgataggcgtaccagacgagatgagcgcactgggtgcgcgtaaactccttttcgttgtattttttcgaaaggatgcctatggaaaaattataatcggcgcctatcaggttgtctttggcgtattgcgccacttccgcgcggaattctttgtcgaatttcggacgcagcaccatgaaattggcgagattggaaaaagtcgaagcgtcggtgatccagctctgcgtgcccggtcccagcgcctccgcgatcttttctctgtcgccgtccacgacaagacaagcgtgtcccaatcgccagccggatacgtgggtagtggcggaaacgatgatatctccgtcttccagcttcgcatagggcgcgtgactctccatcgtttccagataggtatagggattaaaacgcttgcaggtgacggtatgctcggcaaaatagaaattctgtatccgtaggatgcgttttttcccgtccgcttcgctccacaagccgtctacgcctatttttgtcagccccgtctgcgcgtataagaggtcgtaatcctcttgcgtcagctcttccttggcaagaacggcggaaagatccgctttctcgtaatcgggataccaatgcttccacgttttgtctgtataaatgacgccgagctgcaatccgatcaggacgctcgacacgaaaaacacgacgcaagccagcgtaatggcaaggcgttttttccagctcatttttttgcgcttccgatttttcataactccgctttcctttgcctttacggacgatcggggaaagaccgtccgggcaaaactttatttccatagtatatccgatactatggaaaaacagccgcggctgtttgacattattgtatcatattgcgaaaattttgtcaaatcgcctgcggaggcttctttccg

SEQ ID NO: 1157 - DNA, 7359 bp, Unknown
  16S sequences of unknown bacteria
agctcctgattgaaattgttgacggtgagctgcatttcccgcatttcttccgtctgctcttcgagcgcctgcgtgcccgtggagttgaaatctttgaggcgtttgacgtcgccgcgcacggcggagagttcgtcttgcagccgttcttttctctgtcggctcttttcgagcgccgaatcgatttctttaattcgttcctgcgtcgcttccttgcgcgcggaaagcgtaccgatattcttcttgatctccgaaagattttccgcggaagagagctgactgagccgcttttcgtccgtcagacgctcgaacaccgcgattttactatcgagcgcggaaaccgccgagcgcagcacgtccgtttcgttttcgatcaccgcgatgcgcgccgtatccgctttgcgcttctgcgcgccgagcgccattccgtcgtcaatctcgccgatgcgcctcttgctttcttccaggacgtccgacgccgcggaaatttgcgagcgataagtgctcattctctcgcggacgagtttaagttccccgtccttcctttcgttaccgacggaaagttccacgcggcgatcgttcagttcggtaagttccgcgtccgcggccgcgattttctgacggttttcctccgttttgcggttgaccttctccacgtttacgttgagggagatgatctgatcggaaatgcccgcgatgtcccgcttgaatttatccttttcgttctccgcgttgtcgtaacggtatatgtaggtgttcgcctcgttgattttgagggactcggaatactcgttgaattcccgcgccgcgtccgcctgcttggaaaggggacccaaacggcgctccgcttcgtcgatgcgctggcggtaaataaagagattggaattggagtcctctaatttccgctcgatctcctgcttgcgggacttatagaccatcagccccgtggcttcctcgaaaatgagccggcgatcctcgggcttggcgttcatgatctgctccaccttgccctgaccgatgatggaatacccctctttgccaagacctatgccgtgaaacagcgccacgatgtctttaagacggctgggctgaccgttgatgagatatttgctttcgccgtttcgatacaggcggcgggtcatgcccacgtccgcaacgtccaggtcgaaaatgtgattcgaattgtcaaagacgagagtcacctcgcaaaaggacagcggctttctttccagcgttccgccgaagatgacgtcctgcatattcgtgccgcgcagggactttgccgactgctcgccgagtacccatctgaccgcgtccgcgacgttgctcttgccgcagccgttcggtccgacgatgcaagtcaccccgtcgtcgaaacggatcgtcgttttatcggcgaacgatttaaaaccgacaagttgtatttcctttaaatccaaagtcgtagctcctttttccttatccttttctctttatattctctatcctcagcccttacgtcgggagaggatggaaagcagttttttcgccgcttcctgctgcgccgcggtgatattttttcccgtgcccgtcgcctccgcgccgtccgcgcgggcgatcaccgtccacacgggcgcgtgatcggcgcccgacttctgcgcttccccgtaatcgggaatgggcttgccgcgcttttgcagccagatttgcagcttgccgatgtaattttcctcgcggctgagctgtaaatgccgggaaacgaacttctttgccgcctcgaagccgccgtcgagatagatcgccgccgccaccgtttcaaaaaggctggaagtcgtcttttcgcctacattggacgctccgccttcaaacagcagatactcttttagccccatcttttccacgaccgccgaaagcgccttctgattgaccagcctctgccgactttccgtcatctcgccttctgtgaactttctgccgttttcctcgcaggcatacaagagctccgatacgaccagctgcaaaacggcgtccccgagatattccagccgctcgttattctctccgccgtggacgttggaatacgtggaatgcgtaaacgccagcgtcaacagctctttgtccttaaagacgtatccgattttccgttccgcttcggcaaatgccgtcataccgccttcgtcctcccgatccgtttgtcaagcgccgtgcgccttgccgccgatcttcggcaaaagttgtttgccgctaaaaaaccggtgacggcgtatctcgcgcctatgtatcgccttacgaaacgcaaaaaatcacgccttcgtttcgtaagcgggctcggacggcaccgccgcggtcagatccgcttcttcgagcattttctctatcttgcccaccatgtcgccgcggacggcttccacagcctgtcccacgcagatggaaaagccgctgcccttggaattgccgtgcgcttttacgaccgcttttttcaatcccaaaaacatcgctccgcccatcgtttcgtaatcggcggattttttgatatttttgatgacgtcgtaaacgagcgccgcgcgcatcgtcgcaaagatattctttttaaattcccgcttcataatggtgctgatcgccttgccgcagccctcgatggactttaaggcgatatttcccgtaaagccgtccgccaccgcgatgtcgatgtcgcccgccataatgtcccgtccctcgacgttgcccgcgtaatcgatacaggagatctgctttaagagcgcgttcgcctcttggtgcatttcatcgcccttatgatcttccgtgccgttgttgagaagtcccactttcgggcttttcatgccgtacgccgcctgcgcgtaagccgtcgccatcatggcgaaatgcgcgagattgacgggtttgcattccagattggcgccgcagtcgcaaagcagtgtgcccgtaccgcgcagattcggaatccgcggacagagcgcggggcgggaaatgcccttgattctacccagaatcatgacggccgccgccagaaccgcgcccgtcgcgcccgaggaaaccaacgcgtccgctttgccctctttcaggagctgaaaagcgaccaccgtggaggaatctttcttggtcttgaccgcctttgtcggcacgtcgtcattggtgatgacctcgggggcgtgcacgatctccacgcgcgaaacgtcgtacttatatttttgaagctcggcttttacgcgcgcttcgtcccccacgagaagggcggaaaaatccttgtccttttgaagggcctctatcgtgccttttacctgttgttcgggggcgaaatcgccgcccattgcgtctatggcgatcttgatcatggcttaacctgccttttgtctattctcggtcgattttaatagtagtaaaacagtaaaacgatctcccgccgccgaacggatagaccgttcccctcctgaggagccgttccgtctattcaaatgcggcgagttttttatttaatattccgcacgatacgaaatatcggaaagcgcgcaaacttagaatttcgcgtttttgcctttaaaattccaaattgccgacggtgcgggggaagggaatgacgtcgcggatattcgttacgcccgtcagatacatcaccattctttcgaagcccaatccgaagccgctgtgcgtcgtaccgccgtaccgcctcaaattcaggtaccaatcttcgggcggaacgccacattccagcattctctctttgagcttctcgtaatcgtcctcgcgctggctgccgccgatcagctctccgatgcccggcactaagagatccgccgccgccaccgtcttgccgtccgcattttgtttcatataataggacttgatttccttgggatagtcggtgagaaaaacgggctttttatagatcttttccgtgagaaaacgctcgtgctcgctttgcagatccttgccccagaaaatatttttatcgtcgaattcgtccgcgtgttcttttaaaatttcgatcgcttccgtataggaaaggcggacaaaatcgttttccgaaacgttttgcaggcggtccaaaagtcctttgtccacaaattggttgaggaaagaaagctcgtccgcgcaggatttggaaacgtaagcgatcacatatttcaccatcgcttccgcgacgtccatatcccccgtgaggtcgcagaacgccatttcgggttcgatcatccaaaattccgccgcgtggcgggacgtgttggatttttcgctgcggaacgtgggaccgaaggtatagatattcgcaaacgccatggcaaacgtttcgccgtggagctgtcccgaccccgtgatggacgcctttttgccgaaaaagtcctctttataatccacgcctttgccgccgttcgactttgcaagcgcgtccagatcgagcgtcgtcacctgaaacataccgcccgcgccctcgcagtcgctgcccgtgatgatgggcgtatgcacatacacgaagccgcgttcgttgaaaaatttatggatggcgaacgccgtttcgctgcggatcttaaagacggcggaaaagagattggtgcggggacgcaagtacgcgatctcgcgcagaaattccaccgaatgacgctttttctgcaagggataatcgggggaagactccccctcgacggcgatctcttccgcttttatctcgtacggctgcttgttttcgggcgtcgcaacgacttttcccgtcacgatcagagaagcgcccacgttctgatgggcgatttcgtcataattggcgagatttgcgcgctcaaagacgatctgcgtatttttgaaacagctgccgtcgttgagttcgataaagccgaaggctttggaatcgcggatggttctcgcccatcccgccaccgtcaccgtctttccgccgtattcggaaagacgagcataaatttcctttaactgaattctgtccatcctgtcatcctgccttttgggagagtgcgcaaatttttgcttccgtccgaaaagcggcgctctcttcccgattgtatcacggtttattattcaaatatagccatttgagatagaaatagaaaatacccgcggacgcttgcgcgcccccgcatttttgtcctaacggcgacacggctccgccgtgtttgaataacgcgcaaaaaaacgcgaatgtttcacgctctcgtatttttgcttctattataacatttttttatgcaaaacacaaacgtttggccgcattttctttgtcggtttatcgatttttttgttctgttgtcctataaaaaatttttaccgccaaaaaaacgaaaagagcgggattaatccgctccttgaatcgttttttccttttcctcctccaaacgatcgtccgtcagtatctgcgcaatcaccgaaagatcggaagaaattttttcgattacctcctcagcggcgcgcttatgcatccgcctggatgcgctttgctctctttttttccatttttcgcagctctcgtccttttccgtcactcttccgcattccgaacaaaaacctacacagtgtctgtaaaaagttttcgcgcattttgtgtagtaagttctgtgattctgacaggtggcacaatttttcattttctatttctcctttgtattcgtcccgttatcgggataaatacattatatcatccctataacgggatgtcaacgatttttatcccacttttgtaatataatatagttatgagaaaatttgcagaaagattaaaagagttaagaacagaaaaggatttatccgataaagcattaagcgagcaagtaaaaattggttcctcttctatctcgcgttgggaaaatggtcaaagcgatataaggagcgatcaattgataattcttgcaaaatttttcgacgtaagcaccgactatttattaggattgaccgattcaccttaacattgactataaaatcgaaaacatttaaaattccgcagcatgggggacggcggacaacgcgcgtttttttaaaagtataaaaatctttcgtcgttataactatccgttttctaaaaaagccgataaaagtcgtttttttaatctacaattgacagtcccggtaaaaaggagcgaacttaaagttcgctcctttttgttttccccgtaaaatcccgtcttcttacttgttttccgttctctttttgccgacgatcccgcggatgggcgcgtaggtgtccgttcgcagtttttcccttttgacgagttttccgtacaaatacgtttccaaatacgcctggctttttatccccgctttgccttcccgtatcatgccttcgtaattgccgattttttccacggggtcgggcggcggtacctctccgatcttctcgctgacgattttataacgatagccctcgtcgcgcccgtaaaacgtcaccgtaatcgcatccccccttaccttcatcgacagatatacgggatacgtatgcgtatttttaaatttaaaatcgctgtacgaggacaccattgcgtcgcgggacggctccacataatgcacagcgagcgaatggggcttgcgggaggttattttcaagcccgccaataccgccgcgttatacagcgtcgtgctcgcctgacacaccccgccgcccacgcctatgataaactccccgtcctgaatgactttcgcctcctgaaacccgttttccttcgtcctcgcgcccaccgccgcgttgaaagaaaattcctcctcggggcgcaccgtcgtgccgtcgatgcgacgcgccgccaaagcgatattcccgcttcggctcttatcgtcctcgttgaaatacgtggtgaaagaggaaagctttttcgtatccctcttgacggcgtattccgtctttttcggggaaagaggacgggttttgagcgcaacggtcggaaatctcagtactccgtcctcgccccgtgtcgcttccgcgcaaagcgccgccgcgacgtctttttgcaggcgggcgcggtcgcagaacactcccgcgcgttccttttcgtaaacgaatccttcggacgaaaaacgcgcttccgcgtccagagccgcgcattcgttattgtcgcagatatagtccgtctgcgtcttttcgccgtttaaaaagtaacgcacccgcgaaacgtattccccgtttttctccgccgtcaagagcagctcttccaagtcgtccgaaaagccgatctgcggataggcgaacgtatagctccccttcggcgtctttatcgtgagtttcgggacattctcggcaagcagccgccttaaaagcttcgccgccttttttctgttcattccccctacgagcacgccgtctatcttcaccccgcgcgggagcctgtccgaaacgaactttccccctgcggccgccgtatcctctccgatatccgccgc

SEQ ID NO: 1158 - DNA, 29206 bp, Unknown
  16S sequences of unknown bacteria
cttcttgttcctgcaaactaccttccccttccgaagataatttgacattatgaatggtagaaaataaaaaaatatcctcaaaatctaatttctgattttaaggatattttttatttcaataataatcattatgtcaaatcgctgttcaaaatccagcgtttattatttaatatcagcaattgctctaaagctttttatcaaagcaatacagaaatttcgccatactctcactcgtgtaagcaaggatctttccgactactgcatatccaagactggtataaatgctgtacgccaatttattaaactccgatgtatcaaaacgtatagttgtgcatccaagctcacggccaagctcctcaccaaatgcgacaattttctttgcaattcctcttttcctgccgcgcggagacacactgagagtatgaagcacaataacgctgtcccccgacgcttcaacattccacttgagcttaccatactccggcggctgaatatgattgaatattgcagcggcgagcacctctccgtcctcttcatatacataaagtgttcctgccgcttctgcccgttccgcatcggcgcgcagaggatataccttagcatcccaattacaataattgttattattttcattatctttatgtacttcttcatatattatctctacagcatcaacatcctttgccgacgcctttctgataatccctctcatctgttattctcctttcctactgttaccttaccgtctgccgtaacgccaattactttgtgtccgcgtgcgcgcagctccgacacatatgcagcaagttctgccgttattttctcgcccggacagacaagtgggatcccgggcggataaggaataattgataccgcgcataccctatctgccgactcgcatagtctgactttctctttatcatccggaacgctgcaaagctcaagcgttccaaaacaaggataacctaacgatacaccgccattttcaacttcccccatctcattcttatgcatttctaaatcattttttgctctgcatacgcccgcttctctgcaccttcctccagaatacctctccgcaatctcgcaaagtgctgcaagcaatttttcataatcgcctcttacatttcccataccggtcatgcacataagaatatttccggtcacaagttccgaataaatacctcgcttcataagctcctcatcgagcatatcacctgaaagcccgagcgcgctcatatcgagattaagcttcgtactgtcaaactcaccggaagccccctgccttgcggagttcataacagaaagtccttttattttctttgcctcgctgagaaaccactctatattttctttccaccgcgcaaaaatcagcggaccgtgcttatctataatatctgcgctcatatctaacgacgccagaagcaggtacgacgggcttgaagactccaccatttgcagcttatcctccagcaaatttaaatctatcttgtctgaatttacattcataacggcactctgcgtaaaagaaccgagcgtcttgtgcacagaatttattgcaatgtccgcaccctgttcttccgcagacttcggaaagcgcactgcacatgagcataaatttccagctgcatccacacagcacgaagagcaagccgcatcctccgaaagcaaagccttatccgcgcaccgcatcacactttcttcactcaaagcgcccgtcatatcagcgccgctcaaagagccgaactttgaaaaaaactttaaatgcgcaccatgcgcctgatccacaatcagtatcttgtccgcacgatgcacaacatcggcaatcgcctctatatcagaacatattccataataattaggggatggaaaaataacagcctcagcatcagggttttctgcaagcagccgtgcaatctcatcagctgaaacggctcccgaaattccgtactcagaaataaactccggatacgcatacaccggttctatccccgccaacgacagcgcattgaacaccgacttatggcagtttctcgccattatcaatttcttgcctttcggtactgccgccattaccgccgcaagaatgcctccgcttgttccatttacaagcaggtacgatttttttacaccgtaaagccgttcgtattttctcatcgttgtcaggatgatatcctctgcctgaaacaaattgtctgcaccggcaatttccgttatatcggcatcagccattatatcgagaaaactgctgtagccaaattcacgaaaaaacgacgcccccttatgccccggcatatgaaaggcgacaggcttttttgccgcatgctcctttaaaaaatcaacaatacttttctccgccataatctttcctgttctctatattttcttctttctttgcaaaaaggactcctggctgctgccaaaagtccttttttatcaaattcataaagcagcttcagcttcttatttcttagcaatcacatctacacccataaatggtctcagcacctcaggcactactacactgccatcagcctgctgataattttcaagaatagcagccactgttctcccgactgcaagaccggaaccgttaagcgtgtgtacaaattcaggcttgctgcccttttccgcaggtctaaagcgaatatttgcacgacgcgcctgaaagctctcaaagttactgcacgaagaaatttcaacatatcttccgtagcttggcatccaaacttctatatcgtacgtcatcgcggacgaaaagccgagatcacccgtcgaaagtcttacaactctatacggaatttcaagacgctgcagcaccgcttcagctgctaacgtaagcgactcaagctcatcgtatgaagtctcaggttttacaaacttaaccatttccaccttgttaaactggtgctgtcttatgagacctctcgtatctcttccggccgatcctgcttcggcgcggaagcaaggcgtatatgccgtataataaataggaagctcagcttcatctatgatttcctgtgctcttaaattagtcaccggtacttccgctgtaggaataaggaaaaagtctttctgcggtacataaaacatatcttcttcaaacttcggaagctgtcccgtacccgtcatcgccgctctgtttaccataaacggcggcaaaatttccgtaaagccgtgctctgtagtatggagattgagcataaagtttattactgcgcgctcaagttttgcaccgaggcccttatatacggtaaatctcgcgcccgaaattttggctgctctctcaaaatcgagaatgtcaaggtccgttcccacatcccagtgcgctttatattcaaaatcaaactcacgcggagtaccccactttctgagctctacattggcactgtcgtcttcgcccacctgaacatccttatacggagtattcggcactgacaaaatcgccatatgcagttcatcttcaacagcgctgagttctccgtcgagtactttgattttatcggaaagcgctttcatgtccgccatgagttcggtagtatccttaccttcctttttcatgaccggaatgagcttcgaatcctgattctgcttgtttttaagcgcctccacttcagcaagtatctctcttctcttttcatcgagctctttaaccctgccgataccgaaatcacctttcagcctcgattccacggactttttaacgccctcgtaatcttctcttattcttttaatatctaacatattatcatctccttgattttaaaaaagattttttctgtaggttatataaagctccgcaagatcttccacagctttctgcatttctatctggagatcagacgctgtctcataatctcctatgtcgagggcctcttttattctcgtcaaaagacatttgttacctatactgtctttgcctatcgcttttctctttatatctatctgcagccatcttgaaatatcaaggttagtacagtcatcatcatcgtgcagctttacacagcgccttacggtttccatgctattcgggataatcctgtcatgaagctccgtagcccactgcgatattatcgcttccttatatgactcaagcgtcaggtcattcattacaccgtccgtcttaaatacttcgagcttttcgggataaatatcaaaagcattgatgttttcccacacagtagcaggagctctgccaaagagcttatttctctcttcctcagtaaattcctcaaatacctctcgctcgctcctgtattctctgtccttttcaaggtaaaagtcctcatctccccacttcttggagagcgaagcaagaagatcatccgagctcttctttgcctcaagtgaagccttgataccatcgagcatcgccatatagcttgcagctattacaagatatgtattgctctttggattcggcgcccgcagctcaaaacgagtcgccagcgggtttccgagctctctcacaaggccgatgagcaccgtcctgtttctggatggtttttcaactgtgtgtccaagtgaagttacagtacagacaggcgcctcataacccggctttaatctgttaagactgtcatttgacgcgcttacaaaaggatttataacttcatagttcttgagtattccaagcagcgctccaaaaccgataggccccataaactcattatccttgccggagaaaagatttatctttcttccgtccttaagctttgccgcaactccgagatgcgtatgctctccgcttccggcaatgcccgtcatcggtttggccataaatgttacatcaagaccgtgcgcacgaaatacatcttttactatgtactttatcatattttcgttatcagcagcctgcaaagcctccgcatatttccaatctatctcgagctgctccataatgtgatcgtagtctccggaatgtcccatcttggcctttactccgccaacttccttatgtcccatctccggctcaaagccatactgctgcaacaccataagcgatttttcgagtgctgttcttacaggtcctatcgttctcttccaatactgctctttgaggctctgtgccgtcgaaagctgttctctgtccgcttcatcatcgggcgtctttacccaaaactcaagctcagttgcacatgtaagacttaaatcttcaatctcgtctacactttctatcggcaaatattcaaatacatatggattattctttaaaacctcgataagatccgtcttaaaatttctcaccgcatcgcgcagtatcacccgcgagcccacttcattagtatcgttatgaagaagaaaagcaggaatccggagcgtccctaccgggagctccgtcttcttgtctttgtgattgtaattatagtctacataccaatttacactaaggtccggtattatatcgactttggcattattaagatccgctatcttcggaagcactactgagcttccatcggtctgtactccatgagccagtattttttcaaggcttccgaggaataattccacgggaattttttcgtccgtgtcgtggccgcctatatcaatacctactaaagatacaaacttgacttccgggtgatttgttaaaatctctgtgattttttcaggtttgtgttcgtttaccggaatgttgaaaagcatcctgtcaaattcaaaatcaagcatcttttattcctctttccattacaaatttacaattattctgccagcatattcagatactgttcaagctgcgtgagatattctccatatcttgcccagttaccgctctgcattgcagcctgcgcattgtcaaacgcctcatttgcgagggttataagctctgtctttgtaagctcctgcgatccttcgtttgtttccggttgatttgtgcttccctgcccgttttcactctttccaaacagcgatgcaagtgcctccgcaagcgtaggctcgtaagcaatcctgtcattatatgcgacgattacgcgctttacttcaggtatcgctgagttagaagcttcaagatatacaggctctacgtagataagcgaatcttcgataggaattacaaacatatttcctcttgtatatgttgagcccgaagaattccagagcgagaattccttggaaatctctgtgttctggtctatctgagcttctatctgcataggtccgtaagttatcttgctcttaggcagctgataaagcacgagctcgccgtaatgttcgccgtcgtttctggcgacaaagagcgacatcatattatctttatctttcggcgtataaggaattgtatttacaaactcttcctttgtctcgcccggaagcttcataatataatagttcggagtcatctttgtctcttcgagtccataaatttcatccgctatatcccaaaggtcttcaccctgatagaatacatttacatcttccatatgatagcgcgcgtatatgtccgcctgtatctggaagagcatgttaggatatctgagatgggctctgagtgactcaggcatctcgtcggcatctttaaagagatccggataaatcttcttcatcgtattggcaataggatcactatcgtcaacaagataatagcttgtagtaccgttatatgcatctattactactttaattgaatttctaatatagtttacctttgacatatcgctgaacggcgccgaatacggatagttgtcactcatagtgtacgcatcaataatccagtagagcttaccgtctgcagttacaatatacggatctgagtcatacgataaaaacggcattatctcctgcactctgtcttttatatttctgttgataactattctcgaatcactgttgatatttgtcgatacaagcagcttcatagttctttctcttatcgagaacatcagtctgttgagcatattcagctcaattcctgcatcaccttcgtacagagtatacgtattgctgctgccgtcaggatagtcgaattcttcttcgtccgtctttacaagaatgtagttatttgtaagctcaccgaagtaaatttccggtctttctatgcttatttcttcaatctgcgataccggcggaatactgtctataagcatatcaggctggccggatgccgttaccttatctacacgcgaaagagttataccgtatccgtgagtatacttgaggtgcttattaagccattcctgtgaaatcttcgtttcatctatttctcttgccgaaaggaatacctgtgtgtattcgccgttaatcatatatctgtcaacatcggcgtctgtaaatgtatagtactgtcttatagcctgcgtctgattgtagaatctttctgttggctcgtagtcgttaatcctgatgttgtttatcgtttccgcattgttctcaatatcctcaagcgtgagcgtactcgacgccgaaaattctttaatatctacatcatcaaggtcgtatgcagactgagtaaacgctatgtttctttcaagatatgtgctttccttgttgatttcgtcaggcgatacaacaaagttctgtacgagcaccgcagctccgcttcctacaaggcctactataaccataatgagaggtacagaaagcactgtctttatcttcttcttgttgacgccgattgcaaatgtcactgcgcctataagagaaagtatagccagcgctctgtaaatccaaagcgtaatatttacatctgtatatcctgctccgtagagaactcccgtcgacgaataaagaagttcgtactgacgaaggaaaaatcttatcgcaagcataataaagaagagcacgcctatgacaattatctgagtcttcgctattcctataaattgattgatatttttattatcaaactttttcttaggacgtcttgcgcggttcataccgcctcgcagacctctaagtccgtccatagcctcgcgaagagtctcacccattgtcggaccctcaaacggataatccttgtctttccccgttctcatttcaggaccgtaatatctggcctgctcttccggttcttcatcccttacttcttcaaatattctcggcgttctggccgcgagcagcactgaatagtaaattgccgttgctattacaaaaattataatagccccgataaccatttcatttaatctctggataaaatcgagcttaaagatgtaaaaagaaacatcatgaccgaaaagcggatctgttatattaaagtccgtgctgttgaagaactgcaacgcctgccaccacaaattggacataacagccgccgccacaaaacaagcgccaccgatagcaataagccattctgtcagcttgagttttctttcatcgggtatttcatcggactccaccttgttatagtacccttttttgagcatcttcatgtacagcagcagcagcactgccattacaacgaacgtaggtattccgagctttagctgtgacacaagctgcgtaaagaacacactcacataggagagttctttaaaccataaataatcagtaataaatccgatgagtgcgaggaaaatcaaaacgatcaaaagtaccgctactatgatccattttgctttcgtgcttttctttttttccaagtaaatgcctcctttgggttgtccccttaaaatttatagtaatctacaataagcaatttttcgttttcaggttccatatagtatacccaattaaaattatcgcttgtagttttacttccgcttgttgtctcaatagtctcgcgagcccatatgtaataccctttgtcatcctgccttatctcgcctattttaagcgttttaaaagtttttttaacattttgtttaaatgctgcgcagtttttatacgcattgctgtcttttttaagaacatcaaaaacagatttatccttatcgtttacataatctatccagcgcgaatcaaaagctatgagcgtacccacagcctctctgtccgcatagtacgcattgccagcatcatctgtataaaatacattgtctgtaagcggcttcgtatcttttattttatctgagctatactctatctgcggcatatattgaagctcctcacttgatgttacaatttcaatattcttattgtagacactcatctgctcttcaattatcttgttcatactgacaggctgcgccgcattgtcctgattttgattttcatcctgctgaagatcgccgtctgtctcatctgcatcggtatttacgccttggctgccgtcatctgatgcttccgactttcctatttcagaaaaaaacgttacggcatctgttaatttatcatttataaaaatcgccgccctgctgtcgggtgcaaaatacctgatgccaagaactgccagctctaaaatgagaatagctataaccactatgagcaaaattcttcctgcaatcggtttcttttcaccgccgtaatcgtcgtaaccgctgttaccggtaccgccaggattttcctcaccgccgcttcctgaactttctgcatctactgagctttgttcctgagcaagcatacctgctgcttttttggcgcgctttctctctttcttttcctttttggggtcaatcggttcttccatatcgctgaagagcttatcgagctccatagtcagcgacatatttttttctcgaatatcatcttcgtagaaattatctgcactatcaccgttttcatcttgttctttttctgttttttgtaccgttaattgctgttcatagacgcttttttggtctttaatgccgtcatcactttcgttctcaaaaccaccctgctcgtcgttctgcgcctcgctttctgttttgcttccaaaaagcccgtcgagccctgcggatgattcgtaaatatctttttcgagctccgtagtatcaaaccttcgcatttcctcgccttctgcgcttgtttccgctaaaggctttactgtttccacagaatctccgctcttaaaatcaccacccgtataatctataccgccgtcaagtattgcttttcttgcggcttccgcttctttaaggtgccttaccggatcaaattctccagaatcataaacggctttttcttcccttatattcaaatcaaatatattatctaattccgtttcttctcccctgcccgaatttatcctctcgtactctctgtcgagcagtttttgaaactcttcgtttttcttgttaaatgtataaaatctgtccagccttgcagtatcgcgtttcattgcgctgttttgtatattttttccgctttcaacatcgctcgatatgtcttcgagggttacgcgctcgaagacctcatcctcttcttttttttcaggctgatgtatatgttcgtactcttcttctgctgccggaacaaatttgaagtgaggctcctgcgtttttttatgcatttcttcttgatgaagtttttctgccgcagcgcgcacttcgcgtattttttcttcttcggccttgatctgttcttttatcgcatcaagacttggggctttggcttcagctttactcggctttggctcttcttctgcaaaagctggcgctgaatttggtatcacagcacttaagcctgaattttcttccgctttttcatcatcttttccaagctctgttacaattcccttctgccagtccacctccactttttccggagttttatgttcactgttaaactcatgtacatcccatacaaattcactcgtgtcgagagtataaggcacatattcttccgtatttccggtttcgtaagaggagttttccatcattctttcaccggatggctctattttacttccgcaaccgctgcaaaatctgtcgttatcgcctatatgttttccgcatttgctgcaatacaatttttttcctccccgttcatttccgtcaatcttttatcagtttcgttatttcctcttctgtatatattctgccttgtttatccgtatcatatccgcgcagaaatattctgtctcgtccgccgctaaaagatgtgcttgacgcctccccgttttcaggcagcggctcctcatccttttcatttttcagcgcggcgtgactgctttctgtattttcagcgtttacttcgcctttgccgcttcccgcacattcttttgcttcgctccccgataccataacttctatattcttaactgcttcacagagtttaccaagctctgcatttatttcttctttgtttttatttactttccagtaccacaaacggtacggtctcattaaaagcgctgcaataagcaccactgctaaaacagcaaaaattgcgataaatatattaagattttctacaataatagttctataaaacatttttataaattcaccgaaagtcatatgagtttctctgctcccaaaagattttatagataatcgtattatactataaaaaacaaataatagcaaataatcatatataaaaaaacacaaaaagagcggggtttcccgctctatatataacgagagattagtcctgctctttttgcgcaaaggttaatgctgttttttcgttttagaccgtatggtctatcaaagattcgccctaattagttgcaattgttgtttgactgattgctctggtttgactgattgctttgatttgactggttgctctgatttgactgattgctctggtttgactggttgctctgatttgactgatttgtcttgttagtctgatttgactggttattattctttgcgtttgaattgtttgagttgttatttttcattttctaatccctcctcgatttttattatgtcccgatatttttaaaatataatcgcgttaaagcaaaaatcgaaatagcttataaaatttacacgtcatacgcaatacatcttgatttaaatgcaaaaaaccgaagtatatacttcggtttttttcttggtacgcgatcaggggttcgaaccctggacaccctgattaagagtcaggtgctctaccagctgagctaatcacgcatattatatattttctttgaacagtaattagtttatcaccttgtacatgctttgtcaacaaaatttttttgatttttattatagtattatttattcagcacaaagacatactaaatttgtaaacaaaatttttaatatactgctttgatacaggaggtttttatcatatgaatattattgatattacaaatgaaaattttgattctgctgtccgcaccgctgacaaaccctttattattgatttttgggctccttggtgcgtatactgccgcaagctttcgccggtgcttgacagagttgcttctgctatgtcggacaaaataaacgtcggcaaggtaaacatcgacgaacagccagagcttgcttccaaatttgaagtaaatttcgtacctacactctgtatttttaagaatggcgaggtagcttccgccacaatatcgccgcagtcgcagaccgcgcttgaggactggatcaatgcaaacatctgaatatgatatcattataataggcggcggtcccggcgggtatgctgccgcgctttacgctgtgcgcgcaggtctaaggacactcgttcttgaaatgttttccgccggcggtcaaatggcagaaactgataaaattgataattaccccggttttgacagcggtattgagggctttgacctcgcagaacgtatggcaaaaggcgccgaaaattttggtgccgaaactgtttttgcagaagtaacaagcgtcgatttttctaaaaccccaaaaatcatcaaaacaagagatacagtgtacagcgctcttgctgttgtaatcgccacaggagcagcgccgagacggcttgatatcgagggtgaggaaatgctcagaaaccgcggcgttgcttactgcgcgtcatgcgatggtatgttctacaaagacaagccggtagctgtcatcggcagcggaaatacggccgccggcgacgccctgcttctggcgaacatatgcagtaaggtttacttcgttcacagacacgatgcaccgcacgccgagcagacatatctcgaaatattgaaaaacacaccgaatgtcgaattttttcccaattcggaaactgcatctttcatatacgggaactctgattcaaataccggcaccaatacctcaagcggcaaaaatctgaaaggtataattatcaacgataccgtatcaggagcttcccgcgaaatactttgcgatggagttttcgttgctgtcggacgcataccaaacacaaaactttttgccaaccagcttgatctgactgctcaaggctatataacggccgaagaaaatacaaaaacgaatattcccggagtttttgccgccggcgatgtgcgtacaaaacctgtgcggcagattataaccgcagcggcagacggtgctgtcgccgcaaaattcgcagaagaatatatcttttccgcaagaaatccgcattcttgacttcttgcttttcatgatgtatcttttactattcagccgaataattccactgcaacttttacgaaaaacaaagctattacagtcatcattatcggccttgcaattttagcgccgccgcggacaaaagccttcgtacccgcataattaccggcgatactgaaaactcccgcggtcaggcctaaaagcacggctattttgccgctgcaaagatatacgattaacgcggcaatattcgtggacagatttattaccttggcaatgccgttcgcctctgtaagcttcatatgcgctataccggagagcacaagtattaaaaaagtacctgtacccggcccgtaaaagccgtcgtacatacctattacaaacgcagctgtgctcccaatagcaagcgtctttacaaagccgtatggctcagtgctctcagcaaacgcatgcccgcgcattatataaagcgctgtcagcggtaaaataaaaagcataataattttaaaaacgttatcgtctatgagaagcgcaatccgtgcgcccagtgccgagcctgcaagtgcaaacactgtgcagcccgcacccattttccagtcgatataaccgctccgagaataacggaatgtcgctaccgctgttcccatagccgagctcactttatttgtacctatagcaaaatgtgcaggaagtccggcaagcaaataagcgggaagcgatataagtcccccgcctcccgcaaccgaatctacgaatcccgccaaaaataccagcggacatactattaaatactgcaaagctccgatctgcattttatactccgtctatactatatcttttaattcacaagtaccgtgtctaattctttcactctatcagcctgccaaactgcacgctcagctaaagcacaacagccccaatgctgtacacaacaaacgatgccaaccacgcaatcatacactgcgcaattacaatataaacggcccatttcgcacccagctctctttttatagacgataccgccgccacgcacggcgtataaagcagacagaacacgagaagtgaagcagctgcgagaggcgttactgccgcaagcagcgcctccgtgcttccgaacagtaccgataatgttgcaacaacgctttccttggccataaatccgctgataagcgccgtcgatatcctccagtcgccgaggcctatagggcgcagcaacggtgcaatcactcccgccaccatcgccagcagactgttttccgaatccgtcaccatattgaggtgcgcgtcaaagctctgtaaaaaccaaattacgatagtcgcaataaaaattatggtaaacgctctttcgagaaagtccttagctttatcccaaagaagctgcgccacattcttggctcctggcatcctgtagttcggaagctccatcacaaaaggcaccggcgatccctgaaacttggtgcccttgagcacaagcgctgttaatatacccacaattattccaagaaaataaaggccgatcataatcactgcccctttaccggggaaaaacgcatcagtaaaaaatccatatatcggcagcttagccgaacagctcataaacggcgtcagcaatatcgtcatctttctgtcacgctcagatggcagcgttctgctcgccattacgcccggcactgtacagccaaagcctatgagcataggcacgatactgcggcccgaaagtcctattttacggagaagtttgtccatcacgaacgccacacgtgccatatatccgctgtcctccagcatcgaaagaaagaaaaatagtgtcactataatcggcagaaagctgagaacacttccaacaccactaaaaattccatcaatcacgagtgaataaagtaccttatttacacctgcagaaatcatcgccaaagacaccatttccgtcagcacctctaccccgtcctccagcaacccctgcaaatacgcccctatcacattaaaggtaagccagaacacgatacccattatcgctataaacgatggaatcgccgtatacttccccgtaagcactttgtctattctgcggcttctcaagtgctccttgctctcgtgcggtttaataacggtagctccgcataccttaccgataaaatcaaaacgcattgatgcaattgccgcagctctgtcaagcccgctttcctcttccatctgcaagatgatatgctcaagcatctccttttcattttgcgaaagtccaagactttcaataataatactgtcaccctcggcaatcttgctcgctgcaaatctcacgggaatatccgcttttttcgcatggtcttcgataagatgcataattccatgaagacacctatgtatcgcaccgccggcgtcctcctcgctgcaaagatcaagcacctgcggcttttcctgataacgcgccacgtgaagcacgtggtccacaagctcgtctataccttcatttttcgcagcggaaataggcactacgggaattccgagcagttcctccatctcattcacgagcaccgagccgccgttctcacgcacctcatccatcatatttagagccagcaccatcggacaattaagttcgatgagctgcatcgttagatatagatttctctcaatatttgaagcatccactatatttatgatgcccttcggtttttctttcagcaaaaattctctcgttacaatttcctcgctgctataaggagacattgaatatatacccggtaaatccgtaacgagcgtttccggatgcttttttatcgggccgtcctttctatcaacggttacaccgggaaaatttcccacatgctgattagagcctgtaagctgattaaaaagcgtggtcttaccacaattctgatttcctgcgagagcaaaagtgagaatcacatcatccggcagcggattttcatcttcctttgcgtggtaccgtccaccctccccgagacccgggtgttctttgcccttttgcttatttctctcctccgcgcgtttaattctgccttgctcttttataaattcttcaaaagtttttttgctttcttctcttacattgtctataagtatcttttgcgcgtctgccagcctgattgtaagctcgtagccgtgtacccgcacttccattgggtcgcccatcggcgccagctttatcattgtcacatccgccccaggtataattcccatatcgagaagatgctgtctgagcgctccttcgccaccgacttccttaacagtcgcggtttttcctatttcaagttctcttaacgtcgctgtcattattttttcctcttataaaatcttttcttttttcggttagcacagctattatagcaagcaacataatttctttcaatatatttcttgatttttctttaaaaatagtgtattgtaaataggcgatatatattacttttaattttgaaaggacatggattccaaaatgagacttagaaaagataatgatttaatgcaggaagacgaaattatccttgtggcacaagtttcggatgcgctcgcgcatcccgccagaataaaaatataccagtacataatgcagtgcaataaggaaagaaagcccgtatgcaataaagacgtcgtggcagcgtttgactactcccaggcgacaatttcgcagcacattaaaaaactcgtgcaggcagatctcgtgcaaatgcgcaaggatgataaaaaatctatgtactacgccaacatcggtattctctcaaaatatttggcggcaacaaaaaaattcagtacatttcaagcgtagaacagcttagtactaaataccgatataaaagctcttttcagaggcgcatcattcataggtgcatcatcagaagccttacttatatataagtaaggcttctaaatttacctatttaccgcattgtccttgtgaggtaaacttccttggaaagcggtttaagaaattgatacgccctctcggcttcgcttttatcaaagtacacgcccaaaaccgtaggcccgctgccgctcatcataacggcagcggcttttgtttccttaaacattgtttcttttattttcttgacctcaggatacgctttgagcgtgtaaagctcgagaacatttatcatattggcaattatttttctgcggctgccgttggcaagcgccgcaacgagctcgccgttattcggccgcttgagctcgcatcttttttctgcaaactctatttcctcatcaatcatcttgtacacctcgcgcgtcgatacgccgaacatcggtttgacgagtacgatatcgcttttcagcgttgtgaccggttcaaggcgagtgcccgtgccttcagcaagggccgcgcagcaggccattttatcctgccttatgtacgtattgagactgcggttgacccgcgcctgccccataacgcagaacggcacatccgagccaagctcagcgccaagctccataagctcgcaaactgacagccgcagcttccatagcttgttgagtgcatgaagcacagcggcgccgttgctgctgccaccggcaagccctgctcccacaggaatatttttctttatatctatacgcaccttgccgccggccaggtcttcacgcatgccatacttctctgacataagctgagccgctctatatgctatatttctcgcatctctcggcagatacggtttgtttgtcgacagctcaaccgcaatttcatgcgtattcatcgcctttttactgtacatattagaatatactccgttgccttcatcctctttacttaagtggtctgcactgcgtatgcctgctgccgcctcaagctcgctgcgcgttataaagcgcacgagtacctcgtcgtgcagctctatctgctgcatcaccatcgatacattatgaaatccatcatctttaagtccgaggacatcaagtgaaagatttattttggcataggcttttatgtttatttttttcatatcgcactccatataaagtcatgtttttaactgcccttacaatcattctgttggtattgtctgctctcttttaataagaaaaaaggacgcgccctgcggcgcgcccgttcagtctttatctctttctttttttgccgcctgatttcttaggatttgtagtaccctttaagcgcattgccgcagcttgttttttgcgctcttcctctcgctttgccacatatgaattttcggcagctctcacagcacgcgcgcggctcttcacatgctttgcataaggattgccctgctcttcttcctcttcatcgtcggtatcctcatactccatttctttctttgcctttttcgcttcggctgccgctttcttttccttcttcttgttttctgcctcgactatttcttcaaccgatttacccgtttccttggccaccttgtaaggatttactttttcctctacctttttcttctcttcctgcttcttgtcagtctgtctgccgaagaaaatcattcccaccatcattatgaccatcattatgacatttattctcgaggccttggcctgatccagcgtctttacctttatcgtctgctcctcgccgagcgtctctccgcttgccgccgtaaaatctcctgcaatcgtgagcgtatattcactattctgttttatctgaagatcctcatcggtcatatcggcaagtaccatcagcattccctcttctttatcggaataaatgaccattgtcggcacttctttaccctcgtcgtctgttataacaaaacagtccttatttgcctcttcattttcagcgtttattacatcctggttaaaatataattttattccgaaattatctatggctgcgttctcatagccgtctcttggatatgtatcttctaatttcagaggctccgcaaaacaaaatgaggccgcgctcagtactattagtattgttaggcttaaaattatgcccgtttttttcataatattcgttcctccgatttcttcgtcctaagttttttaaaaaattctttcattattgcggagcattcttcctgcatgatgccgctctctatttcaatctgatgattgagcttcttttccttgggaatgttaaagacagaaccgcaggctcctcctttcggatccggcgtgccgataaaaagtttttcgatgcgcgcccacaccatagcccccgcacacatagcgcaaggctcgcaggtcacgtacatactgcagccaataagacgccagccgccgatattctttgccgcttctcttatcgctattatttcggcgtgcgctgtcggatcttttgcagtctccgtcatattatgtccgcggcctacgattttgccgtctttaacaacaaccgcgcccaccggtacttctccaagtgctgacgccttttcagcttcagctaaagcctcaatcataaaattcttcatataccttataatgctaacacaaatctgcatatttttcaatcacttttccacaaatagcgtgctttagagaaatatcttgtcccccacagttatttacgcctcgagaatatcaccgttttttatgtctaccgccactatccagtacccgtacgccatccggcgcacttctatgggcgtcgtctcttctgtggcattataatcttccgctccgaggatcggctgccaaagaataaagcccgaagctccctcctccggctgctcctctcttaaaaacctgcccggcactccgaaatagtagtatttttcattttttccaaaaatatagtgcttgtatttttccgacagcatctgcgctcccggcgataccatcggcagtctaatatcacctgtcaccttcgtccactccgcgcccgttacgtcgtttttaaaaggcaccacacggtcgtatacatttttatctctgtccattcggaaacactgcgccgctatatatttgttatagtaggaattgtagcacataggcgctccttctgcgggcatagaagcttccgctctgcctgccgccgcgcttgcgctgcggctttcatctgcgtatgtgttatctgtaagacctgcttgttcacccctattttcccctgatatttccatcccttcatcctgctctaatgcttcccgctcctctccatagggcggcatatcgagcgtaccttttaaaacgggatgaagcggctctttttcatcgtttaccgatacagctgctactattgcgtgtgaaaaatcggcaagactatggccgtttttgtccatactgacaggatcaaagcgaaaatatgtttctccgcttcccattctgttgacatttaccgtgccgattatggcatgtatcattttttcacgcaccgttccaaaaaaaatcaatttgtatacatattcgctcttctcataatatttgacattctgtacaccgatgcgcattgccccgcgattatttccagtctctatttttatatgacctttcgccggctctcctgtacgcatagcaaaagcctcgctctgtccttccataattataaaaaatctgtcgtacctctcgtaattcatattttcccctcctgcagccttgctttttttccttttttacagtaatatatatgagaaaatagggggtaatatctatgatttttgatattattgtaattacaattctcgtaacagcaatggtcttcggatttcggtcgggatttatatatacatttatacatacaaccagctggtttcttgctgttctcatcagcttcatatggtcgccgcaggcgcgcgattttatcacattgcacaccggcatttacgattcgctctacaatatattcctcggcaaattttctgaatcatttacagctgctgatgaaacattagcacagcttcctgaaataattgccaaagtcatacgcagcacggaaacgaattttatatcgactttagccgatacgatgacatcgcttagcgtcacagttataagctttctcttggttttgctgacggtaaaaattatgctttgggtaataacagagctgctgtccaagaagaagaataaaggatttacaggtgcgcttgacggtattctcggccttgcttttggtatcgtgcgcggttttctcgtcgtgtttctcgctctttccctgctcgtgcctgtaagaagcttcgtctcgcctgaaacggcatcattgatatctgactcgctcgatagctctgccttcgcaaaggatctatacgacaataatctcttaatgctcgtaattcgtgatctgataccgtaacagcaaaaaagatatccgttggcaggctaaagccgtttgccttcggatatctcttcgtatttaatattctgcctttagttttatatgtttattattttctgccgagaacgatatctttaattttggaataggtctcttcgctcaagtcatgctctattttacacgcgtcgccgagcgcattttctctcgaaacgccaaggaatttttccaaatactcagatatgatattgtgccgctcgtatactctttccgccgcggccattcctgcctctgtaagcgttatcagcccgctttcgtccataacgataagccctgaatttttgagtatactcatcgccctgcttacgctcggtttggaaaaacccatgcgcgttgcaatgtctatagaacgcaccgttcccttttcctttttcagcatgagaatattttccaaataatcctctcccgattcgtaaagtgccataaatcagacctccaattaagttgcgtttagtaagcctctgcttacttcaggtatttttattataccacacaagcgcaaaattgtcagtctatttttaattatttacattactcctcatcatatgaccgccaaatcccccgttttctctttctccaaattccctgttcatactgcctccaccttgcgttcccatatcggaaatatctatattatccgcagataccagagcttccggattttcaagctgctcgctgtgtgttgccggcacactgccatcaagctgtccgttaagactttcggctcgaagtcttccgaattccttcagagtctcaactgccgtttcaaactgctcgtaagaataaaatgcactttgatctcctgccacataatcgcttatgagtttggtcagctcatttaccttgttttcaaaatatccactgtcaaaatattcggtgacgagggtgtttatatattcgtgatatatatttttataattttcattttccaaaagcttccctatgagcggtctttcttcaagctcaatgccagacatgacaggcgtatctataggaaaatttacagcttcggaagcatcctctacctggaagcccgcaaatgacaaattcaaatcccacggaattatctgcagcactccgtcttcttcgtacagataataattgtgcttaaagctgcttacataactgtcaagattaacaagcacagtatttacggtaaaatatcttaacacctcatcagtatctatatactcttcaatttccgactcatcttcggaagtattcagcaccttaagcgcctttattacgcgttttttatcgctgcttttattatctccgaatacggcgttgtcaaatatctggctgtagctttcaatttcatcatctgtatatacaagatccgcacctccgccggagctgccgaaatctgcaaagcctccgccctccggcggcgtaaattctccgcctgtttcaggcgcttcccctgctgcgcctccgaattcaggcctctcgccaccgtccgcaggattgcccccgccgaaatcaggcgcttcaccattaaaatcctcaggcattgcgccgtaaaaatcatttgtcatttctccattaaaattatcaggcatctcgccaaaatttctctgcccatcaggtgcaccgccgcccatatccatactttcaggcttatagagctgcccgtaatcgctgccgtatgttctctcggcccattctcgttctacagcttccacggcgagataaaaaccccattcctcgccgttgacagtgatatcggcaaatgcatacgcaggcgtatttacgccgagaaattcaaacatatcgtatgaaaggtactctttcatatacgtagcatctccctgcatattgttcacgacaaatttactgagtccgtagtagttttgcccgtcaacatactcatccatttttattttaaagctgtacctgtcggagtcgggcatcgccgccaccgtactcaggctcgaatttcccttgggtcttattcccacattataatatttttcaccgtttatcgttatattgcaggagatatattcctcagccgccgcattgtcgagcatttcctgccagtcctccgcgtctgcctctatttctatttccgtgattttctccttatcaaacatctttgcaaggtattccggctcggtcgctgctgctgtaatccccaaaagatcgggcgcaaacataaatattccggtaaaaatgagtgccgccgccagcatcacgacaataacagcatcgatttttttgtttgccagcatctgctctcctccttatgacaaatattctccattatacgaaacaagtgccgcattttttacaccgtctattttcgttaccgcattcacaaactcagtcgacatttctggaagacgaacttccattgtcatttctatgccacttttggacaccgttttcgatttaactgtatactttttaaccgcttccctgactttcgccgctgcggcatcctctgcacgctcatcatcgcattcgacaattaaaatatacggactgtctttaacctttttaaccccgagtgcgatgagcactatgccgacaaacgccgttcccagcacagcaagcggcaacattcccgcgccaagtactatgcctgatgcaatcgaccaaaacagataaactatatccatagggtcttttacagccgttctgaaacgaacaattgagagcgcgccgaccataccaagcgagagcacaacgttcgagctgatcgcgagaattacaagtgtcgttatcatacacatagcaataagtgaaagaccaaacacctgagaatacataactccgttaaatgtccttttgtacaccataaaaatgaaaagtccaagcaccagtgaaagcgcaagcgcaattatcatatctaacggctgaaacgccgaaacattttcaagaaaagatgatttaaaaatatcattaaaagtcattattattctccttttttcttatatttttcaggcaagcgccgttttattatttacccgtacatacggcaaactgcgtatttggaaaacgccgtactgcgtctgttgccaagctgcaccgctcctcttatgatctccggtaaaaaattatcaaactttacttcgagtattatcggatccgccataagcggtgacagagttacaacttcactgtttaaaaaatcctttgaatatatccctgttctgatattgctgtctatcgtaattcgcacatttcccggtgcatatacatacggctcgcgcgtatagtcgacgatggtcttcggcatcaaaagctcccctttcattttgccgtaaagctcaagcaaaagtgccctcccgctcttcttcatccattctatatccccgcttatgattctttcgcattcctcttttgtcacgggtgccgtgattttattgccatacccatttgactttgattttttttcgagttttataaaagaaaaatcatcatcataatatctaagcctaaatttctccctgttgttcactccatcgagcttttcgcgcaatgctttgtcatcgggtgtctcaaagtataaacttcgtattttatacttgccgctcctctgagcatgcttatccttactgcagataacctcaaggcgattccgcaggataatgtaatcaccgatatttatatattgcttaagctcatttctgtatatcggcttcttttcatatgctcccttcatatgcaactcctttcttttcagctttatttactgcgcctttccgtcagccaatccccttctcgattataatcataccgcccgtctatggttgttaggtgaaggctcattgtaagaatcttgtaataaatgtgtgcttttaccataaaaagagggcaaatgcgccttttttcctgtgcatttgcccttatttttgtaattttctacggtgtttgcccctgttttacgattttttactatatttttagtagtttaagcactatctgataaaattcgtatataccggtgtctcatactttggaaattccacgcccgctttacggcctgcttcaatgtttttaagcatccacgccatattctgtccgagcgtgcgcatagtctgcagtccttcgagatcctgcttcacctgctcagcattgcttccatgcacctgattccagtactgtgagcccactataaacatattgcttataccgaaatatttattgagaatatcccaggatgcagtagcgccgccgcgtcggcatgatacaaccgctgcgccgagttttcccgccatttttttgccgttaaagaaaaacagcctgtcaaagaatgcatgcgcctgaccggccgcacccgcgtaataaacaggtgcgccgagaatgatgccgtcaaattcgtcgagccgcgatgcgagttcattgactccgtcatcgaatacacatcttcctgttttcgcgcagctgccgcaggcaatgcatccagcaatcggctttgtgcctatctgatagatttcagtgtcaattccgtttttattgagcgtttcggcaacctcactcagcgccgtgtaggtacagccgtttgcatgaggactgccgttaataagtaatactttcattttatcctcctcttaaaactatatttatatatctgccatcgtattttggccgatagaccgatattccgatgctattgaaaatttctacgcccagcctgcatttttcagtatttgctgcacctcgtcgtcttcatccggcggattaaaatcagggaataagccggcttcctctgctcttttttctatttttgccgccagccgcagaaacatttcaccctgcttgcgaaaattttcgcgtgtattttcgttttctatttccgtcaaatttataagaacattgagccaggcagatctgaggccagccaggagattcagcaccgcaattgtaagatcgctttctatgtttggattgcatttgccgataatcatttctgcagccgcaagcccctcgtggcacattcgcataacattgagcggcactattgtcgcggtaattgttgcttcttctattttagcctttttcgccgccttttcatcttctgtattttcgggcatttttctcgcctgcgccaccttactgtacgcttctgcatcctgatccatgagcatcgcgagattggcatatacatatgaattcgctgcgcgcgcacccttgcacgcctcttcaaactgtgcataattttcgtttcctattgtaaattccgccaccatcattacgagtgccgcaccttgtgcccctgtaagcgctgccgccgcaccgccgcccggcgctgattttttagcccgcaaatcttcaagataagtttgtgttttttcgtttagatatttcatttatatgctctcctttgagttttttattactttcggatattttatattatatcacctttgggtgctgcaggcaaagggcaaatcgcccgtgtaaacctgacctgccgcagcttaaatctttacatgtaccgaatttctgacagcgagagcttttgcaaaactcttattttgtgataaaatataattatggaaaaggaagataagattttacttgcgacaatagaagataagagaaggcagtgcgaaatcaggtatgctgcaaccaatacggtgttttttgatatgcggcagcgcgcgcttgcagaagctttctgcaaggcggataggagccttatgctcctatccgagcggccggacggtacctacgaaaatcccgatattgcagggtccggccgcgtgcgcgcgctgttttacggcggttatgccgatgcagaacgccgcgctctcatatttttaccggaatatgccaacctcacagattttctgccgcttgcgtccatcgccggcgcgcagaatttggaaactcctgctgcaaaaccgcaaaagaataaagttccgactgcaaatatgcaggacggcagcgcacagaccgtagcttttcagcacccggcaccggaaggctgcccgcttaccctcatcaaagcacacaccgcaggcggcataggtgcaaaaaagctcacacaccgcgattatctcggatcgcttatggggcttggcattaagcgcgggatgataggcgatatcatcatccgcgatgatggagctgacattatagtaatgaaagaaatcgcagatttcttacttataaactacgaaaaagccggacgcaccaatctcaaactcgaaatcgcagacataactgagctcaatacgggcattgtaaatatagaagaaaagcacgataccgtcgcctcgctaagactggacaacctcgtatcctctgtatttagtctttcacgcagcagagcacaggaagcgataaaagcaggtctcgttttcgtcaacagcgctcccgcagcaaagcctgatatgcagctaacagaaggtgataagcttgtactgcgcggccgcggcaaagcagtgctccgtaaagttcagggaaaaaccaggaaagaccgaatttacatatcgtttgaccgttacctttaaaaatattagaatggaggacaaaaaatgtttacaataggctgccacctttcggcatcaaaaggatttaaaaatatgggcgaaaccgccatttcaataggtgcaaatactttcgcattttttacgagaaatccccgcggcggtgctgccaaagcaattgatgaggctgacgtacaggcgctcatcgaattgatgcacgagcataacttcggaaagctcgtagctcacgcaccctataccgtaaatccgtgctcagaaagccaaaaaacacgcgactttgcacatatggtactatccgaagatataaagcgcatggaatatttaccgggaaattactataattttcaccccggcagtcatttaaatcaaggtgctgaaaaagggatagagctaatttcggcaatgctaaacgatatcataacaccagagcagagcacaattgttcttctcgaaacgatggcgggcaaaggcagtgaagtcggccgcacctttgaagaacttaaagcaattatcgacaatatgaaatatccgcaaaaagttggagtatgtatggacagctgccacgtaagtgacggcggatatgatatcgccaaagacctcgaaggcgtgcttgctgaatttgaccgcattatcggcatagacaagctgaaagctatgcatctcaatgacagtatgaatccgctcggctcacataaagaccgccacgctaaaattggcgaaggccatcttggtacagaggctttcataaatattataaaccatcctaaactcaaagacctgccgtttatcctcgaaacaccaaatgaactttccggctatgccagagaaataaaacttttgcgtgaaaattatcaaggataggcgttgaaactttgtaccgattttcataaatatttgatttattttttactcataggcaaatatatttcaaaaatcatattttgcgcgattgcacaaacagaaaacttgtagtatactgtattcggtaaatattgttttccgatttaccataaaatagctgcttacagctttatataacagtattttcagttttaacaaggggcattagcgcagctgggagcgcgtttgactggcag

SEQ ID NO: 1159 - DNA, 6966 bp, Unknown
  16S sequences of unknown bacteria
gcgacaggggtcttggggcagagccccaagcgtgttttggttccttttacacgagtaaaaggaacgccacggcggcgagccgtactaattaagttttttataaaacttgcaccaccgaaggtgactacaaaccagccccgccggcaggcgtacagattagaaccttttgtgaaacttgccccgccgcaggcggaatgtgatttttggaaattcctaccgaaaggaagtgacctgtatatgtctaaaccgctgattgctattgtggggcggccgaatgtcggtaaatccaccctgttcaataagctcaccgggcagcggctctccatcgtggaggacacccccggtgtgacccgtgaccgcatttacgcccccggcgaatggtgcggacgggaatttatgctggtggataccggcggcatagagccgaaggccgatgatgtgatgctttccaaaatgaggatgcaggcacagatcgccattgacgccgccgatgtgatcatctttgtggtggacctgaaaagcggtgtgaccgccaatgacgccgatattgcccatatgctgcaaaaatgcggcaagccggtggttttgtgcgtcaacaagtgcgacagcctgggtgatgtcccccccgatttttatgaattctataacctggggctgggcgacccgtaccctgtttcctctgtccacgggcacggcaccggcgacctgttggatgcctgcattgaaaagatagactggaagaaccgcaccgaataccccgaggaatacaccaaggtggccgtgatcggcaagcccaatgtgggcaagagctcgctcatcaactatctggccggggaggaacgggtcattgtcagcgatattgccggcaccacccgtgacgccaccgataccgtcattgaaaacgagtacggcaagtatatcttcattgataccgccggcatccgccgcaaggccaaggtggaggacgccatagagcggtacagcgtgctgcgcagctatatggcggtggaccgctgcgatgtggccattatcctcatcgatgcggtggagggcttttccgagcaggacagcaagatagcgggctacgcccatgagcagggcaaggcctgcatcgtatgtgtgaacaagtgggacgccgtggaaaaggacgaccgcaccatgaaggaatacaccgacaagctgaaggtggatttcagctttatgagctatgtgccgttcctgttcatcagcgccaagacggggcagcgggtggataaaatgttccccctgatcaacgaggtggcggccaatgccaggctgcgcatccccaccgggcgcctgaacgatctcctcagctatgccacggcacgggtgcagccgcccagcgataagggcaagcggctgaagatctactacatgacgcaggccagcacccagccgcccaccttcgtctgcttctgcaacagcgccgagctgttccacttcagctaccagcggtacctggaaaaccagatccgtgagacctatgacctgaccggcacgccgatccggatgatgataagggaaaggggcgactgatatgcgagaaaaccgcatcaactggcctcaattcttccggccggtgtgtgtgctgtgcatggtgtgcggcgggctgtggctgtggtggcagatgagcctgaccgaaaacctgctggggcgcatcactgccattgccggcggggtgctgttcctcctgggcgggctgtttggcctgctggggaagccccgtgccctggtaccgctattggatttcctggcgctggcgaccgcccttattgccctgtggaagatagggctgtgctggcaggccattgccggggtggtgctcagcgccctgtatctcatctgctgcaacgccagcaccgccataggcgatgacggcgacgccaaggagcagcccgattacagcgagctgcacccctactgggagaacatggagaaggtgaagcgggagtgggagcagaatacatccgctaaggccaaagaaaaagaagaaaattaaacctgccgccggcggggcgccggacggtgagggaaaatcggaggatggcaaggcggcgggccgcgggaaggctcttgcccgacggaaggcgggctgatgcctttcaagggccgacaacgcagccagcgccggttttcaccgccggacgccatgagcccccgccggggcggggatagataaacgaaaggagttgtcaccatgaacacgatcgattgcatcaaatcccgccgcagtgtgcggaaattcaccgaggaaaaggtaccccatgaggtactggagcagctggtggagctggcccggtgggcccccagctggaagaacacccagatcgcccgttatgtggcggtggaggatgaagcgctgaagaatcgcattgccgaagaggccaccattccctggaacgaaggaattattaaaggcgcgccggtgctgatggtgatgacctatgtggaaaagcgctgcggctacgagcgggacggcagctttagcaccagcaagggcgaccgctggcagaactttgactgcggtattgcggcagcgacctttgagctggcagcccatgagctggggctgggtagcgtggtgctgggcatctttgaggaagagaagctgcgcgagctgctggagctgccggagggcatgggcgtagcctgcctaatgccgctgggctatccggcggaggagcccggcgcccccaagcgcaaggaagtggcggagctgctgaccatcaagtaaaaatatctcccctgctgccaaacggcgggggaggatttttatttttggcctggcgggaatacggaccgcgaaatggctgtgaaaagggaaaattccccttgacaagcccagtgctacccgttataataatagagctgttccatagacagcaggcacgcattggcgtgtaaatggtttgctgaaccggcctgccgaggaaatgagctacgattgactatgactttaacggtttcacccgctaaggaaacaaagatcgctctttccaaggtatgttggaaagagcttttttagttttccttatattactttgggaggtgaaacattttgcctaacgctaatgttctgaaacagaaacaggagcaggttgctgctctggcagaaaagatgaaaaattccgctgccggcgtactggtcgattaccgcggcatcaccgtggccgatgacaccaagctgcgccgcgagctgcgtgaagcgggcgttgagtacgctgttatcaagaataacatcctgcgccgcgctgccgaagaggctggcctgggcgagctgaccgcgcatatgtacggtaccagcgccttcgcttattcccccgaggatcccatcgctgccgctaagatcctgaataagtttgccgagtcccacaaggacaagttcgatatccgcgccggctatatggacggtaaggtgctggacgaggcaggcgttattgctgtggccaagctacccggcaagcaggagctgctcaccatgctgtgcatggcgctcaatggcaacatccgcggcctggccgtggctctggatgccatccgcgagaaaaaggagggcgaggctgcttaattagccgcccgcgcaccgtttcccgcacatccttacaaaatatctatttaataggaggattcatatcatggctgatatcgcaaaatttgttgaagaaatcaaaggcctgaccgttatggagctggccgacctcgttaaggcgatcgaagaggagttcggcgtttccgctgccgctcccgttatggttgctggccccgctgccggtgctgccgctgccgaggagaagtccgagtttgatgttgttctggctgaggctggcgcttccaagatgggcgtcatcaagctggtcaaagagatcaccggcctgggcctgaaggaagccaaggagctggtagacaacgcccccaagaccgttaaggaaggtctctccaaggctgaggctgaggagatgaaggccaagctggaagaggctggcgctaaggttgagctgaagtaattttcgcttaaactgcaattccccgcaaaactaaaaaagccaaaccaaaataccaagaagccgcccccgggcaaccgggggcggctttttatgttatggctttgatttttaatctgatttttctgtcaaagcggcctttacagctcacagcagaggtacaccgagccgggcatggggttatcattgtaccgctcgatctcgtagaagccctcccgcttataaagagtgatggcctccggcaggaaggggaaagtatccagcaccatctgacggtagccggccacccgggcctcctgcatcagctggtgcaccagcgcccgggcaatgccctggccgcggtattccgggcggacatacagccgcttcatctcgcagcgggtgtcatccagcgccttgagcgcggcgcagcccaccggcgtgctgcccgtacacaccaggtacagccggccgtggggcggggcgtatttgcgggcggggtgggccagctcttcctcgtagtgctgccgggccaggtaccccgcaaaggcgggatcccccgccagcaccatattggtgtattcggtaaaaagctgccggatctcctcctcccgggcatagccgggcaggatgctccattccatattcatcatgtgatattgccttctttctgtaatgcgggatcaattcagctccaccgggacggtgctgccatcagtgagggtgacgctgacacgattgggcaggcagatggcctgctccccttcccgggacagccagccattgtggatgcagaccttatcggggcaatcgctgctgataaaggcgatgcggtggttttttacctccagctgcacctccttgccgtactccgccagcgagatcacctcatccaccgcctgcggcagatagatgccgcgcaccatttggccgtcgatccatatttccgcagtgcaatcggtggtgccgccatggggcagcagcagccacagggcgcagcctattacggccagggccaccactgcccataggatgatcttggttcttttttcgttttgctgcatgttttgctccttttatcgtatccggcggatgactgccgactggccctccagccgacgctcccccgcctgcccgatggtgaataccgtttcgccgtacttggcggcatcgggcaggggcagcggcccctccccgggattgacgcagatgataaattcaccggtttcatcccggcggcgccaggcggccataccagccgcgcacaccagcggctccagttcgccggcggaaagggcactgttcccgttccggagggcggccatctgccggatgcactcccgcaggccggtgtcctcccggccccaggggtaggtgccccggttaaagggatcagcgtagcccaccagcccggcttcatcgccgtagtagaggcagggcatgccgggcagggtcatggtcataagggtgcccagcatgaaaagctgccgcccccggtagtactgcgccaccgtaagggtattgtgagcgcgctgccaatcgcgatcccggtgctgcatgggggtgccgcccagcgcggtgatggcccggggaacatcgtggctggagaggaggttcatcatcacatcccagcaggggcgggggtagtgctccagcagctcccacagccgcagccggaaggcggcgccatccccccgcagcaggaaatccagtattgcctgccgcagcgggtagttcatcacgctgtccagctcatggcccatcaggtattggcggtgctcaccgtaggcttccttgcagctggcgtcctcccacacctccccaatgatgagggcatcgggcttttcggcgcgggccgccgcccgaatcatttttaccagctcatcggggtattcatccaccacatccagccgccagccatcggcgcccagccgcagccagtgccgcacaatgccgttttctccgcagaggaattcccgccagctctcgtcccggctgttgagcttggggagactctggaagccccaccagctttcgtactggtcggcgtcggcgtccttccagcagtaccagctgcggtaggggctgcgcggatcgcggtaggcgccgccggggccgtagcggccctctttattgaagtacaggctgtcgctgccggtgtgattgaacacgccgtccaggatgattttgatgccgtgctcatgggccctttggcacagggtgatgaaatcctgctcggtgcccagcagcgggtcgatgcgcaggtagtcggcggtattatagcggtggttgctgtgcgcttcaaagatgggattgagatacaggaccccgacgcccaaagcggccagctccggcagcttttcggtgatgccggggagatcgccgccgaaataatcattgcagcgaaacacgccgtcggcatcgggggtgctttggggctcctcctgccagtcgcggtgcagccgccggtcggccggaacgccggtcttctccctgccgctgttatagtagcggtccgggaagatctgatacatcacctgcccggcgaatttttgcggaatatcgtaggccttatcgtagacggtaagctgccacagctgcccctcgccgtaatcggcgctgccatcgggcgcgcggtgcagcagggtgccatccgaaaggcggaagccataataataaagccccggctcctgcggggtgtaccgcagggtaaaggcatcgccctgccggcacagaggggtatgcagcaggggctgcggctgcccggcccggtacagcagcagggagggcgtgcggggatcgccctggggcagggtaaagcgcagggtcatttcctcccccgccgccactgcgccgaagggcgttttatgttccgccagcaggctgttaaacatgggtgttgtcctttcgtgtggagataaatctgcgccccctccctggggagggggttggggggtggggcggg

SEQ ID NO: 1160 - DNA, 6347 bp, Unknown
  16S sequences of unknown bacteria
atgcccagatagctcagttggtagagcagaggactgaaaatcctcgtgtcactggttcgattccggttctgggcattctgtttagttaaacagatgggatactagctcaggtggtagagcacttgacttttaatcaagttgtcccgggttcgagtcccgggtgtctcatgactttagaactcttggcgagatagctaagagttctttttttgtttattacttatttaataaaaccccattgacattttatataccgaacggtataataaggctgcacaagagcaggatatcaggattctcatgtattggaataaaaagaagaggtgagcaagtggaaaatcgggaattgattatgcagtgtgccaagacacttttttattcaaaagggtatgatgcggttggggtacaggaaatcgtagatcgtgcaggcattacgaagcctactctgtactattacttcggaagcaagcttggtttgctgaagacactgattgaggtagaatttaaggaatttcgaaagcttcttcatgaggcggcggatatggataatcggatcgaggaagtcctgtatcggctggcacgcaattactgttcctttttcgagaacgagcgggaattttatatgctttttatggctctgttttactcggcaagagaaaatgaggcatatctggcggtgaagccatatgtcacagaattttatgagctggtcgttcggatttttgatcgggcagcggagcagcttggaaatatgaacggacgccagagacagtttgccattgggtttatcggtacgatcaatcattatctcattttaaaatttgaagaaggttccgagaaggggttggccacagaggagatcaatgcggttgtgcggcagttcatgtatggaattttctcgtgatcatgaacttcaaagagattgctcaaaatttaaccggatcaagcaagtcctctgcttcaattacgtgaagtaataagcagtaaagcagctatgcggttaatgacatattaggaggaggaacccgcttgcagggtgattccttatgatcctacaagtagcgaagctggtacatcatactgcaaataactgtaccacataacttgcctgaatttccatctgcgacatcagaaaaacttgacgtagcccgctacgcctgcgtttttcttctttgcagaatgaaaattcattctgcgttattagtccagttaatttttgtatgctgtactaggccctgtcagcagagctacagggatggattgcgaatatccgctttgccgaaaaatagaatgaaaagaggaaaaattgatgaataattggtatgattcagcagtattttatcatatgtacccacttggaatgagcggtgcgccgttgcaaaataaggaaggagaagtagtacatcgttttgatgaactgaaaaaatggcttccacatattaaggcgctcggatgtgatgcgatctatatcggaccgttgtttgagtctacgacacatggctatgatacgaaggattatcggatggttgatcgcagactgggcgataacaaagactttaaaacgtttgtagcagaggcgcatcagatggggctgcgtattgttgtggatggggtgttcaatcataccgggcgtgagttttttgcttttcaggacattcagaaaaatagggagagctctcgctactgtggttggtataagggtgtgaatttcggatggaacagtccgtataacgacggatttggctatgaggcgtggagaaactgctttgaactggtaaatctgaatttgcagaaccgtgaggtaaaggattacttatttgacgtgatccggttctggattcatgaatttgatatcgacggaattcggttggactgcgcagattgcctggattttgattttatgaaagaaatgcgctggatgaccggaaatgaaaaacaggatttctggctgatgggtgaggtcatccatggcgattatgcacgttgggcaaatgcagatgtattacattcggtaacgaactatgagctgcacaaggggctgtattccggacataatgaccacaattattttgaaattgcgcatacgattcgcagacaatttgatgaaaatggaggcatttatcgcggaagggtgttatactcatttgtagataaccatgacgtggatcgtatttattcgaagctgaatgacaagcggcatttgagaccggtatatacattattgtatacacttccgggtgtgccgtctctgtactatggttcagaatggggtattgagggaagaaaggcagatggcggagatacggcactccgtccgcatctggtgctggaggagatggaacagcatccgaatgtgccgggccttgcagagtatcttgcatttcttggaatgtgcagaaaggagtatccggtgcttgcagaaggcgcttaccgagagctgatgctgacaaaccgccagtatgcctttgcacggatcaaggatcaggatgcgatcatcatagctgtgaataacgatgaaaatccggcagagctgtatgttccggttccgttgcaggcggatgagtttgtaaatctggagagtaaagaggtgcttcgggtggaaaatggacggattcgtgtgcagcttccggctggtggaagtgcgcttctggtgccggtcagaagataagcatatagttctgatttgtagtatattttggcaagtctcctgcttttgttgcacagagcaataagcagtggctgggggaagacatcctgaacgcagataagcattccccgcttcaagtgcgcggagcattaagcggcgggtgagggggatgcttatgccagtgggagttgaaagctcccactgacagatcgcgaagcgactgcgttcatgagcaagtagcgaagctaggccctgtcagcagagctgcagggatggattgcgaatgtccgctttacaaagatttctatgggattgagtagcagaataaaaaaggagaaggaaaagatggcagggagaaaaaagactgcagcggcaggcggcagtacaaaacagaaaaaagaacaggaacaatatctgatttcagaattggaccagtatttgtttgggcagggtacacattatgatatttttcgtaagcttggcgcgcatccgatgacgtatcagggaaagaaaggaactgcatttgctgtctgggcgccaaatgcgaagtcggtgcatgtaatcggtacatttaatgaatgggatgagacctcacacaagatgatccgcagggatccgcttggcatctatgaattgtttgtaccagacatcggagaaggggagctgtacaagtttctgatcgaaacccaaaatggacagaagctgtataaggcagatccgtttgcgaattctgcggaatttcgtccgggtaccgcatcgaagatcgcggacatttcaaagatccactggtccgacagcacatggatgactgcgcgggaaaaatttgtgccggatcagagtccgatttccatctatgaagtacatccgggtagctggaagaagcatccgcacggagaggatgagccaggtttttacaattaccgcgagctggctccggtcctgactgactatgtaaaacgcatgggctatacgcatgtagagctgatgggaattgccgagcatccgtttgacggttcctggggatatcaggtgaccggctattatgcgccgacctcccgctatggcacaccggaggattttgcatattttgtaaattatctgcataagcataagatcggtatcattctggactgggtaccggctcattttccgaaggatgcacaggggctggcagactttgatggcacctgtctgtttgagtacgcagatccgcgtaagggcgagcatccggactgggggaccaaggtatttgactatgcaaaaaatgaagtaaaaaatttcctgatcggaaatgcaatttactgggtcgaacagttccacatcgatgggctgcgtgtggacgctgtcgcgtcgatgctgtacctggactatggaagagaagcggggcagtgggtgccaaataaatatggtggaaataaaaatcttgaggcaattgaatttttcaagcatctgaacagcctgatgcttggacgctatccgggcattatgatgattgcggaggagtcgacggcatggccgaaggtgaccggaaagccggaggatgacggccttggattttccatgaagtggaacatgggctggatgcacgatttcctcgaatacatgaagctggacccgtatttccgcagttataatcacaataaaatgacgttttccatgacctatgcatatgcggaaaaatatatacttgtgttgtcgcatgatgaggtcgtgcacctgaaatgttcgatgctcaataagatgccgggcgagtacgaggataagtttgcgaatctgaaggccggatattccttcatgatggggcatcctggcaagaagcttttgtttatgggacaggagttcggacagctgcgtgagtggagcgaggagcgggagcttgactggtatctgctggcagaggaaaagcatcagcagctgcagagttacgtggctgcgctgcagcatttatatacaaaaaacaaggcaatgtacgagctggactgccagccggagggcttcgaatggatcaacgcggacgatgcatacaggagtattttcagctttgtacggcattcggcagacggaaaaaataatctgctctttgtcattaatttcacaccggtgccaaggccggattaccgggtcggggttccgcgcagaaagcagtatcgtctgattctgaacagcgatgagtttcagtatggcggaagcggaaaggagcagccggaagtatacaaggcggtaaagggcgagtgtgacggaagaccatattcttttgcatacgacctgcctgcttatggagtagcggtatttaagttctgatacataaggcgcattgtttttttaatttccacattgccaaaatttgaaaaatagtctatagtatttgtatgattgcccaaatactttgaaaaggacgtgaaacgatgatttcaagccagattttacagaataccattgatgaattgcatggcattacccgggttgactttgccgtaatggatacggaaggaaatgaagtagccacgacaatgcagccagattttattcttccgcaggcagtcgttcagttcgcagattctccggcggacagtcaggttgtacaggatgcgcattttttcaagatttatgatgaaaaggcgctggaatttattcttgtatccaaaggcaccgctgaggatgcctatatgctcggacgagtagcagtcagcgagattcagaatcttatcaccgcttataaggagcggttcgataagaacaattttattcagaacctgctgctcgacaatatgctcctgatcgatatttacaaccgtgcgaaaaagcttcacattgacacggaggtgcgccggatcgtttatctgatcgagacgaaatatgagaaagataatactgcgatggagatcgtcaaagggctgttcagcagtcacacgaaggattttatcacggcagtcgatgaacagagcattatcctcgtgcaggagcttcgggagcaggatgattatgaggaagtagagcagactgcaaacatgctgcgggatatgctcaacacggaggcaatgtccagtgtgcggattgcttatggtacgattgtcaatgagattcgtcaggtgtcccgctcttataaagaagcgaagatggccctggatgtcggtaagattttttacatggagaagtctattattgcctacaatacgcttggcattggacgtctgatctatcagctgccagtgccgctttgccagatgtttatgaaggaggttttcacggagacaatgccggactcatttgatgaggagacattgacgacgatcagcaaattctttgagaacaatctgaacgtatctgagaccgcgcgtcagctgtatattcaccggaatacgctcgtatatcggctggagaagctgcagaagagcaccggtctggatatccggaaatttgatgatgcgctgacatttaagatcgcgatgatggtcgtgagctacatgaagtacatggatcagcaaatgtaaaattcaatatttatacaggtatggaatcagactttttgtctgcaattcgtccacgtctttttggcgtgggcgaatttttttttgctccaaaagcatatttgtaacggaaacggcattcttgaacgcagataagcattcccccgcttcaagtgcacggagcactaagcggcgggtgaggggggatgcttatgtcagtgggagttgaaagc

SEQ ID NO: 1161 - DNA, 3796 bp, Unknown
  16S sequences of unknown bacteria
agagtctgggttatctgacaccggatcaggtgtacggatcatcattcggagcttctgcgtagcctgaactcttggggaggaaaccgcacccccaaggggctaaaagagtctatgagaaagccacccccttgaggtttcggtttcttccccaaacccctctttccacttcctgatctttcggctttctcggatttcatcaatttccattttttacgatgtttttttgagttgtggtttggagttggggtccgctataagcatatcttatcgtgcaagaaaatttaacaatgaattatggaaaagacttcgctcagttctgtgaaccattcgaacgcttgttgaaaggacactcaaatgatgataccgaagcagctacgtaagatcttatcctataagctcgttttattgacgtcagacacattgttctccctgtacacggcgacggcggtatccgatctgctcggaaaagcagctgccggcgtttcggcaagcctttggagctcggttctccggctcgcggcgatagctgtctgctacctgaccctcaagggctttttcggctgttttacgaaaaaacgcgaagccttttcaaagcaggagctccgcttctctctgtaccgcgccttcttctcgattcctccggcggacatatatgcgcttgaggacacaggcgaaatactcgagagcttccgcgacgatttcaataattacacacagctatggtgcgatgtgatccctaccatgataatgtcggcggtttcgtatatcgtctaccttctatacgccgggctcaggaactggaagatatgcgtcgtcatgtttattctgtcgcagctccagattatagttccgcttgtgattgagccacacttttatgacaactacgccgaggaccgcgagtgcgaggcaaaagccacgaacgccgagattgaggctcacaccgctttcatggacatccgcatattcggtctgaaaaagtggtacaccgattatctcgcgaaattccagaacggcgcggcgaacgcaggcaaaaagtacgaatatctctgcggcgtcggaacatctctcgaaacgctcgtgaactcagtcataacatacggcacatacgccctcatcggtctgtttgtcttttcgaaccggctgtcggtcgagaacgcggctctgatgatatatctctccggcatgatatattcagcacttctcgaaacataccagaagatcaccgatctcgctgaaaaccggatggcggcggagagactcaaaaagctgacaagccggagctcagccgaaacatataatgatctgcgccacgccgattcgctcagaattaagaatctgaacgtgcgcgctgacgataaaactatactggacctccccgacttctctgtcgaccccgacgctcctatcgtcatcaccggcgcaaacggctcgggaaaatcaacgctgctgaaggtgctcgccggaatgattctgccggacagcggcgaaatcagcgcgtccggctcaggttcgggcgtttttctcgttccgcagaaggatatgaagctgaaggagacggcgatggaattggttacggaaaacgagaccgagagcttcagaaagtacgcggagaccctcgacctcaaaccggagctgcttgagcgtcctatcgacacgctctccgacggcgaacgcaagaagatatatctcgcgctcgcgttttcgcaggaaaacaaatacctgcttctcgacgagccgaccaatcaccttgactcgcacgccaaagagactctcgcggctattgccgccgcaagacagaaaaagctccttatagtcacccacgacgcggattttcttgaaattctccggcgtggagtagaaaatctccgcgtaaccgaattaaaccgaaaggatggtgcggcagatgcgtgaccgactgaccgagaagacaattgaccgcgatatgctgtcgtcgcttttcaagtcctttctcggaacacatattctcgatgacctcgtgtcgttctttgtcgacgcctatatcgcggtgatactcggcaggctcaccgacgcgataatctcacatgacgcggattatctgaaaaacaacctgatactcatctgcgcctgccttatcttcaaaataatctgtgagccgctgatcttcgccttattttcggcaaaatccgttctgggctcatgcagcttcgcgagaaagctgctgttacattaccttgacaagccctacgagtatatcgccgggaatcaagccggggatattccctcccgtattgacaacgacataatggacttcgtccgcgaaaagctgaaacagaccgcggacagaattctcctgccgtttttcgcggtctgcatgatattcattctgtgccggtataacccattgtacgccgtgatttcgctgctcgcggcgctcgcggcgtataccgcgcccatccttatgcgaaaccggctcgctaaatttgacaaatcaaaccgcgagtatcgctcgtcatataataccacagaaaccgagctcgccgccaacgcctcaacactgcgctcaatggagcgcgaggaaagactgatcgcgggaatggagcgcctgttcggtgaattccgggaaaaaacgctcagacgtgagctgaactgcgcggcgctgtcagatactgtcagcggtatatgccggtttgccgcacggattgtgataatcgtctcgggcgcgtttcttctcggggcggataagatcagctatggagaaatatccaccatgctcgcgctggtcagcagcttttcgtttctctttgacaaggcggcggggctgatcaccgtcagccccatactgaataatctctatgagcggttaaaattcttctacgacgcttctgagcgggtatattccgaaaaagaagcactgccaaccgacagcaggaatattgttgagggcagaaatctgaccgtaagatatgaagacaagacagttttcgaagatttttccttcagcgtgccgaggaataggataacgctcatcaaaggcgcgaacggaagcggaaaatccacactcgtaaaatgtatctgcggcttcgcgagcgtcgcgtccggagagcttctgatagacggtaaacgcccggaaaaagccgctttcggtacgatcagcctggcgtcgcagagctccacgctgttcggctacacgggaatacgcgagaacattcagctcggatgcctcggaaaggaaaacgcggcgcgcgtcgacgcgctgatggcggcgtaccggcttgaggataacggcacggatgtttgcaacctgtccggcggagaggcgcagaaggcgaaaattctccgcgcgatcgtaaatgacgcggagctgctcattctggacgagccggaaaatcaccttgatgaaaacacactgaagcatttgacgcgggagctagcgggacacaggaaaagcgtgctgatcgtctcgcattgcgatggatttgacggcatcgctgataacattattgtcgttggagcagaaacataagttagcgagtagaatttgtggtaacagggctgtttgataaacttcaccaggatataaatcacagactcttgtcatctgtttatatgtggaaggcggggcatcggacagttctgttatcatttgctgttactcctgtatgcgatatacacagcatattttgttttgtaatacttctttttgattccacctaattgggtgtcacgtgtttaacgccttgcgatttggcgccgggattatcctgcccgtaaccttcgagcagattgattccgccccagacacagagcgcggctc

SEQ ID NO: 1162 - DNA, 7754 bp, Unknown
  16S sequences of unknown bacteria
atgtgtataagagacagcattaaattattattgacaaaaaagaatactctttctataatgaaaatagaaggaggttgaatcaaatggaaaaaagcttacattctctgaaaaaaagttctgaattgattcgaaagatttttttgggacttttggtgatttcttctctgtttcttctgtggacggcatctgcttggctttatggggtgttctgtgccgcggagaaagtgcaggtttttcagactgcttccggcgggtggagtctttctgccggatcttttacggtactgattcgtcaagggtattttgcgccgagtacgccaatggaagcgatggcaaaaacaacgtatctgattgaaagcggcatgaatctgtttgcgggccttttccaatggacggtattttttatagctcattctctgtttgataccgtacaggaaaatcctttttcgatccgcaacggaagttatctgcgccggattggtgccctactgtgtttgggagctgttttgcctgaaatcgggaagaccgtcttattcagcgcgttgtccggtggatgctggtcgtttttccccggaggcttaccggtattttctgtacttgcctggttggttctttttgcggtgtcaaaaatttttgattatggatgcgtgctgcagaaagagcatgatgaaacactgtgaggtatcaataaaatggcaatcattctgcgcttagaccgtgtcatggccgatcgaaagatttctttaaacgaattggctcgccgcgtggggatttctacggtgaatttatccaaccttaaaaccggaaaggtaaaagcgatccgtttttccactttggatgccatttgtcaagagctgcgctgtcagccaggcgatattctggaatacaagagaacaggtgaatagtctgcctatttcgagaggcgggcaaaaaaggaatataaaagctgccgaaagatacggtgaaaaatcagaaaacttgtgaggatagaaatgcctgtgagtgccagaaaactacctttgcaggaattcgaaacgccgttctaatggcagcttttgtttgcaggaggaaagaagatgctcgtcattcccggcgaagtacggtatttattaagccgtttagagcaaaaaggatatgaaggttatttggtaggcggttgtgtgagagatgcgctgttgggtctgactcctaaagattgggatttatgcacttccgcgcgtccggaagaagtgaaagcctgcttttatgataaaaaattggtattgtccggttcccgccatggcacagtgggtgttgtactggacggtcacctatatgagattacctcctatcgaaccgaaagcggatacacggatggccgccatccagattcggtgacttttgtgcgcgatttaaaagaagatttggccagaagagattttacggtaaatgcaatggcttatcatccggaaaaagggttgatcgacccatggaaagggcgaaaagatttggttcaaagagtcctgcgatgcgtaggaaaccccaatttgagatttcaagaggatgcccttcggattctgcgcgggatgcgttttgccgctgcatatggctttcatgtggaaaaagagacaacgcgggcagctatttcctgccgggatggtttgaaacagatttccaaagaacgaatacaaacagaattgtgccgctttttgacagaaagcggcacaggaagagttttgtttgctttttggccggtatttgctgttattttgccggaatgcggagaagaggctgaggattggaaaaaactgtccgggtgtcttgaacgggcaagtaccgatttggttatccggatagcggttttgctttctcaatcgaccgacgtgccggctgtgctttcccgattgcggttgcgtaaaaaactttcggctgaggtgcagatgttgctgcagtggaaagaaaatttatctttaccgctgcgggtatcaatgaaataccttttgcgggatttggggcagcaaaacgcacgccgttggattgattaccgatttgccttagaaggggaagcagattgccgccaaaaacggatggaacttctggagcggattttgaccgatgaagagtgcttttctattgagcagttggcaatcaatggtcaggatttgacgggtctgggtttcacagggcctcagctgggagcatgcctatatactttgctggatcaggttattatgggaaaaacaaaaaatacacttacagccttgaagaatgcagcgagtcggcaaaaagaggaccggtaaacgtcatttttttcattgcgggaaagtggcattcacgttataataaagaaaaaagagattttagatccacaagagaaaaacgcaaaaggaggaaataagtatgggaatcatcaaagctgtgctgagtgctgcaggcggtgcactggcagatcagtggctggaggtgattgaaccggatgacatgggagaacatactgtttttactcgcggcattatggttcgtcccagagataagcgggggcaaaataacaaaggaacgcaggctttgattaccaatgggtcagtggttcatgtctatcccaaccagtttatgatgctggtagacggtgggaaggtggtagactatactgcagaagaaggatactatcaggtggagaatacaggtgctccttcgttattcaatggacagttcggtgatgcactggaagaatcctttcgtcggattcaatacggcggcgtgccgtccggtatacaaaaggtatattttatcaacctgcaggagatcaaagggattcgatttggtacccgcacaccaattaactatttcgaccaggcatataatgcggagttgtttttgcgtacccatggcacctattccatcaagataacggatccgctgcgtttttatgcagaggcggtgccgcgaaatcaggagagggtggagattgaggatatcaacgagcaatacttctccgaatttatggaggccttgcaggctgcaatcaatcagatgtcggcagatggggttcgcatttcttatgtaccgtcaaaagggcgggagctaagccggtatatgagcagcattctggatgaagattggaagctgatgcgcggtatagaagtacagtcggtgggaatcgccagtatctcttatgacgaagaatctcaaaagttgattcaaatgcggaatcaaggagcaatgttaagcgatgcggcaatccgtgaaggatatgtgcagggagcgatggcccgcggttttgaggcggcgggttccaacgccaatggatctgccgccggatttgtaggaattggaatgggcatgcagtctggctctgggatggcgtcggctttttcccagagtaatcagcagcagatgagccgccagccggcagtgtctgatggctggaaatgcagctgtggtgcgcagaacggagaaaatgatcgcttctgctcacagtgcggcgctaaaaaaccggagaattgggaatgtccccaatgccatgcccaatgtcagggcaatttctgcgcccaatgcggagaacccaagcctgcggcagaaaagaaatgtcccaaatgcggcaatctgatttcactgacaaatggcaaaatccctaaattttgtcctcagtgcggagaaaggctgtaacaaaaattttgagaaaggcggaaaccggtcatggcggttttaacctataaatgccccaattgcggtgcacagttgatttttcggcccgaatcacagcattttgtctgcgattactgtggcagtcactttactcagccagaacttgataaaatggcgccggttgccggcaaccatgaggaaaataagtcgcgggaacagatggaggcgactgtgtcgtaccagtgtccttcctgcggcgcacagctgatgaccacaggtacgaccgccgctacatattgctactactgtcataatccggtgaccgttagcggccgcctttccggccagtggcagccagatgcgattattcctttttctgtttcagcggagcaggcaaaggaaaaatttatgcaatggtgtaaaagaaatccctttgtagatcgccgctttttttcggagtctcaaatagaaaaactcagcggggtttatttcccgttttggctggtcagcggaaagagcaaagtagctgcggaggcaacggcgagaaatatccggatttgggtttcgggtgaaacggaatacaccgagacaagcgtttattcgctgatccgcgagggtgaaatgagtacgcgcgattatgatattgtggcactaaaccgggaggaaacaacgcttttagaaggaatattgacctatgattatagtcagataaaacctttttcggcagcttacctgtccggatttcaggcggaacgcagaaatcaggagcgctcagacctggaggagcaggtgcgcaataaaatgagagaacacgcaacccgtctgttgcaagaaagttttgacgggttcacaactacttcacttcataactgcgatatagaagaaaaaagcactgattggaaatatcttctgcttccagcgtggattttgacttatcagtaccacggaaaaaaatacttttttgcaatgaatgggcaaaatggtatggtgaatggaaaactgccgatcagcatatggcggatggcaaaactgtttggccttgtcagcggcatctcttttattttgctgacaatagggggatatttcttatgataaagagagttttatgctttttcatttgcctgttgctttttgtcaatatgatttttccggttgcagcaaatcagcagcgggtatacgatgatgcagacctctttaccgtgcagcaagaaactgctttggaagaaaaaatttctcaggtgaaagaacaggctgcgttggatttggtaatcgtgactgctttaagcacgggaaataaggatgcgcaggcttacgcagatgatttttttgacgacggcggatttggcataggagatgataacagcggcgtactgctcttgattgatatgggtgcttctgaagtggcggtttctactacgggatatggaatccggctcttgtccgacgcacgaattgacaaaattctcgatgaagtagtgggatttttgatcgacggagagtcagcgttggcagcacaggcctttgtagaaagagtggcagattatgcgtcacaggatgtatcccagacggtgtctcatgcggagaatgagcaggagaaaacggcacctctccagaagaaaaaaacgattgggcagaccatggctcaaatgttgccaatcagcttgcttatcggatttttggcggttggaatgctttattttacccgaggcaaatcaggagaaacaaagcagcgtccaaaatcctatcgctcttacagttctttgttgttgtgtcgaaaagaaaacaaactggtggataaacatgtgaccaagcgccacctgccacggactagttctccttctggaggcggttctcgcagcaattttggcggctcctctacccatgtttccagaagtggtaggacacatggaggagggagccgaagttttggcggggcctctacccatacgtccagaagcgggcgcagtcatggaggcggcagtcgaaagttttagagaggaagtttcgtgtggaagaaaagattttattttggtcaacactgtgtgatacgttcttgctgtctggtaccatgattggatttggctttctatttcaaaaaggcctccgaaaaatatcaacggcctgtatggctaccggactgcaatgtctatgaaaaaccaggctacatggacatttgcgcatcactatgcgggaaaaattcggttttatagtgggattgccagcctttctctttcgcttgtggtattgtttttattttgccgcacctcttgctttgaaactgtatcgacgattttgatgtttgcgcagctcattttgctagtcggtgttattttgccaacagagagggctttgcgccgaaattttgattctttggggaatctgaaagaaaaaaacgaaggcaaaagaaaaatcaaaacccggtaatcacaccgggttttgatttttatcctatcaggacggactataaaggagagaagaaaaatcgttttcccaaacaacagaaaaggatttaatggatatggttcatttgttcggctaaccagataaaagcttgttcttttcgttgggcaatttgcgtataatgtcctccgttgtgccaaattaatggaatatcccggttcagctggctggataacaaagtttgtgctgtgcgggtacaatctccaattttgcgcatcatcggatgccgggatttttcctcattgcgccctagggacaggtagattcgggcattgggataggtcggcagattcttttccataaaagaaatccagttttcataccataaagaaccggatatgctggcggccagtccaatttccaaatgtaaataaagggcatacaaagctgccagcccacccagagagtagccgcatacggcagtatgcggcgggtcagaaagcgttcgaaaatcttgatctacaaatggttttatatactcggtaaactcctgccaatacgctttggcacctcccgtaaaatcaggagattcccgaaaaacagccggtgcgggccaaggcgttaaatcccgttcccattctgcatggattccgacgaatagaaagggggaaagccccttgcggaattggggttccagcttgccgagtatggatgctgcttcatcctgccgctctccgcatgcgtaaaccacgggatatctcagatttgactgctcgtaattgggtgggcaatagatgaaacaggaccttttataaggagaaaatgaaaaaatggttcctttcaacttttttgccttctttcttccgttctttttttcattatacctgctaaaagtcgttgctttcaacccaaaaccatagttgggattgtttttttctttttattctactatactaaaaatggaaatgggtcggaaaacggcaggttatcgtttttcaatcgcttattttgtaaaaaagtttaatcaacaggagagattattatggcaaaactgcatgtaggagacaaaatgcctttttttacatttcaaacggagtcccaaagcggattgaccaccgaatctgttttgcgcaatgggcgcacggttttttgggtattgcgctacattggttgcaccacttgccgctatgatatccaccaaattgctgcttattatgaggagttccaaaaaagaggcgtgcaggtttatgtcgtgatgcagagtgatccggctgtggtgcgggaagatttaaaggacagtcctcttccatatcacatcatttgcgaccagagtcagatgatttatcagacattagaaatccctgccactgcgacaaaagaagagagaatgccgactttgccagaggatattgctaaactggaggcaaaaaaacaaaagataaaagaagcgggatttgttcacggaaagtatgagggcaatgagcagcagcttcccgctatgtttgttgtggatccggacggcagcgttgtctatgcgcattatgcgaaaaatagcattgatatgcccaccgtagaagaaatgttccggattttagacggactttcagcaccgcaaacaaagtgaatttcagaggaaaagagcggagaatcaaatttgtgattctccgctctttcttgttgcctttaggcttaacaaaacccctggtaggaaccaggggtaaataaaaaag

SEQ ID NO: 1163 - DNA, 7186 bp, Unknown
  16S sequences of unknown bacteria
gcgaattttaaagcacttgatatcctgcccgccaatatccagaataaagtccacatccggctggaagaattttgccgccgtatagtgggcgatggtctcgacgacgcccaggtcggcgtggaatgcgttctggatcagctcctctccgtagccggtgcaggcgcagccgcagatcgtgacccggtcgccgcagcgccggtagatttcctccagctgtgccttgacgagctggacggggttgccctggttggagctataatacgtatacagcagcgcccgatcctgggagatcagcgccagcttggtcgtcgtgctgccgcagtcgatccccagccaggcggggccggcgtaggtcgcaagatccgccttgggaacggtcgcccgggcgtggcgctggcaaaaagcgtcgtattccgcggggcttgcaaacagtggcttgagccggtcgcggccgaagaccattttgcactcccgcagccgccggaccagcacatcaaaggtcacaggcgcctgcccgaccgtcgccgagtacatcgccgcgcccagggccacggcaaagcggccgtacgccgggaacactgccgtctcatcatccaggcccagcgtttcgcggaagcgggcccgcaggcccttgcagtaatacagcgggccgcccaaaaacagcaccttgcccgcgatctttcgcccctgggccaggcccgcgatggtctggttgacgacggcctggtaaatactggccgccacatccgccttccgggcgccctggttcagcagtggctggatatccgtcttagcaaagacgccgcagcgggaggcgatgggatagagcttctccgcctgcaggctggccgcgtccatctccgccaccgtcatattcagcagcaccgccatctggtcgataaacgcgccagtcccaccggcgcaggagccgttcatccgctcatcgacgccgccggtgaagaagatgaccttggcatcctcgccgcccagctcaatgacagcgctggtatccggctccagacagcggacgacctccccggtggcatagacctcctgcacaaaggggatccccgccgcctccgcgacgccgagcccggccgagccggacagggcgacggtaaacggcactgcctccagcagagggcggatttcctcgatcagctccagcgtcttctcccgcacacgggacaggtgccgctcatatttttcataaacgatctggcctgaccggaccaggacgatctttgtcgtcgtcgagccgatatcaatgcccagggcgttttgtgtattcacaggaagcatgccataacctcggttcattcgtctttttctgcgtacaaaagcaggcaggagtgccgtgctttttgaactgactccctcacaattacatactatacacgctatttgtcaattttcattaacttttttttaacattttctttcttagcgtttccttaacacccatcgcttgccgacgcgattttctttttttcgcgcgccgcgtggcatacaataagaccgcgcccgcaggatcgcggcacgcaagaacaagcaacagggagatcgcctatgctaacccaggaactcacccccgcgctttatcaaacctggcgcagcacctgggccgcccaccgggaccgcctgcggcccaaccgtatcagcggcccggccttggaccggtatctgcgccatgcctatcccctcgcgcctctgacagatcccagcgcactgcggatcgtcacggaaaacgtcgcccacaacgccccctgggccagcaagctccctccgggcgtaccgccgcagccggtggcctattgggtccgggactccggcgccggagcggcgctttaccgccagcaggaagcgcccttccaggggcggccgatcttcgtcggcatcgagctgctctccggctttttctgcgtcgagggcagcagcctgctctgggatgaattatacgtccgccggggcttggaccggcaggatctgcaaagcccctactgtgtggcggaatacctggcctgcctgcagcgccagaccgcccggcagcccggtcaaaaagtccttacaagcctttgatcctttcgggcacgccaaaataacgtaaaacatcgcagccaggcccccaaaaaggcgcggggacttggctgcggtgttttgtctggggggccgacccgcggtcagccgcccagatatgcttttttgatggaatcactctgcatcagctcctcgcctgtcccgctgagggtgatccggcctgactccaggacataggcccggtccgcgatctgcagggccatctcggcgttctgctcgaccaagagaatcgtcgtccccgccttgtggagctcggtaatgatatcaaagatctgctgcaccaggatcggggccaggcccatggagggctcgtccagcatcagcagcttcgggtggctcatcagcgcacggctcatggccagcatctgctgctcgccgccggaaagggtcccggcgatctggttgcggcgctcccgcagccgggggaagcggttgaacgcgtcctccagatctgcccgggagaatttcttgcagatataagcgcccatttccagattctcctgcaccgtcatctgcaggaagatccggcggccctccggcacatgggccaggcccttggccaggagcttataggactcgacgtgggtgatattctcgtcgcagaaggtgatcttgccgccccgggaatgcaggatgccggagagggtcttcagtgtcgttgattttcctgcgccgttggcaccgatgagggcgatgatctctccgtcgttgacttcaaaggagacgtccttcagggcgtggatcttgccgtagtatacatttaagttttccgctttcagcataaatcacttctcccccttcttgcccagataggcctcgatgaccttgggattggcccggatctcatccggggaacctttggcgatgatcttgccgtagtccaggacgcagatgccctcgcagatgcccatgaccaggctcatatcgtgttcgatgagcatgatggcgatctcaaaggtatcgcggatgcggcggatgttttccatcagctccgccgtctccgaggggttcataccggccgccggttcatccagcagcaggatctttggctcggtggccagggcgcggacgatctccaggcggcgctgggcaccgtagggcaggctgccggcctgttccttggcgtgctccgtcagatgaaagaagtccagcagctccatggacttctccgccgccaggcgctccgccttgcggtagccgaggccgtgggtcagggaagcggccaaactctcgtgggtggcgttgtgcataccgaccttgacattatccagcaccgacatattggagaacagccggatgttctggaaggtccgggcaatgcccatgcggttgacctgataggtgctcttccccgccgaggagaagccgtcgatcatgatgctgccgcgggtgggcttatagacattggtcaacaaattgaataccgtcgtcttcccggcaccattggggccgatcagaccggcgatctcagtcttgccgacgatcagggagaaatcatccaccgccgtcaggccgccgaagtcgatgcccagatggtgcgtctccagcaccggaacgtcgttgacatcccgctccggcactacggatctactgggatagggaaccaaccgggaggggccgaatttactcatgactcgttacctcctgctcttcctttttttgccgccctgcatgaaacagcttcttcagggacaggcggctcttaaactccgcaaacttgggcgaggcgctcatcagcataatgacgataaggacgattgaatacagcagcatccgatagtccgagaaatcgcgcagcagctccggcaggacctgcaggacgatggccgcgatgatcgagccgcggactgagcccataccgcccagcacgacgatgacgaggatctcgatggacatattatagtcaaaggacgccgccttgacattggcgaagctgtgcccgtagacgacgccggccgcaccagcgaagaacgctgcgatgataaacacggccagcttgaagtacgtgacattgatgcccgtggactccgccgcgatccggttatcccggatggccataatggctcgcccgtatttggacttctttaggttcatcatcacaatgatggtcagcaacaccaggaccgccgcaaagggcagcaggacccgcggctttgcgtagactgcggacatgctcaggcccagcgcgccgccggtgatatccaggttcgtgatgatatttttaatgatctcaccgcaggccagggtcacgatggccagatagtcgcccttgaggcgcagcgccggcaggccgatgagcaagccgaagaccgccgcgaccagaccgccgacgatcattgccagcggcagccgcacgccgatgggcagcgcgtctgccagggcaatggaaaccaggcagccgctgaacaggccaacggacataaacccagcatgccccagggacaattcgcccaacagaccgacgaccaggttcagggagacagccaggacgatataggtggagatcgggatcagcatattggaaagctgacggctggcgcttccggaataggtcaggtaggagacgatgatgtagagaatgacgaccgccaaaaccgtggcggtatttttggtgaaaagctttttcttatgttcgatcttcatactttacaccttctcactcatctgcttgcccaacaggccagtgggcttgaccaccagcaccaggaccagcacgccaaagacgatggcgtccgcccaaagtgtggaaatataagttttggagaattgctcgatcaggcccagcaaaacgccgcccagcatcgccccggggatagagccgatgccgccgaagacagctgccgtgaaggccttgataccaggcattgcgccagtggtcggcttgatgtagacgtaagtcgcgccgtagaaaatgctcgcaaccgccgccagcgcggagccgatggcaaaggtgatggtgatggtccggtttgtgctgatgcccatcagcccggccgcctctttgtcctccgagacggcgcgcatcgctttgccaagctttgtcttattgataaacagggtcagcgcaatcatgatgattgccgtgacacccagagttaccagggtaatgccgtcgatcgtgacctgccccagcttgatggccggaagcttcaggatcgtcggaaatgccttctgctcggagccgaaaatcagcaacgccacattctgcagcagatagctgacgccgatggcggtgattaaaaccgtcaaaggctgggcctgacgcagcggcttataagccaggcgttcaatcacgacgcccaggactgcacatactataatcgaaatcaaaatcgcgatcaccggcggcaggctcagctgcatcaccgctacaatcaccgcatatgcgcccaccataataatatcgccgtgggcgaagttcagcattttggcaataccatagaccatggtataccctaaggcgatcagagcatagatactgcccaggctgaggccgctgatcaaagtctgaacaaatgtaatcataaaaacgcgcccttcaaatttatttttcgcacggcagccgtgccgccggattacgctccggcagtggtcagggctcttgcctgccgtgctgccttttctctttccggcttttccaaaaagccgcgaaggcacagcggcgctgtgccttatttgggctgccaggcggcttgcgccgcctggcggctggtcagtaccccgtctccagcccggcttgccgggctgggcgcacaggatgcgtcattgcgatataaatcgcatttgcgtgtgctgcttactctgcgtacagctccgcaacgccgttgtggatgatcatcgcacgggcagccttgactgcttcgttcgtctcatcccacgtcatggtgccggtgacaccttcaacggtgatctcatacatggccgcgaccagcttgctgcacaggtctgcgtcgtccgaggactcgatcccagccttttcgaccgctgccttgatggcatagactgcgtcatagccgtctgctgcgaactggtcaggcgtggagccgtacttgtcctgataagccttgacgaaggactggacgttttcgtccggggcgtcagatgcgaagggagtcagcatcataacgttttcggcataagcaacatcggagaccttggtcaggatgccgtccaagccgtcgcagccgaagaaggtcttgccgtccagcttgccgctggcctgggtcaggaacgtggaagcctcagccgcatagatggggatgaagaccaggtcgacaccgcttgctgcgatggcgctgatctgggtggagaagtcagtggcagtgtccttggtgaaggtctgctcttctttaatggtaatgcccttttcctcagcttctgccttgaaggacttgaccaggccgacagagtagtcgatgtcgctctgatagaagatggcgacgtctttgggcatgttgttctcgtcgatgaagtcggcggccagcttgccctgggcggagtcgacgaagcaaacgcggaaagcgttggagttaccttcgaggactgcgtcggcggaagccgtcgtgttcaggatcatcatgtcgtcttcattcgccgcggtgacgatcgaagcactctcgccagacagaacgccacccaagcagacattcatgccgctgtcgatcagcttgccgtacgcgttgaccgcgctctcgggatcgccaacggaatcctgatagtcgaccttcagggtcatcccgttgacgccgcccgctgcgttaatctcttccgctgccagcattgcgccgttcttggtggaggtgccgtagttggcatagtcaccggtcagggggccgatgccgcccaggtacagagtggaggcgtcgccgcctgccgtcgggttctggtcggaaccggctgtttccttcttgtcgccgcagccagccatgcacatgaccagcattgcgataacaaggacgatgctaaagagctttgtgagttttttcatcttcgttacctcttttaactgtatatttttcagctgcaatgcagcatgaaatcaaaaaaacaagcggcttgccggaaaagcaaagccgcaaagtatggcagg

SEQ ID NO: 1164 - DNA, 32759 bp, Unknown
  16S sequences of unknown bacteria
gcaccccacttgttatccagtatatcatactgtctaacaaatggggtgcagttcattgcgggccgcttctttggcgcatacatcagttttttggttgattataaaagaaggggagaaagggcacatcttccacctggaaggtcttgcccttgagataggaaagctctccccagtctccttcctgggaaaaatggagcttgtaggaatacagggcctggtgggtcatgccgtaggggcgattgcgctccatggtgccgtacttggtgtcgcccaccaagggccagccacgatgggacatctgcacccggatctgatgggtgcggccggtgaagagctcacactccaccaaggagagcttgccccggctttgcagcactttatagctcatggatgcggtacgggcgccgggggtgttctttttcaccacccgcacctggttttgtttgctgtctttcaaaagggtatcctggatgacggcctgccggggagagggagtgccatggaccaggcaaaggtagaatttctgcacctggtgcagccggatcttttcgttgagcacccgcagaccttccgctgtcttggcggccatgacaatgccgccggtgttccggtcgatccggttgcacaaggcgggggtaaaggattgctctttgtccgggtcccattctcctttttcatagaggtaggccttgatgtggttgatcagggtgtccagcgtgccctggtcgtcttcgtgaaccaccatgcccggacgcttgtcacacagaaggatgtgatcgtcctcatagaggatgtgcagccggggagtgatccggcggaaggcttcctcttcctttacaggctggaaaaactcatcattgatataaagggaaagcacatccccctcggtcagccggtcgctggtctggcagcgtttgccgttgcatttgatccgcttgaggcgcacatatttgtgcatcagggagggtggcagtgagggcagggctttttgaaggaacttgtccagacgctggccggcgtcgtttttgccgatggtcatctctcgcatggcgttctcctgtcgggttgtttttttcttaaagttgtggtatcattatacaccagcggctgtcttttgcaaacaggccgcctgaagccagggtgaaaaattgggaaatgtgggttttttgaaactatttcttgacaaaccctcggcagaacactataatattcgatgtatcattgtgggaggtgtgtatttgtgctgctcaacctccgtgatgtgctggcttccgaggggatgtgtctgccctttgattatgccttttccctggcggaagaggagctttatggggagcgtccgtttcaggggccggtgaaggtccaggggaaactggaaaacaaggccgatgtgttttatctcactgccgccgtttcagttcccgtttccacccgctgcgcccgctgcggcaagccggtggagtatgtgaaagatctggatcttgcgttggtcatcacccagacggtcagcggcgatgatttggccgaggatgtgtatgtggtggaaggggacagctttgagctggacgacatcgtccgggaagagctgcttctgcacatggaactgacagtgctttgcaaggaggattgcaagggactgtgccccaagtgcggccacgatttgaacgaaggagactgcggctgcgaccgcagggagatcgatccacgccttcaaaagctcacacagctttttcaggaataaataatatgttttcatagatcgaggaggtgtcaccgatggcggtcccgaagagtaaaatctcgaaacagagaagagacaagcggcgtagtgcccactggaagctggaagttcccggtatggtcaagtgccccaagtgcggcgaactggtcatgccccacagagcatgcagaagctgcggcacatataaaggccgtgaggtcctcaaagtcgaggtcagcaaataacacacgcatgaaagatagagaggggacaccaccttctctattttttgttatgtggatgtttttgaccaaatgtttgccgaaaaggaggaacggcctgtgcccgctaagattgtgcatgtggatcaggacagtccggctgagaaggccgggatctccgctggatggtggctgcaaaagatcaacggccatcccatccgcgatgtgctggattacaagttttattcctatgacagccgcctggagctgactctgagccaggagaaggacggggagcaaaagtccctttccatcggaaaggccgaaggggaacctttggggctggattttgagacctatctcatggacaagcagcgcagctgcgccaacaaatgcgtcttttgctttattgaccagctgcccaaagggatgcgctcttcgctgtatttcaaagacgatgacgcccgtctctcctttctcatgggcaattatatctccatgaccaatctgagtgaggccgatgtacagcggattatcgccatgcacatttccccgctgaatgtgtccatccacaccaccaatccggatcttcgcagccggatgctgggcaatccccggggcggggagagcctggaatacctccggcgatttgctcaggccggactcaagatcatgggccagatcgtggtgtgccccggctggaacgatggggaagagctggagcggacgctggaagatctggcggccatgcaccccagcatcgcccatgtggccctggtgccggtgggcctgacccgtcaccgggaagggctggagccgctgcacccggtggatcgggaagaagcccggcagatcatcggggtggtggacaaggctcgggcaaagtgcctgaaaacttacggcgaggcttttttctatgcagctgacgagttttatctcaaggcaggatggcctcttccgggggaggaatactataacggttatccccagctggaaaatggcgtggggctgatgtctctatttcgccaggaactgcagggggcgctgctgatggctgagcccacggaaaatcccccggctttcctgatcgccaccggcatgtccgccgctccctttatggaagaaatggtggcgctgtgcaaagagaagtgcccgaacttgcagggacgggtgcagccggtgaaaaacgactttttcggccacggtgtggatgtggccggtctgctcaccggcggggatattatccgccaggtgaaggatgtgctccggccgggagaagaactgtggattcccgactgtatgcttcgccacggcgagaccgtctttctggacgatgtgtcggtggaggaaatggagcagaaactggggacaaaggtgcgggtgctgccggtggacggcggcgccttctgtgacgccatcttcccctgggaagaatagagagaaggcggcttccatgccgttaagatcgaaagggggcagctatgcgaaagcctgtcattgccattgtgggacggcccaatgtgggcaagtccatgctttttaaccggctcatcggccggaaacagtccattgtggaggatactcccggcgtcacccgggaccggatctatgccgagggtgaatggcggggccgggtgtttgagcttatcgataccggtggtatcgagcccaaaaccgacaacgaaattctgaaattcatgcgggagcaggcgctgattgccattgacaccgccgatgtgatcattttcatcaccgatgtgcgcaccggcgtcaccgctgccgaccaggatgtggccgccatgctcaagcggtccaaaaagccggtggtgctctgcgtcaacaagctggatgctcccggcgatccgccggcggagttctatgagttttacaacctgggcatgggcgaccccatcggagtgtcggccatccacggcaacaacaccggcgatttgctggatgcctgctatgatcattttcctccggataccggagagagcgaagaagaggagaactgcatccgggtggccatcatcggcaagcccaatgcaggcaaatcctctctgctcaaccgcatcgccggggaggagcgggtcatcgtcagcgatgtgcccggcaccacccgtgacagcatcgaccagcgggtcagcaacaaatacggcgattatatcatggtggataccgccggtatccggaaaaaagcccgggtggatgaggatattgaaaaaatcagtgcgctgcggtccattatggctattcaacgggccgatgtgtgcctgattatgatcgacgccatccagggcgtcaccgagcaggataccaaagtggccggttatgcccatgaaaacggcaaggccgccattattgtggtgaacaagtgggatctggtggaaaaagagaccaacacccagcgggaatttgagctgaaggtgcgggaagggcttgcttatatgcagtatgccccggtgattttcttgtcggcccttaccggtcagcgggtggagcagctgttccccctgatcaacaccgtggcccagaacaatgccatgcgcatcacaacaggcactttgaataccattctggccgaagcaaccctgcgggtgcagccgcccacagacaagggccgccggctgaagatctactatatcacccagacggggatcaagccccccacttttgtttgcttctgcaacgacgcccgcctgttccacttctcctatctccggtatctggaaaaccggatccgggaagtcttttctctcacaggcactcccatcaagatgattgtgcggcaaaaaggagaagaataggcttcattttcctgttttgcagtttacaaaccggtaccctttgttgtaaactggatgtaaattgaccatcaaaatagttgaggggggagaagaaatgtttccgcacagcctgtgggcctgggcgctggccttggtctgcgcttatctgatggggtctttcagcacatccatcaccgtttccaaacttttttacaaaaccgatatccgcaagatgggcagcggcaatgcaggagccaccaacaccctgcggaatttcggagtgaaaaaggcattgctggtggtgctgggggatggcctcaaagcggcgctggccatggtgctggctaaaatcctggtggggccgcaggccgtactctatgcaggatgcgtggcagtgctgggacatatcttcccggtgtattatggattcaaaggcggcaaaggcgtcatgagcgccgccgctatgatcctggtgtttgactggcgcctcttcctctttgttctggccgtctttttgctggtggccgtgttcacccgctatgtgtcgttggcttccataatggcggcggtggcctttgccgcagggctccttgtttgctaccgggatcattccggctatctggcagcgggcctgtgtacggcggccattgtggtctggaagcaccggagcaacatcaaacggcttttgcacggagaagaatccaagctgggtaagaaaaaatagatccattttcagcagggccatcgcggccggaggttactatgaagatttctgtcatcggttcgggcagttggggcattgcggccaccaagatgctcagcgaaaacggccacgatatgactctgtggtcttttgatcccaaagaagcggcccttttgcaggaaaaacgggagaatcccgcactgctccccggcattcttctgccggagcgggtgcaggtgaccaccgatatcgcctgtgtgcagggggccgatatggtggtggtggcggtgcccagctttgctgtgtttgaaaccgcccagaagatgcggccctatgtgagcaaaaaccaggtgatggtgcttttgtccaagggctttgataaaaacagcggttattctctcttgtccgatctgttggagcgggtgttcctgggcgaggtgccggtggtggccctcacaggaccttcccacgccgaagaagtgggaagaggcatccccaccgctgtggtggccgcttccgtgaaccagcaggcggcggccctgacccaggaggcctttatgaacccggtattccgggtgtataccaccccggacattgtgggagctgagctgggcggcgccatgaagaacatcatggccttggctgtgggcatcagcgatggcgccggttttggcgacaacaccaaagccatgctgatgacccggggtatcatggaaatggcccgcttcggcgtggctctgggtggacggcccgagaccttcaccggcctttccggcgtgggagatctgatcgtcacctgcatttcccagcattcccgcaaccggcgggctggattgctcatcggctcgggggtttcgccggaagaggccatccagaaggtgggggccacagtggaagggtattttgccgcccaggccgttcatgccctgtcccaggggaaagacctggaactgcccatttgccaggcggtttacggcctgctctatgaaggcaagcctttggatgaaaccgtgcgggccctgatgacccgggataaaaagagcgagacccaggaaagctggatgcagcatatcaactggtaaaagaacagcctgcccggaaaaccgggcaggctttttgtgtataacaaagaaaggaaaatcaaaaaccctctgccaaagcagagggtttgatgtttcacacatattccagggaaaggtcttagatagctctagtgaccttgccggaacgaaggcaccgggtacagacattgacatggctgggagtgccgttgatcagcacttttacacgcttcacattcggcttccaggtccggttcgatcttctgtgtgaatgggagactttgatgccgaagctgacgcccttgccgcaaatatcacactttgccattttctctgcacctcctttacccataagctacaaagcgacacaagctatattaccacaactgttttttaaaatcaaggattattcgaaaaaaatcattctgttgccaaattttatttcatcccctataatggaaacagaaaggacaggccgcgtggccgattttaaaaggaggtttttggcgatggagaaaccctttgtcaaactgcatcagatcatcgatgagtttcatttgaatctgttttatgcgccggcgggctgtctggagtcccatgtgaccagcatggatgtgtaccgtccgggcctgcagctggtgggcttttacgatcattttgacgccggcagcatccaggtgctgggaaaagtggagtgggcttttttgcagggactggatccccatcagcgggaaaaggtctttgatcagctgtttgaaaagaaaattcccttgctcatttttgcccgggattatcagccttcccctgagtgtctggccatggccgaaaaatatggtgtgccggtggccggttcggcagaatataccaccgacctgatggccgccatgacctcttccctccatgtgcacctgggccccaccaccacccttcacggcgtgctggtggaggtgtacggcgaaggcattctgctgctgggcggcagcggtatcggcaaaagtgagaccgccattgagctggtcaagcgtggccatcggctgatcgccgatgacgccgtggacatcaaaaaggtgtcggccaagacgctggtcggttcggcgccggaaatgatccgctattttatcgagctgcgtggcatcggtatcatcgatgtgcgccgcatcttcggtatgggctcggtgaagcccaccgaacgggtggatctggtggtgcgtctggaaaaatgggaggacggcaagccctatgaccggctgggcgtggacgaagagaccatgaccatcctggatatcaaggtgccggccctgaccattccggtgcatcctgggcggaatctggcggtgattttggaagtggccgccatgaacaaccggaacaagcgcatgggtcacaacgccgccaaagagctgagcgacaagctgtaccgcaccatgctggcccagcagaacccagaagaaaacgattaaaccacacctgcccaagggcggactggatgtccgccctttttctttcccgtgggcgggagaaatctcccctctccactaccaatggagaggggtttgtgctataattatagtagaatattgtgcgcattgggaggacactatggaacagaacaattccttgagccaagccgctgaaaaagaagatatcaagatctattgggatgaacccatgagccgtcatacaaccatgcaggtgggcggccccgccgccatgctggcccagccccgggacatccgggagctggtgagcctggtctatctggcgggaaagaacaacttccgctgcatggtcatgggcaatggctccaatctgattttccccgatgaggggtacaagggactggtaatcaagacagtgcccaattatgggggcatttatgtggatgacgacggggtgatccgggcggaagccggagcacttttgtcccaggtggccatggtggcggctcagaacggcctcaccgggctggaatttgcccagggcattcctggcactgtgggcggtgcgttgtgcatgaacgccggggcctacggcggagaagtgggaaatctggtgcagcgtacctgctatatggacgcaaatgccaaactgcatatgctggcgcctcaggatcatctgtttggctaccgcaccagcctgtttaaggaaaagccgggaaatgtggtgctttacaccgagttcaagctccaaccgggagaccagaaggaaattcaggagaagatgagcgattacgccgcccgccgccgggagaagcagcctttggatcagccttccgccggcagcgtctacaagcgccccgaaggccactatgccggggaactgattgagcagtgcggcctgaagggatatcagatcgggggagccatggtttctcccaagcatgccggattcatcgtcaacaccggcaaggccactgcatccgatgtgatcgctttgatggagcacattgaggaagtggtgctggaaaaaaccggcgtttctctggaaagagaagtgcgggtggtgacccaccggcggtaacggtcgccgagacgatgtctggaaaggagtgtggcttttcatggaatgtttgattatatcgggcatggccggcgcaggcaagagcatggcggtggatgtgctggaagatatcggatattactgcattgacaatatgccggtttccctcattccccggtttattcagctgtttgaaaaaagccgggagcaattcgaccgggtggccctggtggtggatgcccgcagcggtgacggctttgaggagctgtgtcaggaactggacgatgccagagggccggatttttcctaccggatcctgtttctcgacgcccgcaacgccattttgaccaaccggcacaaggaaagccgccggcgtcatcctttgcagacggcggacatggatctggaacaggccctgcaccaggagcggcgggtgctggaacccattcgccgacgggcggattttatgatcgacaccagcgccttgcttcctgccgatttccgggcctatctggtgagtttgtttgccggtggggaagaagggggcaacatggtcatttccatcggctcctttggcttcaaacacggaatgcccggggagtcggacatggtgtttgatgtgcgctttctgaagaatccttactatgtgccggaactgaaagacaaaaccggcctggatcaggatgtgtttgactatgtgttttccgacccggcggcagaggatttctgcgagcgggtctgttcgctgttggaatttctcattccccggtatatcgaagaggggaagatgagcctggtggtttccatcggctgcaccggcggtcagcatcgttcggtgtcggtggcccggcatctgggccagctgctgggcaagcatgcccggaatgtgaccgtgcgccatcgggatgtgaaaaagcactaggaggccggtggtatgctgcaaaaccaagtgccccatgatctgttgcgggccgcccgggcggcgggacgcaaggtggcggccatcggcggaggtaccggcctttccacgctgctcctggggctgaaagaatacaccgacaacattactgccatcgtcaccgtcaccgatgatggcggcggcagcggcgttttgcgggacgaatacgggatgctcccgccgggggatatccgcaactgcctgctggcgttggccaacaccagcgatgccatgaacgagctgctcaattaccgtttccccgaaggttccctcaagggccagagcttcggcaacttgtttctgctggccctcaatggggtgtgcggctcttttcgcactgccgtggcccggatgaatgattttctggcggttacaggccaggtcttgccggtgaccaccagcaatgtgagcctgtgtgcccagtttgaagatggctcctgcgtcacgggggagaccgccatcaccaaggctaaaaagcagaacaatctggtgatccagaaggtggggctcaggccggaaggggccaaggccttgccggaagtcatcaaggccattgatgaggccgatctgattattctggggccggggagtctttacaccagcattatccccaacctgttggtggatggagtgtcggaggccattcgccgctctcaggggctgaaaatctacattctcaacatcatgacccaggacggcgagaccgaggggtacagtgcttcggatcatctcaaggctttgatgagccacggcggcaaagccgatgtgtgcctctataacaccgaccgggtggcccgccggctgctggaaaaatacgccggtgaaagcgcccggcagctgtggccagacccccgggagttccggcagatgggggtggagctgacgggggaatccattttgtcccgggacgctcactttgtccgccatgacccattgcgcctggcctatgcggtgatgaagaccgccgcccggctggcgccccggcagcaagtgctgcgctattatgacgaattgatgctgcggcaggaggaataagatgtcctttacacaacagatcaaagaagagctttgccgcctggggccgggcaaggactgctgcgcccgggcggagtgttatgggatgctgctctttgccgcggttttctcccaaagccgcctgcgggtacacagtgacctggcggcggtgcgggggagagtacggcagcttctccgccggtgtgccggtgtggagatctctccccggcccgatgggaccaacgccttggttttggaagacccgccttctttgcggcgggttttttccgcctttgggtatgaatttgaagggaccgcccttcatctcaaccgggcggtggtggaggaggactgctgccgcatcgccttccttcggggggcttttctcaccggtggatatgtgtcggctccggggcgagggtatcacctggagctggtgacctctcattacaatgtggcccggcagacggtgcttttgttggaggagatgggcctggcatgcggtttcgtttcccgccgggggaattttgtgctttactacaaagacagcaatgtgattgaagatatcatcggccgcatgggggccccgggggccgccatggatttccggctgcggaaggtggaaaaggacttccgcaacaacatcaaccggaaggccaactgtgagacggccaatctgggaaaaacagtggaagccgccgcccgtcagtgtcatgccattggcaaattggaaaaagcgggacagctggagcagctgcccgaaagcctgcgagagaccgcccgggtgcgtctggagcatccggaagagtccctcgccgagcttttgcagcattttgatccgcccctttccaaaccggggctgaacaaccggctgcggaaactggagcagctggcggccaaattggaagattgagaaaaggcaaaggaattgggagataaagatactatggccattgattttgtccatttgcatgtgcacagcgtgttcagcctgttggacggcgcctgccctgtggcggaactgccccgcagagccaaggagctggggcagcaggccctggccgtcaccgatcacggggtgatgtacgggtgcattgatttttataaagcctgcaaggcggaaggagtccatcccatcatcggctgcgaggtctatgtggcgcctcgcagccgctttgacaaaacagcagaactggacggggaagcctatcacctggtgcttttgtgccaaaatcagaagggatatgaaaacctgatctatctggtgagccagggcttcctccaggggttttacaacaagccccgggtggactggaatttgctgaaagaataccacgaagggctgatctgtctgtcggcctgtctggccgggcaggtgccccggctgctggatcaggacaactatgagggtgccctggagcttgccacacaataccgggatctgtttggcccggagaactatttcatcgaggtgcaggaccacggcatcccggaacagaagaaggtcaacgagggcctgtgccgcctggccaaagagctgggtgtgggattggtggccaccaacgacgcccactatctcaagcgggaggatgcctccagccaggatgtgctcctttgcatccagacgggaaaaacggtggatgaacccaaccggatgcgctttgaaggggaagaattctacctgaaaagcggagaggagatggcgcagctctttccggaggacaaattccccggggccatttctaatacggtaaaaatagcagagcgctgccaggtggagttcgatttttcagagcagcacttgccggcctttgatgtgcccgaaggctatgacgccgaggggtatctgcgtcatctggccgatgagggctttgcccgcttgtatcctgacaaggatgcttcctaccgggagcgtctggaatacgagctggacatgatctgccgcatgggctttaccgactatttcctcattgtgtgggatttcgtccgctttgcccggtcccgggatattccggtgggccctggtcggggtagcgccgcaggcagtatggtcagctattgcctgggtatcaccgacatcgaccccatgcggtataacctgtatttcgaacggtttttgaacccggaacgggtgtccatgcccgatatcgatatggacttctgcggcgtgcggcggcaggaggtcatcgactatgtagtggaaaaatacggagaagaccatgtagcccagatcatcaccttcggcaccatggcggccaaggcggcggtgcgggattgcggccgggcgctgaacatgacctatgccgaagtggatgcggtggcaaagctggtgccccaggaactgaaaatcaccctggacaaggctttgaaggtctcccgggagctgcgcagcttgtacgaaagcgacgagcgggtgcacacccttctggacaccgcccggaagctggaaggcactccccgcaatgcctccacccacgccgccggtgtggtcatcaccaaagagccggtgcatcgctatgtgcctctggccaaaaacgaccagggtgtcgtcactcagtacatcatgaccactctggaagagctgggccttttgaaaatggattttctggggctgcggaacctgaccatcctgcatgacgctgtggaactggtgaagcaaagcggggtggagctggatctgcacaatatcgactatgaggacaaaggggtctatgagatgctctcccagggcaagacctccggggtgttccagctggaaagcgccgggatgcgcggggtggtggtggccatgaagccccattccatcgaagacatcaccgcggccatcgctctgtatcgcccgggccccatggccagcatccccacttacatcgattgcaagcatcatccggaaaaagtgcagtacaagcatcccctcctgcgggacatcttgcaggtgacctatggctgtaccgtttaccaggaacaggtgatggagatcttccgccgtctggccggttattctctgggaaaggccgacctggtgcgcaaggccatgagcaaaaagaagatggatgtgctgaaaagcgaacgggagaactttatccacggcaacaaggaagaaggcattgtaggttgcgtggccaacggcgtttccgaagaggtggcttcccagctctttgacgatctgctggacttcgccaattacgcattcaacaaagcccatgcggtgtcctatgccgttttgtcctaccagactgcctatgtaaaataccattatcccaccgaatatatggcggccctcctcacctcggtgctgggggacagcgccaaggtgtcggaatacatcctggaatgccgggaaatgggcatcaccatcctcacaccggacatcaaccaatcgggggcggacttcaccgtccgggacaagaccatccgttttggtcttgcggcggtgaaaaatgtgggccggagctttgtggccgctttggaaaaagagcggcagagcggcggacctttccgctcattcagcgatttttgctcccgcatggtggagaccgatctgaacaaacgggctttggaaaacctcatccgctgcggcgcttttgacagcttcggccatcgtcgctcccagctactgcgggtctatgaacaggtgctggacgcttcggtgagcgaacggcggaaaaacatcgaaggccagatcgatctgttcggcatggcccaggaagaagaagcggcggaagtggaactgcccgacatcccggaatatcccaagcgggagcttctggctatggaaaagcagaccaccggcatctatctgtccggccatcctctggacgagcagggggagctggtgaaacaggtgggggccacccccatcggccaggtgctggccgcctttgccccggaagaggaagagggcatgggaagagcagaaagcgatctgcgggatgggatgtacatcactttggctggcatcgtttcggcggtcaagctgaagaccaccaaaaacaacaccaccatggcctatgtgaccctggaggaccggtcggggagtatggagctgctggtgttccagaaggccatggacagcgcgcccggggcttttgtagaagacaacgccctggtggtgtatggccgtatttccgcccgggaagatgaagcgcccaagctggtctgtgaccggtgcgctgtcctcaccccccagagtgcagcagaatggcagaataaaaacagaaatagtggatggagaaatgcctcccgcgggccctctccacggcctcaggtccgggagacgaaggaaggggcagaaaaggagccctccggcccccggctgtatctccgcttcagcggagaaaacgccccgctattggaacagaccaaggcacttctgcgccaaagccctggtcagacgccggtagtcatcttttacagtgataccggcaagcggttcctggcccggcaggagctttgggtcacaccgggggagggactgatccagaacctgggcggactgctttctccccagaatgtggtgcttcgatagaaaaagggaaagggaacaaaaataaatgacggaatttgatatcaaatacagcgccttgcgcaaatccatcctggaagaggatttttccgggctgaacgctatgcagcgggaagcggtgttctgcaccgaagggccgctgttgctgctggccggtgcgggaagcggcaaaaccacagtgctcatcaatcgggtgatcaatctgctgaaatacggcagaggctacgaagaggaaacggctcctgtgggagccaccgaagaggacttaaagcgcatggccgcttatctggcccagccggaggatgtgacgccggaagatattgtggatctgtgcagcgtagaccctccccgcccctggcagatcatcgccatcacctttaccaacaaggcggccggggagctaaaggaccggctggaaaaggcctgcggcgccatggccgaggacatctgggcccacaccttccattcggcttgtgtgcgcattctccgccggtatggcgagcggatcggctacggcaacttcaccatttacgatgaagacgacaaaaagaaaatgatgggccaggctctgcgggagctgggctatgatgaaaagaagttcgatctgcggggagtcatcagccagatctcccgggccaaggacaaactaatcaccccccggcagtatcagcagcaggccggagacgactattaccagaaggccgtgggccgtatttacgaagaataccagaaccggatgcgccgggccggggccatggattttgacgacatcattatggagaccgtccatctgctccaggagtgcagcgatgtgcgggagcactaccagcgtcagttccgctatgtgctggtggacgaataccaggacacaaaccacgcccaatatgtgctgtgcagcctgttggccgggggctatgggaacatctgcgtggtgggcgacgatgaccagagcatctataaattccggggggccaccatcgaaaacatcctggaatttgaaaagcagtacgaaaatgcccgggtgatccgcctggagcagaattaccgctccaccatgagcatcctggaagcggccaacgaggtgatctcccacaacaccgcccggaagggcaagcgcctgtggacagaaaacggcgagggggacaagatcgtctatttctccggagacaaccaggaggacgaagggcagtttatcgccagcgagatcctcaaaggttatgggaaggggcagaaattttctgatttcaccgcgctctaccgaaaccatgctttgtccaacagcatcgaaggggctctcaagcgcaatgccatcccctaccggatggtcagcggcctgcggttttttgaccgggccgaggtgaaggatatgctggcctatctgtgggtcattgccaatccttcggacggcatccgtctgcggcggatcatcaacaatcccccccggaagatcggcgccaagaccctggagcatgtagccgatctggcgtccatggaaaataccgacgatttctctgtgataaagagagcaggggaatatcccgatctggcccgggccaaggacagtctggaggcctttgccaggatgatcgagagcttgcaggacaaggcacacgatctgtctttgggcgagctgtatgacgccttgctggaagagagcgggtatctgcggatgctgcgcagtcaggagaatattgaagcccagacacggatcgaaaatgtgatggagctgaaatccaacattgtggagtttgaaagcacccacgaagggggcactttgctggactttttggaagaagtggccctgtttactgatatcgaccggtacgacgagcaggccgacgccgtcacgctgatgaccatgcactcggccaagggactggagtttgacacggtgttcctctgcggtatggaagagggcattttcccctcccatcggagcatagacagcgacgaagaactggaagaagagcggcggatctgctatgtggccatgacacgggccaagcgaaagctttacatcacttgcgctcagcggcggatgctctatggtcagacttctttttgccggccttcccggtttatcggggaagtgccggaggagtatatggagaaaaaggcgaaggcccgtccggctcctcagcgccgtcaggccgccagcatccgtcccactgtgcagaaaagctttacctcggccttctccggcaaagccaaggaggcccagaaggatctgccctctgtgcgccccggccaggccattactcacaaggcctttggggatggcgtggtgcaggcctgcacgcctatgggcaacgatgtgctgatggaagtgaagtttgccgaaggtacgaaaatgatgatgctgcgcacagccagccagttcatcaccatcaaataaaggaggaaaccctatgatccgtcccatgcgtctaggaaaccgggcgatggaagagaaaaaagcccggaaactgctggcagaatgtgaatatgccttgtttaccacagtggatgaagagggagcgcctcacaccgtgccggtctctccggtggtgttgggaaatgctttgtattttcattgcgctccggcgggagagaagctggacaacatccagaagaatccccaggtttgcctgtgcgccctggggcgcacccaggtgctgcaaaaggaaatgaccatggcctatgaatcggtggtggcccagggaaaagcccggctggcccagggagaggaagcacggcgggcccttttggccatttgccagaagtattctcctggttatgaaagcgagtgggaaaaggagatcgaaaagttccccatggtgcaggtggttgccgtggacctgatccatatcaccggcaagagtaaccgcctgtgatggaaaaagacctgccggaaaggggcagctggtgcctgtacatcctccgctgcggcgatggcagcctgtataccggcgtgaccatcgatttgccccggcggctccgggcccatcgggaaggacggggggccaaatacacccggagccggggagaactgacgctggtttactgggaaagctgtcccagccaaggcgatgccttgcgccgggagcggcaggtaaaaaagctgaaaaggacagaaaagctgaagttgatccaaattcgctccttttctccgggggaaacgcagcccgaagaaaagaaagcagagggaaggggagaagccaacatggaaagagagattttgctgctgggagatcccaggctgtaccaggtttcccaggaggtcagggaggaagagctggagcagctgcgtcccatgtttgaggatatgtttgactgcatccggggcattcgccgggattacggcttcggaagggccattgcggccccgcagattggggtgcacaaacgggtgatttgtatgctcaccgacaagccctatgtgatcatcaatccccagctttccttcatcggtgaggaaaccatggagctgatggacgactgtatgtctttccccgggcttttggtccgggtacgccggcatcgccactgtttgctgcgctaccgggacgaaaactgggtggaacaggaaaaacagatggacgatgacatggccgagctgatccaacacgaatacgatcatctggatggcatcctggccaccatgcgggccattgacaaccggtcttttgtgatgaagaagcggccataggccatagtttggtcctgagaatgaagaaggaagaacaaaggaggaactccccgtgcgctatgatctggcccctctggaggggatcaccggccctctgtaccggcggacgcaccatgaaatcttcggcggcgccgatcggtactataccccctttctttctctgggagaagggggcacgctgaacaaaagagagctgcgggacatcgcccctgaggaaaaccaaggtctgcctttggttcctcagctgctcacccggcgcagcggggattttatcggtgcggcccgcaggctgggggaactgggctaccagcacatcaatctgaatctgggatgtccttcggggaccgtcaccgccaagggcaagggatcggggtttctggcccatccacaggagctggatcactttttggaagaaatcttttccgccgctctgccggtgaaaatttcggtgaaaagccggttgggcatgacttcggaggaggaatttcctcccattctggccatttttgaaaaataccccctggaagagctgattttgcatccacgggtgcgtcaggatctttaccgaaaaccggtgcggcgcgaggctttccgatgggcggcagaacacaccagcctgcccctttgctataatggggatctggtgacagcggccgactgcgcccggatggagcaggagtatcccatgctgcgggggttgatgctgggacgaggggccattgccgacccggcggtgttccgcaaggccaaagggggcaaagcggcccggcgggaagagctgcggctgtttcacgataccctgtatcaaggatactgccaggcgttccaaagtcccaaaaatgccatttgccgcatgaaggacatctggcggtgcatgattttcctctttgaagatgagcagggattgggcaaggcccttcgcaaggccacagaaccggctgattatcagtgggctgtggaagggattttccgcctgcccttgcgggaggatgccaaagaaccctggtgactcgtcctttccccaaagtctttttggctttggggaaatttttttgccatgaggaagcaaaaggccaggacaaggaatccaatggttgaaaggaggaagcgggatggagcaggaggaaaagaaagccctttttcagaagatgctggaggaagaaggagatcggcttttgcggatgtgtaccctctatctgaaggatcggaatctggcggaggatgcggtgcaggaaagctttttgcgggcttttcagcacatggacgaatttcggggtcaggcagctatggccacctggctgacccgcattgccatcaatgtatgcaaaggctatttgcgctcgccctggcattggcgccgtctgccctctcaggtgctggaacagctgccggcccctggcatgccggagaccgatgacaccttgccccgggcagtgatggctctgtcccggccctaccgggaggtcgttttgctttattactatcagcagctgaaggtgagggagattgcagagattctccgtatccccttgtccacagtgacggtgcgtctgtccagagcccgtcgtcagctgaaagagcagctgaaaggatggtattacgatgaagaataagcgggattttcgtcaggatatggatcaggccctgtccgggctgactttgggagaaaagaaggaagaaatcctggaaaaagccttttcttcccccaaaaaacggaaaggtcagatggcacggcgtctggccgtggcctgcctggctgtgtgtgctctgactgcggcggccttcgccctttcccccggcctgcgccagattctgaatcagcacctgggcagctggcaggaagaaagccagcaattttccggtttggaaacagaggacaacggtatcgcagtccgggtagtatccgccctgtccgatgatggttttacccagatctatctggaaatccaggacaaaacaggagatcgtcttggggagaataccagtctgggatcctacggaagtgactggaatctggaattgcccccccaggagatagctaccatgggtcagaaatgtctgggctacgacccggaaagccgcaccgccttggtgaaagtgagttggagtggagaaaccacaggagaagagcagctggcaaaactgaccttacagaaaatcagtgcccgggaggaatttacagtctctttgccccagacggcgattacttcccggatccagaaaaccataacggcagaaaacacccagaaagctggggaaaagagccccgtgctccagccgggggaggaagcggctcctttggaaggaggaaagggattttctctgtcggccctgggctttggagacgatggagcgttccatgtgcaggtcaagtgtccggaagacatctgtttggagtatctgaatgtgctcaccactctgcgcagcagaaccggccaggaagctcagtataaccaaagccttacccagaccttgtttgactgggagggagagctttattatgacctggcctatggaggcgtggggccggagatcctaaatgatctggtgttggaggacttatatttctattaccccaagacacagcctgtggagggaaactgggaactggaaattcctttggagacgccggatcagctggtgtataccccggggacccaggtggaaggatgcccggtgaaccgcatcgtcctcacccccatgacactcagtctggaaatcggaagcgatcatgcaggctttggccagtccacagtgacctttgtaatggaggacggctccagactgattctggacaaggaggactgcgtcaccagtttctggaatggactggaaaagcaggatggtaccggccatttctttggacggtggctcttccccaaagccatccagccggaaaaagtgcagtccattgccttgggagatacagtgattttctcccaatgagcagcaaaaaagagggtaaggccaatgccttaccctctttttctagttgttccaggcgcggacgagagcctgggtcagggcagggatctcttccaaaggcagccgcccatagccgcaaagcagggtggaaggcggcgccaaagtggggtcatggtaacagtgggacaaagggagaaaatccactccctgctcccgggctttgcgggccatttcttcttcggaaaggccgccatggaaccggagaaggaagtggagcccggcctgggaacctaaaatttccagatttggcccaaggggagaggctttcaggctggatgtcagctcctcccgccgttttttatacaggatgcgggtgcggttgagatgccgttcccagtagccttcttccagaaagcgacacagggtgtgctgctcaaagcgggaaacagtggaggactggagagagaacagccggtgataagtgggaagcagggacacaggcagtaccagataggcgatacggatggaaggggccaggctgcgggaaaaggtgccgcagtagatcacccggtcgtgaagatcgctgccctgcaaggcggggatgggacggccggcatagcggtattcgctgtcgtaatcgtcctcgatgagataccgcccttcttgctccgctgcccaccttagcatctgggcccggcggggagcaggcatcactccgctggtgggaaactggtgagaaggggtgagataggcacagcaggccccgctttcttccagcttcgccgagtccattccatctttatccaccgggatgtggacaactttccgccccagattgcgaaaggattgggcggctttgggataaccgggctcttccatggcgtaaaccgtctccggaggaaggaggcagcaaagcaaggtgagcagatattccatccctgcgccaatcagaacctggtgaggctggcattgaacgccccggtattggtgaagataacggcacaaggcctggcgcaggcacagatctccctgggcttcccctttggacagaagctctccctgtcccatcacttcccgggtgagcttgccccaggtggcgaagggaaaagcgctgggatcggcggagccgggggagcagtcaaaggggaaggaggtcttgggtatctcaggcggcggtaggggagaaagaggccgctgaggtgtgggaagctgcggcagcggacagacataaaaaccgcttttgggtgcggcacgaaggtagccttcggtggtaagcatctgataagcggcgtctactgtgttgacgctcaccgaaagatgctgggccagggtgcgcttggaaggcagtttttccccggcctgcagcccgcctttttgaatttctttcaaaatatgccggtagagctgaaggtaataaggctcgcccccggaagtgagaaggggaaaggtgatgtggctcatgataaaacgctcctgcaaatgtgatagggtgcaaaagggcaaaaatcccgtgtgggaccagatcagatctcttctatcatagcagaggcagggtggaggaacaagatcagttttcctccgggctttggagcagccgggggaaagtgcgatcaatggcaaaggcgcccaagggggcggtgatgaggatggccagtaccgccaccgtcagtaccagctctccgcagggcaggcccatggccaggggcaccgagccaatggccgcctgtacagtggctttgggggtgtaggccagagcgcagaacagccgctcttttttgttcagcggtgttttcagaagggagagccccactcccatcatacggaagagcagcacgcccagcagcagcaaaaccgccataggtccggctttgaaggcataggacacatctacctgggcacctaccagcacgaagagcaggatttccgcaccgctccacaaaagggacagctgcccgctgagggaaaggctggttttgggggaagcgtgacgccaggaaacccccatggccatcacggccagcaggccggaaaaaccaatgaagccggtgaacaggtcttcggcagaggagagcaaaaaagcgcaggacagagccagaagcagacggcggacaggaagcagattccatttttgacagaagcgggccagaatttgccccagcaaaagccctgcaaggcatcccaaaacaatggaggtggggatgcgcaggagatccagaggaaaaaagtggccagtggcgcacagatcggaaaataccgaaaagagcacgatcacatacacatcgtcggcagaggccccggccatgaccagctgaggaatgtggtgatttttaccccatcccttttccagcaaagaaagcatcttgggaaccaccactgctggagaaacggcagcgatcactgcgcccagcaaagcactttccagcagggaaagccccagcaaagggggagccagcaggatcatgcccacgatttcacaggtggcggggagaaaacacatgagaaaggcagggtggcccacctgccgcagttctcccacatccaggttgaggccggcccgggccagaatgatcagcaaggccactttgcgcagatcggcagacacggcggaaagggaaggggagagcaggtcaaacacagaaggccccagcggataccggccagaagcattccaaagaggggcggcagccccagtttttgagatgcttttcccaaaagcatccccagaagaaaaacaagtgccagactgtacagcatttcgattgctcctttctgtttcggggcaacaaaaaaagctgatgcccctgcggaaaatgtcgcagaagtcatcagccaaaaagcggtttgggcctcagaaggccggaggagaacttcattcccggaaaatagaataccacagcggaaagcgtttggcaagaaaaacttccccgaggaaaccctcggggaagcagatgaattttattatttatttctggggctggggaatggggatctcttcggggatggggcaatgataggtatcgccgtgcatccgctctttccactcttccttggccttttccaccaaggtgggatcgtccaccagcttgctggcggtggcggccagcaccttggcgccatagagcatacccttgtggccgatgctcataccggcgcaagcggtgatctgccagctgtggcccggagcggcccggttgcaggtggcggtgctcaccataatgcagggcacgatgtgctgcacatcgcctacatcggaagagccatacccgttgcggttggcaatgggaggtaccaccgagcagatggcggggccatccagcaaaccggcttccttcatcttttcatattgggggctttccagattgagcttctgggcgaagtccagctcttcctcagtccactggggcagggggatctgctccatcatgtcgtgggccacttccaccagcaccttgttgctcatggagttatagcagccacccaggaattcgatttccagcttggtttcggtcatatgggcagcgccttcggccaccttcaccagacgggcataagtatcctcaatggcctggcggctcatggcccgcacataataccagacgctggcgttgtcaggaacgatattgggggctgtgccgccctctttgatcacataatgaatgcgcacatcgctggtcacatgctcacgcagatagtttgcacccacattcatcagctctacggcgtccagggccgagcggccattgtgaggatcgccgccggcatgggcggtaacgccgtggaaatggaaaatggcgctgttcaggccgttggaagtgcccaggttgaccccgttcatggagccgccgtgccaggccagagccacatccagctctttgaaagcgccgccgcgggccatgaaggttttgccggtgagggcttcttcggcagggcagccataaaagaccacggtaccttcctttccggtctcttccagatgggctttcatgcccagagcgccgccgatgcaggctacgcccagcagattatgaccgcagccctggccgggtgcgccgggagtgacaggatctttctgggtgcagatcttctggctcaggccgggaagggcgtcatattctcccaaaaagccgatcaccggatggcccttgccccaggtggcccggatggcggtgggaagaccggcatagccaacttccacagtgaagccctgctgacgcagataatcggccagccactggcaggcgttgacttcgttgtaggcggtttcgggagtttcccagatcttctgagccagttcagtcagtccctgggcggcctgatccacagcacgggtggcagcgatgtccaacataaaagttcctctccttttctggtgggagggtcagccggaaaggatgaattcggcaagttgctgaaaaacacaaaaaaattatgtataaaatacataaacactccggtatttgcccttccatttgtggattatgaatcaattttactcccgttatagccgatttgtcaatgcagtgaggctatttgacggcaaaaggggggatatggtatcatcagaaaaaacaaagggaggatgcgaaagtgaagaaggcatatatttctgcggatatcgagggaatggaaggggttgtcacaaacatccagtgctctcggcagggggcggattttgctgtggcccgcaaacgcctggcattggatgtgaatgccgccgcccgggcctgttttgacagcgggtatgatgaagtgctggtgtgcgatggtcacgccgatatggagaatctgctcattgaagatctggacgagcggattaaactgctttccggcgccatgcgccagagcctgcagatggaggccatcgacggcacctttgatgcttacatttcctttggccatgccggagccggtctgactcccggcggcgtcatcgaccactgctacaatgggggaaaggtgtataacctgcgtttcaacggcattaccatgaacaccgaaacggtggccaatgccgccatggccggttattatggagtgcctttggtggcctgcatcggcgatgcggccctggccaaggaggtacaggcctttgtgccgaattgtgaggccattgtggtgaaagagggtgtttcccgctttgctgccatttccattcatcccaacaaggcccggcagctgatctatgatggagtcaaggcagggctggcccggcgggatcagatccagcctttgcgcctgggtgacgaagtgaccatggaagtggactataaagattccaacatggccgacactgctatgctcattcctggaatgcgccgtttgagccagcggacggtggcctatactggggatgctgaaactgttttcaaacttcatgaactgatgctctatcgtctggtggacaagctgtaaacagaagggagaaggaaagtgcgttacccggaatttttgaaaaaaggggatattttgggctttatcgccccttcctttggctgtgccatcgaaccctatcgctcggctttccagaactctctgaaaaaatgggagagcttgggatactccactttgctggggcccaactgctatgaaggtcagggcgtggggatcagcaacacaccccaggcttgtggagcggaggtcaatgagtttttcctccatcagccggtgcaggccattttgtcctgtggcggtggggaactgatgtgccagattctggatcatgtggattttgaggccatcggcaaagcaaatcccaaatggttcatgggttattccgacaacaccaacctgacctttttgcttaccactttgtgcaaccaggcttccatttacggcccctgtgctccggccttcggcatggaaccctggcacccctctctgaaggacgcccatgggctgcttaccggggaaaaatggacggtggaaagttatgacaaatgggaaaaggaaagcctgaaagacgaaaaccatcccttggagccctatcatgtcacggaagaaaaccgggttctggcatttcctcagcaggatgccgctttttccggccggctcctgggcgggtgcatggattgtctggtgaatctcaccggtactcgttttgacaaggtggcggagttttgtgacacttaccggcaggatggaattctatggttcttagagagctgcgatctgaatgtatttgccattcgcagagctttgtggcagatgaaagaggccggttggttccggcatgccaaaggctttctcatcggccgccctggtgttcacggccagcagatgatgggtctggatcaataccaagcggtgacagaagtgctgaaagagttttccgttccggtgattctggatgccgacatcgggcatctgcctcccatgatgcctttggtgtgcggcgccctggcccaggcagaataccagggaggaaagctgtccctcaagatgaagcggggatagggcttgacgaacagcttgtgcccatggtatgctgagcacagaaaagagcgttttgcggatcatacccgatctgcaaggcgctctttttttatttttggaaaaggagcggaaagtgtatgacgaaatatcggaagatcggggccgatgtggccatggagattttgggtggaatgctcattgcgttgggcgtttacaactttgcactggaagccgattttcccatgaccggcttttctggcatttccttgctgctttatcgttttttgggggtgcccatcggtctttccacggtgctgctcaatgtgccggtggccattttgtgcttccggctgctgggacgagggtttttcttccgttccattcggtgtatggtgctttcctcgctgctcattgactatgtagcgcccttactgcctcattatgaaggcaaccgattgctggcggccatctgcaccggtgtgttggccgggctgggatatgccttgatttacctccgttcctcttccaccggcggtaccgattttatcatcatggcggccaaaaagaaatggccccatgtgaccctgggcaagatcacctttatcaccgatgtgacggtggtgctgttgggaggactgctcatgggggatgtggatggagtgatttacggcatgattgtcagctacatcatggccattgcagtggatcgggtgatgtacggcgtggatgcgggcaaactggccctggtggttacccgaaaagggcagcaggtggccgacgccattgagacctgctgcggccggggttccactttgcttcaggggcagggaggattccagggagaagagaagaaagtggtgatgtgcgcctgcaataacaaacagatgcatctggtgcgtcaggcggccaagggagtggatccccaggccttcatcatcattctggaatccaatgaagtgctgggagaagggttcaaaacaggcgcagcataaaaagaaagcagatgctggggaacgatcaaaagcggggcgactgccccgcttttgatttatggccgaattgttgatagtttatttaggtaaagttctgcttgccgtctatctgtgccaatcttctttgagccaagtttttgcatccacaccttcttcctgcatgttttgcagcaatatttgccagttattcccagacgcgttccgcgtctgggacattgcttctatcgctgttttcagcggcatatacagatccttgatgggcagcagttccatacaagtgacggtaaattccacatcctgaggcgtagggtcattcagcaagacttcttccagcaggtaataattgttatcgatcatcccttttttcatgatattatccacttttggatgctggaccaccattcgcagcgcttctaggtcgctcagcatttgcatgtcgtagaccagggagtccttttttgcgctttccaaatcggagtctaaaagctcattgcacagcgctatgatttcatccttctcttcccgtgaagcaccgttttgcatctgctgcaccagaatatcaatggcttccggtagttgctccatatctcctttggagtggtacgctgcaactgtttttttcgccatgtccactgcagttttttgatcgatttcatttagccggttcatagcgcgaaaacgcagatttttatcggcatcctgtgttagcatgcgcaggacttccatttcttccggtgtgcggaatcctacaaaatggatcaaggatgttttgaaggacggatccacatgttcatcttgcaagagctttaaaagcctggggtggttataatccccttggggatatttctgataaaacatctcagcccaccattgccgtaagtagacatcgtccattgtttcataaatccggctgatgatttcgtcattcgaaagctcagaggcccgatcaatacaaacctgtgcccaacaaatccccaattcagggtcgccttttccgttttggatgtcctccatagcctggtcaaaatctttcagaaagtccgctgtggtcagttgatggagcttttccataatttcatcctgggttatcccttccgtatggccccaaactacttggcgatctgcagatacccatgcgctggccgaaaccagcagcgccgtcgcaagagccagcccggcaacagaaatcaacatgttccgtttcatccaattcctcctcacttctttgtgtcagaaaggcaaatcacaagcgcttgttaattgagtaaattttaatttatttttttaaattgtcaattatattttttatttttcaaaagtaataaagaagcatttcgaattgcttaaaatatcaagaaggcggaggaacttcctccgccttcttgatatagcatattctttttgtgtttatttcaccacagagctgtctttcagcaccacatcgtgagaaccaccttccacaatgctggtggccgagaccagggtgatcttggcgtttttctgcagatcgggaatgttcagcacgccgcagttgcacatggtggaacggactttgttcagagaaaccgtcacattgtccttcaggctgccagcgtagggaacataggagtcgacaccttcttcaaaggacagcttcttgtcgccgcccaggtcatagcgctgccagttgcgggcacggttggaaccttcgccccagtattccttcatatagttgccgttgatgatcaccttgttggtggggctctcgtcaaagcgggagaagtaccggcccaacatgatgaaatcggcgcccatggccagagccagggtcatgtgataatcatggacgatgccgccgtcggagcacagggggatatagatgccggtttcctcgaaatattcatcccgggccttggccacttcgatgactgcggtagcctgtccgcggccgatgcccttctgctcacgggtgatgcagatactgccgccgccgatgccgatcttgatgaagtcagccccggcctcagccaggaaacggaagccttcggcgtccaccacattgccggcgccaaccttcactttgtcgccatagcgggagcggatccagtccagggtgatcttctgccactcggagaagccttcggaagagtcgatgcacagcacatcggccccggcctccaccagagcgggaacccgttcggcatagtcacgggtgttgataccggcgcctaccatataacgcttggagctgtccagcaactcatgagcgttttccttgtgggaggaatagtccttgcggaaaacaaaatacttcagcttctggtccttatccaccagcgggagagagttgagcttgtgttcccagatgatgtcgttggcttccttcagggaagtggaatcggaagcatagatcagtttgtcaaagggagtcatgaattcggacaccttggtggaggggtccatgcggctgacacggtaatcgcggctggtgaccacacccatcagcttgccgtcgggagtgccgtcgtcggtgatggccatggtggagtggccggtcttttccttgagggccagcacatcggccagggtgtgttccggagtcaggttggaatcgctgcggacaaagcccgctttgtaagccttgacccgagccaccatagcggcttcatcctccacgctctgggagccataaatgaaggaaagcccgccttccttggccagggcaatggccatgcggtcatcggagaccgactgcataatggccgacaccagagggatgttcaaagacaggggggactcttccccttttttgaacttgaccaagggggttttcaaactcacattggccgggacgcactgggtggaagagtagccgggaatcagcagatattccccaaatgtatgggaaggttcctcataataaaatgccatgctcaactctcctttatctctatatgttttctacaaaaaataacacaaaagtttggcgaagtcaacaagaaatttttcaaattacagaacagggggctgtttcatgcccagacagctgaaaaccaccgcagtcgcgccggccaccatggcggaaatacccagcaccagtccggtgatggcaaaggcttttttcatatgctccatcctttctcccggcgggccgggcgtatcgtttttcgggaacggccaatcctataatagatgtagtatagtataacacacaatgagacaaaaagcatccattcttctgcggaaaaaccgaaaa

SEQ ID NO: 1165 - DNA, 9845 bp, Unknown
  16S sequences of unknown bacteria
cccccctggggtatttgtcaagcgccgctgtatggaattattttttgcgctgcggcgcaaactatgcaaaaacccagccaaaaccccggaaaatgaaaaagtatgtgacattttgactggttttcttgaaaattttggggggacattacgaaaacttaacaaattcttatttttttgtaaataatttggaatatcctttgactttcgcggaaattatattataattagtctccacagaccctttctgcctgcgggcgggaagatttttcttttaagaaaaatctggcacggacgattgaatcgcccgtgccggaatggatcattgttgtttacgaggaggcaagaaaatgaaatccaaattgcggagctatgggctgcgcgccaaatcgtcgccagcggcttttactgttctgatgtggtttgtggccctgctttactgggaaatcctgctgcacgttgtcgcctttggcggcttccattggcggaatttctatatgctgggcttcacagcgctcatcgctgtgctggcatccctactgtgcacgatgtttccccggagaattaaccggattgtctttactgtcctgctgattgccgcctttgtgctttataccagccagctgatttatctgcggattttcggctcgttctactccgtctcgatgatgcagatgggtggcaaggcgctgcagtccttctggaaggagaccagttcgacggtaatccagaacattctgctgctgctggccatgctggtgccagtgatcgcgtccttctttgcaaagaaaatcaatccccgggcatttacccagctgtcctggcggcgtgggctgcaggtactggggcttttggcggtcagccatattgtactggttctgctgctgttcgttggcgggacgaaattctatacgccttatgattactattggagtgatgacattggcacggaccagagcatcgaatgcttcggctttttgacgacggcccgcctggagctgcagcacatgtacctcggcagcgagcgccagaaggaggacatcgaagtccttgacgaaggctccgtcaaggaggacgcagaagctgaggctgaggctggcaaggccacctacacggccgacaaatacaatgtcgacccgactctggacttcactgcgctgaacgagctgacagacgatgtcgcctaccggacactgaactattacttcaatgaccaaattcctacgaagaagaacgaatacaccggaaaattcaaggggtataacctcattatgatctgcgccgagtcgttctccccggcggccattgataaggacctgacgccgacgctttataagctggtcaatggtggcttcgtcttcaataactactacaacaccttccccaacgtcacgacgaacggggagtacaccttctgcaccggcctgctgccggacctgacccgcagcaagtccaacgccagcttctacgcctcccgcaacagctacctgccctactgcatgggcaacgtgttctcggagcagttgggcatccagtcctacgcgtaccacaactacaagggcagctactaccacagagacgagacccatcccaatatgggctaccgcttcttctccgctggcaacggcatgcactttacaacaaactggcccgcctccgacttggagatgtttgagcagtcggtggacgattacctcagccaggaccaattccacgcctattatatgaccttctccggccattacaaatatgacacggagatcaaccccatgtgtgcccggaattacaatgtcgtcaaggatatgccgtacaacgaggcggctaagtgctatctctcctgcaactatgagctggagaagggcctgacgtacctgatgaatcgcctgcagtcagcgggcgtgctggataagacggtcatcgtcctgacgggcgaccatttcccctacggcctgaccaatagccagtacagtgagctggtgggctatcagctcgacgctttcaacaagtataagggcaccttcatctgctacaactccgccatggacccggtgcaggtggatgcgtactgctgcaatatggatatcctgccgacgctgatgaacctcttcggcttcgagtatgactcccgcctggtcatgggcacggacgtcctgtccgactccaggcacatcgccgtcctggcaaaccagagtttcctgacggacgatgtctggttcaactccacgaccggcgacgccatctggcagaacggtaagacggcggataaggagtatctcaacgccctgatcaattacgtcaagaaccgattcactatttccaccgcgatcctgaatacgtcgtactatgactttgccttccatcacgagtttatcatcacggatgacaacggcaatgtgatcacccagcccgcgctcccggccctccccgacggcgagaccgtcccgccggacgaagagggcgagacggagaccaccggcggcgccgttcccgacgacacggagcaggccaccccggaaacgacgaacgctggataaaatttttctgcatagaaagagaactgctgccgcagcagtccggataaaacgtccggcctgctgcggcggtgttttttacttgtattttctgaaaaacaaaaaatatttattgacaaacgataaaactagagctatactaagccaaaacaacggaggatggtgcgtgcaatgaagcaagaacgaagcgccctggcggcgcagatctttatcctgatttttgccgctgtgctgttggcgatggcgggcctcgcccccagcgtggcgcgctggtatgtggcgctgcggccgatgcagccaggggtatatactgcgctgctggtgagctggtacggctgcaccgccccggcggcgctggccctgtggcagctctggcggctcctggcggtcatccgggtgggcgcacccttttgcagtgccaactgcgcccggattcgtcgggttggctggtgcgcgttgatttgcgcgctggtctgcgccgggggcggcgtgcggtacgcaccgctgtttttggtgacggcggcgatgctgtttctgtttttcgtcctgcagattgtcgcggcatgcttccgggcggcggcggacctggcggaagaaaaccgcctgacgatctaggaggggcagccatggcgattcgtatagatctggatgtgatgctggcccgccggaagatgacctccggccagctggcgacgcaggtggggatcacccaggccaatctctccatcttaaaaacaggcaaggccaaggcgatccgcttttcaacgctggaggccatctgcaaggcgctggattgccagcccggcgatctgctgcgctgggagcgggaggaggaatgagcatggaaaacgggaagaacgcggccccacagctttggcccccacgccccgtggccaggtcccgggacctgcggtatgccgccggatatttcctggcaagcctcctggcggcggatgggcttatctggtatggccccaacctggcgctcagcgccacgatgctggccctcctggcattgacggcctgctatctccggcccaggcggcacaagatcagcgcctttggcaccctctgtgccatcggcgcggtggccgctgctgtgagcctggtctggacggccgacggcggcgtcaaatgcctggcgctgcttctagggttgcttctggcgacgttggcgctgcgcgacgccttgtctctgcggcggcggcgcggtatcggcgcgctggcagacgccttcggcttgacctggtttggcatcacccactggggcgcagcttgctacggcctgtttcaccggcaggggccggacgggtcggtggaaaagcggcgggtcggcagcattctgcttggcctgctgtgcgccgggccggtgctggccgtcctggtcgcgctcctggcgttgtccgatgcggcctttgacggcgcgctgcagcggatcaatgcggcccttgtactggagctgctgcttgacgctgggctgggtactgcgctgtttctcacgctatttggccagagcttctgcctgccggagcagcatgcggcgggacaggcgcttccgtccccggcccaccgggggatcgaaacagcggcgctggcggcatttttgggcgtaatctgcgggctttatgtctgctacctggtctcgcagctggcttatttcttctccggctttgctggtctgctgccggcgggctatactgcagcggaatacgcccggcgggggtttttcgagatgaccgccatcagcgccatcaatttggcgctgaccggcgcggcgttgcagctggcccggcggcaggcgggccgcctgcccggcgttttgcgggggatgctggcgtttctcagcctcttctccctgttgctgatcgccacggcggcgtccaagctggcactgtatatcgcaagctttggcatgacgcggctgcgggtcctgacggcgctgtttttgctgctgctggcggtctgctttgtctgcgtgctgcttcggctgtttttaccccggttttcctatggaaagcctctgctggcggcgacggcgctggtcattttgctgctgagctttggcaatgtcgacggcgtcatcgcccggtataatctaaaccagtggcagcgcggccagcttacgcagatcgacgtcgcggcgttgggggagctgaacgaagccgccgtccccaccctctggaccctggcccaggatgacgcgcatccaaagcaacagcgccaggcccgggcgtacctgacgagctggggcctgcggctgctggagggtccacagacggattcgccggaggatgcgccccaccgctaccgcccccgcctgcgggcttataatcgtacgaccgcccgggctgcccggctgatagaagcccactgggcagagatttaccttcccggctggtgcaatgtcatcgccagcgggacggcgtaaagatagaaaaagccgccggggatgtggcattttttccacattcccggcggttttttctattttatttttcgatatgccagatctcctgggcgtactggccgatggtgcggtcggaggagaagtatccagcggcggccagattcagcaggcccttgcggccaaagcgcatccgatcggcggcgtcgtaaatggcgcgcaggcgggcattgcggtaatcctcgaagtccagcagcaggaagtagtggtcggggcggtgccagctggcgccgtccagcagcgcggtgtggagctccgtctgctcctggtctgtcggcacgatgccgctgaccagggtgtccaccgcccggcggatgcgggggtttgcgtcgtaaatgctccgggcccagtaggtgtcgcggatggcgttgatcttttcgacggtcgcgccgaagatgtagttgttctccagccccgcccgctcgacaatctcgacattcgcgccgtccatcgtgcccagggtcacagcaccgttaagcatcagcttcatattgccggtgccggaggcttccgtcccggcgggagagatctgctcggagatatccgccgcggggataatatgctcggcgtagctgcaattatagttctgcacgaagacgacctgcagcttgccctgcatatccgggtcgccattgatgagcttggcgatgcggttgatatagcggatgatggccttggcccgggcgtatcccggggcggattttgccccgaagatacagaccagcggcggcatatccttcagactgccttccttcaggctgaaatagaggtccatcgtcaccagggcgttcagcagctgccgcttgtattcgtgcagccgcttgacctgcacgtcgaagacggcgtcggggttgatgacgacgccctcgtttttctcaatcacggcggccaactggaccttcttctcccgcttgatgcggttgaactcccggatgagctcatcgtcgatcagcggcttgagctcctccagccggtccagattcgtcaggaagccggggccgatgcggctggtaatcagctccgtcagctccgggtcgcacaggcccagccagcggcgcggcgtgatgccgttcgtcttattctggaagcgctggggataggcggcgtaccagtcccggaataggctgtttttcagaatctccgagtggatcttcgccacgccgttgacatagctggagacatagacggagaggtttgccatatgcgcctggttatcccggatgatgaagagattcggatgctctgcccggcagcgctcgtcgatgcggcggatgatatgggcaatctccggcacgacggattccagcagccccaggtcccacttttccagggcttcgcccatgatggtgtggttcgtgtaagagaaggtccgctgggctatggccagggaggcgtcgaaggacataccctccttttccagcagccggatgagctccgggatggacatggccgggtgcgtgtcgttgagctggatggcgcagaaatcggcgaaggcggaaagatcgttcccgtggtcctccttatagctgcgcaggatattctgcagcgaggccgacgagagaacgtactgctgcttgatacgcagccgcttgccctcgtacgtgctgtcattggggtagagcacgcgggtgatgtcctcggcccggtttttggcgtccagcgccttgatatagtcctgggcgttgaaggcgtcaaagtccagctcctgctcggcctcgcactgccagagccagagggtgccgacgtagtcggtatcgtagccgatgacgggcatgacgtacgggacggccagaacggtctggtccgcaaattccacccggacggtgtgccggtcgcgccggtagctccaggggtcgccgtacttcgtccagtcgtcggccagctctcgctgggagccgttttcgtcaaagcgctgcttgaagaggccgaagcggtagcgcaggccgtagccgctcagcggcaggttcatcgtcgcggcggagtccaggaagcaggcggccaggcggcccagaccgccgttgcccagggcgtcgtcctcaatctcctccaggcaggccaggtctatgcccttgtcctggaatgcctggcgcagcggctgcaggatgcccaggttatagaggttgctgtagaccatccggccaacgagatattccgccgagaaatagaaggcgcggcggctggtcgcccgcttttctttgctgcgggaccagttttcgtggatcgccatcatgacggcctggcccagactgtcgtgcagctcctgggcggtggcgtcctgcaggttgacatcgtggttcagcttcagcagggcttgggtctcctgtacgattcggtcacaatcaagtttcataggttttctcctgttctaaacgcggtggcagcgccggacatccggtccggcaaaacattttcacatggtatcagcttattataagcaatctgatgcccttttgcaatcgttttgcccgccgcgcggagaaaaaactttctaattttccgcctcccggccgttcaggcagagatgccgcagcaggcggcccaggatctgccacaggctctgccggggcactgccgcctccgccacaagctcgatccgggccagctcctgctcgccggattcgacgatgagctgccccaggacctgccccgcttcgatgggcgcggtcagccctgtctccagctctactcgctgggtcacgcccgcctgcaggctcttgtcgatgaggatcggctggtctgtcgccgggactggctgcactgtctcgcagacgcccagcttgaccggcagcggcgtgatgccgtccgtctccagctggacgagggcgtagttggcaaagccgtagtccagcagcgccttggcggcggtaaagcggtcggcgctgctggcgcagtggagcacgacagcgatgagctcgatgccgtttcgctgggcgctggcggagaggcagtgcccggcggcggcggtatagccggtcttcagccccgtcgcgccctggtaaaagcggatgagcttattcgtattggaaaggccaaattgcccgtcccggacagtgtccatccagattgtcgtgtactgccggatctcctcgtgctgcagcagctggcgggacataacggcgatgtcataggccgaggtcagatgctccgccgcgtccggctcgtcgtccagcccggtgcagttgacaaaatgcgtctcctgcatccccagctccgctgcccgctggttcatgagctcgacgaatgccgcctcgctgccggctacatgctccgccagtgccgtggcgcagtcgttggccgaggagacgacgacggccttgagcatatcccgcagcggcagctgctctcccggttccagatagacctggctgccacccttggccgccgcggcgtccgaggccgttaccgtgtcgtcccaaccgatcttgccgctgtccagcgcctccaggaccaggagcagcgtcatgattttcgttacgctggccggggccagccgtgtgtgggcatccttctcccagaggatcgtccccgtggcggcgtccattaagatcgccgacggcgctgcgacctccaggcccgccgcccacgccccgggcgtcaggcccagcagcaggcagatggccagtcctatgctgatgattcgtttgcgcatttgctcgtcctccccagttttgtgctacaagcgtatgcgcaggcggaggcggacatgccaaaaagtgccgcagtccagcccgggatcgggtggactgcggcaaagccagcttgtcaaaaaatatttttgacaagctttcaaacgagacccgcttcgctgggctctcgtttgaggggaatgcgcctcgctgcagcgcactcactgtgcgccatcggcgcacagttcgcacgtttgtgagccgataagtattttctccgacgtacacgccgccggagaaaatgattggactctgtttgcgcctgcgggcgcaaactctgcgaggcttttacagtttgatttatttctctttatgcaggcgctgctccggggtggaggggttcggggtttcgatggattccggggtcagcgcgtcgatggactcggccttgacatgcttgggcattgccagggagagcaccatcgcgacgacgaagacgcctgcgacagggttaccggcgaagatatcgccgatgagctttggcatatggtcaaagaagccggagaccagcgtgacgccgatgccgatggagagggaggtggcggcgatcagcgtattgcgctggtccagaccgcactggctcagcatcgtgacgccggagatgatgatcgcgccgaacatcatgacggtgcagccgccgagcacgcactccggcagcgtggagaagaacgcgccgatgggcgggaacagaccggccagcaccagggcgatggcgccgaacatgatcgtgaagcggttgacaacctttgtcatcgcgaccaggccgacattctggctgaaggacgtgatgggtgagcagccgaacacgccgccggagacggcggagatgaagccgtcgcaggccagggatccggacagctcccggacggtgatatctcggcccaggccgccgttgcagactgccgtcgtgtcgccgatcgtctcggcggcggagacgaagaagaccagagtgatggagatgatggcgccgagctcaaacttcggtgtgaagtgcagcagctgcgggaaggagacaacgcccaactctgagacggtgctgccgatctgcgcgaaatcgaccatgccgaaacagatggcggcaatataaccgacgaccagaccggccagaacatagagctgcttccagaagcccttggccagcgcctggtagaccaggcaggtcaccag

SEQ ID NO: 1166 - DNA, 3744 bp, Unknown
  16S sequences of unknown bacteria
ttctatagctaaggggtcaggctctttgcctgaccccaacatttattatagaaccgaaaaaaagcgagtgttcttaacagcctttcaaatgctgtaagaacactcgccatggttgcggaggagggatttgaacccccgacctccgggttatgagcccgacgagctaccggactgctctactccgcgatttctaaaaccaggcgtctcgcttggtgcttgattataatagcacatggcctgctccgtgtcaagcacttttttatctggtgtcaatttttctttctgcgtcggttctgccggagcggtgctgaaagaatattaaaataatataaagaaatctgagaatacgtacggtcttttgtagtaatcgctatataataggaatacagaaaccaaatcgccccgcgtggcggcgctgccaggttcgatgcagcacctaaccagcgccctgggcgggcaaggaggccgtatgaaacgaaaaaacgctgcttgcagacgacgctgagctgaatcgcgcgatccttgctaatacgctggaggcggattttgagatcatcgaggcctctaacgggaaagtggccctcgccgccctccaggcgtaccggagcagcctctccgcccttttgccggatatcgtcatgcctgagccggacggcttcggcattttagaggagatgaaccgcctgcactggatcgatgcgctcccgactatcatcattttcgccgaaactggcggcgcgtacattgaccacacctttgcccgggggcatcggcctatatcagccgtccgttcgtcccgggtatcatccggcgccggatcatgaacgcgatcctgctccacgcaaaaacagcagctgatgaaccacgtcaacgatcgattttcgcggcggggtcaccgcgatgagatcctgctgacgatcctggaatacgccgttgagacccgcagcggcgagggcggcacgcatatgaccggcgtggctaccatcacgggcccgctgctgcgccgcctgctggaaaagcccaattcatacgggctgacggatacagacgtgaatgtgatctgtaccgcctccggactgcacgatctgggctagctgctggtcccctcggatattctgaaaaagcctggcaagtcctgccgctgccaaacggcgctgctcgtcctttgggacacagcaaatcaggaccgctaccgcgcaatcctgggcaggattctggatgttgacgaaagcttcggccgcctgacccgctacgacgaagggcttgcggccccagccaccctcgcactgctgcctgtcctggccggttcggacgatatgctccagctccaaagctatcacaggatgttctccgccgtccgtctggtcgaccaggggctgtgcctgcaggtctccgccgatacgcacggccaccgcatggaggcaggctgctatgctatctggagcaaggagtgccgctgcaacaactgcatcgcgcaggaagccatccgcagccgccggactcagaacaagatcgaatccaccggcagcgatattttttacgttctggccctgtgcgtcgagctcgacagtgtccccctacgcgctggaatgcgccagcccgcgccaagccagcggcagtgaggaaaatctgcgcaatcagctgctggtacataaccggcaggtctacctcgattccgccaccaaccaaatacatgcagggaagcaaatgatttgattgacagatatatttacttttataaccacgagcgcatccagaatagaactggagtggcgccgctaacgctgcgccactccgcttaaaatttaatatttcctacatagggcttttttgtgctgtccgtataaattggggcagttcaggcagttcattccggcactgcttttttatttgcctgttaaacggggaacagtccagaggcatctgttatcttcgtttctctttgctgttttttcactcatatatgttcaaaacccggtctgttcctgattgcagactgggttcctcgacaggctgaggcgcgccgtaaacggcggcccggcctacgcgataccggcaaattacccgcagccgtccgcctttttcttgcttctctttttcggcagcggcacgatctcttccaggatgctgactacacgccgcaccagcgtctggtcctcaatgtccagaataaactggggctttgcgccggggtacggcgcatcctccggcgcaccctgcagcagcgccgcgatttccggcagcttcttgacaaacaccgtattatcgcacacggtcaaaaccggctttccattgcaatagatcagatactccccaaacatcttcttgctgctgatcccggagattccctccagctgctgcaggagaaacgtcaggtacgcttctgttgtcgccatcggcatttcgcctccttctatttttcggcgcgcaccaggccccccagcggcgaaaaaacacgccgcatccaagacaagctgcgttggatgcggcatgatgcagttttcaagtctgcaccgcccggctgcgccaaagcctacgcttattatccgcaatttatgcggcaatgtcaaggccagagcgccggggcgctctggcgcttacagccagaaaaacagggcccgctccgggtccagcgtctcgcagtccagcagcggatcgccagggcagatgctgtccagctgcatccgcttggcgctgtcacggtaattatccggctcggcgaaggcggcaaagagcagcccgtcatagtcctcgggcatcgtgatgacataatgcttcgtcagcacgtcctgccagtccgcggtccgcccggcccagctggtggagtaggagaattcgatctcgtagcttgcgccattgtactcgatggtgtgcagataggaattctcgtccgccgtcgtatcctggtacgccgtcgccgccgtgagccaggtgccggtgtagtagtcgaacagctcgctgctcgtcacggtgataaactccttgctgaaggtcccgacagagtccagggggatgtagcagcaggcgtcaaacgtcacagtccggatgccgtcgctcgtctcatcgccgcgggtgatgagctcccagtagacgtcgcccgtcgcgtaattctcgcccagcccggcatagctggagacaccgtcctccagcaggaaggtcccgtcgtccatcgtggcgttgacggcgatggcgttggcggagaaatagggctccggcgcggtgatctcgtcggtccggtaccagtattcgtccagctcgctgtcgtagagcgcgccgtcgtcggtcagggtcaggtagaggctctcgccggtgccgtcatagaccaactcgataccttcttcatcggcatagaacaccccggattccaggacctcttccgccgagttgacaaacgcccaggtctcatcggtatagagattcagccagcggttcccgccatcctgcccccagaggccagtgtaatcgcccaggaggccgcctacggaggattcctccgggatgaagacgtagctgttatcctcctggtcccagtaccagacgaacagcgtctgggtgccgtcgtcatggtcgaattccagggccacgtcgctgtcgccgtcgtcattgcggtcggcaaaggagatgttgctgtaggccaccgcagcatccggcacgttcatcgggtattctacactgccgtagtagatctgctcctcttcgtcgtagtagaaggtcgtgtcgtcctcccggacgacgatgcagaca

SEQ ID NO: 1167 - DNA, 9280 bp, Unknown
  16S sequences of unknown bacteria
gtagaggtggaggactttggacgtggcattcctgtggattacaatacaaaagaacagcgttttaactgggagcttttgttttgtgaactatatgcaggcggaaaatataacaatgatgcggacgaaagttacgagtattcgcttggtttaaatggtttgggactttgttctacacaatatgcgtcggaatatatggatgtagatatccgcagggacggtgttcaatacctgcttcactttgaaaaaggtgaaaatgtaggaggattaaaaaaagaatcttacacaaaaaaggatacaggaacccgtattcgctggaaacccgacttggaagtctttacagacattcatgtaccggtagaatatttcttggatatcatcaaacgccaggcgattgtcaatgacggcgttacttttgtatttcgcaatcaagtaggcaatcagtttgaaacgacagaattttgttatcaaaacggtattgtagaccatgtaaaagaaattgcaggggaagatgcgcttacctccgtacagttttggcaaacggaacgcaaagtacgagatagggatgacaaagatgaataccgtaccaaaatcaatgtagcttgtgcgttttccaacagaacaaaagcgattgaatattaccataattccagctggctggaatatggcggtgcacccgataaagcggttagaaacgcatttgtatatcaaattgatgcatatctcaaacaaacctccaaatataataaaaatgaaagcaagattacctttgccgatgtggaagattgcttgattttggtgatttcttctttttccaatcgtaccagttatgaaaaccaaacgaaaaaagcaattaccaataaaggaatccaagaggctatgacagagatgctgcgtcataatcttgaaatatactttttggaaaatcctttggaagcggacaaaattgcggcacaggtattaatcaataaacgcagtcgtgaagatgcggaaaagacacgtttgaatctaaagaaaaaattgaccagcaatttggatattacaaatcgtgtagcaaaatttgtagactgccgaagcaaagatatcaacgaacgtgaaatttttatcgtagagggagactctgctctcggcgcatgtaaacaggccagaaatcctgattttcaggctattatgcctattaggggaaagattttaaactgtttgaaagcagattacgataaaatattcaaaagcgatattattacagatttgatgaaagttttgggatgcggcgtggaggtcaaaagcaaagcaaataagaacttatccacatttgatttatctgcactgcgttggaacaaagtcatcttatgcaccgatgccgatgtggacggattccaaattcggaccttgttgcttactatgctgtatcgtctaacgcctactttgattgaggaaggtaaagtatttatcgcagaatcaccgttatttgaaataacaacaaaagaccagacatattttgcttatacggaagcggaaaaagagacttttttaaaacagatagagggtcaaaaatgtaccatacagcgctccaaaggccttggtgaaaatgagccggatatgatgagctttactaccatgaatcctgaaacccgtcgtttaattcaggtcatgccggaagatgctgcaagaacttccgaaatgtttgacctgctgttgggagataatttatcaggaagaaaaacgtacattgccgaaaacggatatttgtatattgattctgcagacgtaagctgatgcagatgataggattggagtgaatacacaatgcctccaagaaggagaaacacagaatctaaaaagaaaactacaagcgtaaaaggtgtcattgaaggtgcaggcgaggtagtggaacaacccattaccgatactctggaaaaaaactatatgccctatgccatgagtgtcattatgtcccgtgccattccggaaatcgatggctttaaaccgtctcaccgtaaattgctgtacaccatgtacaaaatggggctgcttggttctgcaagaacaaaatcagccaatattgtgggacaaaccatgaagttaaatcctcatggcgattctgcaatttacgacactatggtgcgcttaagccgcggatatgaagcgttattgcacccctatattgactcaaagggtaactttggtaaatattattcccgcgacatggcttgggcagcttcccgttatacagaagccagattggatgatatttgtcaagagttgttccgtgacatagataaagataccgttgattttgtagataactatgataatacgatgaaagagccaactttacttccggccagttatccttccgtattggtcaatgcaaatacgggtattgccgttggtatggccagctctatttgtccgtttaatttagaggaagtttgtcaaactaccattgcgttcatgaaagatgaaaatcatgatattgcttctacattgttagcgccggattttccgggcggcggacaaattatatatgataaacaagccattgataccatttatcaaacgggacgcggcggtatccgtgttcgttcccgctattcctacgataagtctgcaaactgtattgatattacacaaattccgcctaccacgaccattgaagtcattgtagaaaaagtagtcgatttggtaaaacaagggaaattaaaggaaatttcagacatcagggacgaaacaggtttggatggcttgaaaattactattgatttaaaacgtggtgtagacccggataaattgatgcagcgtctgtttaaaatgacaacgctggaagataccttttcctgtaactttaacgtcttggtagcaggaatgccaaaggtaatgggtatcagagagcttctggaagaatgggtggctttccgtgttgaatgtgtacgccgcagaacacactttgacttgaagaaaaaacaggacaaattgcacttgctcaaaggtttgcaggcaattttgcttgatattgataaagctgtgaaaattgtgcgtgaaacagcggaagaggcaaatgttgttccgaatctgatgtcaggctttggcattgatgaaattcaggcagaatatgttgccgaaatcaaactgcgccatttaaaccgcgaatatattttaaaacgcacggaagaaattgcacagttggaaaaagatattgctgcacttcaggatattttggcaagcaaagcaaagataaaacaaattatcgtggccgaattaaaggatgtagcaaagaaatatgcacagccgcgccgcagcatgctgctttacgccgatgaaatagaagaatcggatgtagaagaagcggtaccggattatcctgtacatttattctttacacaagaaggttatttcaagaagattacgcctcagtctctgcgtatgagcggagagcaaaagttaaaagaaggcgataaaatcacagagcagattgaagcaaccaataatacagaattattattctttaccaatcaagctactgtttataagacaagagccaatgagttttcagatacaaaagccagtgttctgggagattatgtagctgcaaaactgggaatggaagaggacgaagcggcaatttatatggctgctaccaaagcgtacgaaggtttcatgatattcatttttgagaacggtaaaattgcaaaagtagaaatgaatacgtatacaaccaaaaccaatcgtaaaaagcttgtaggcgcttacagtgataagtccccattgtttgctatgttttattgtaaacaggaatgtgaaattttgcttactaccacagaaggcagaatgctgttggtaaacactgcggccattcagtctaaaacaacacgttccacacaaggtgtggcaggcattacattaaaacgcggaaagatacttgcaaaagcagtggtgtatgaagatggaatgctttccaaccctgcacgttacagaaaaaatattcctgcaatcggtgcactgcctactgcacaggaatatgaaggagaacagctgactttgaaataaaaaaccgtttttgcagtgccaatagcaaagcaaaaacggcgggaaaaaaacggcaaacgcgtttcttcgtttttctgcctagatgtagcttttccaagataagaaactttatgcaaaaaatattttataatatgtggaaagtatgttgaaaaaatgtttcacatgtggtatgataatttaagttatttgatcgaacagatactcggaggtacaaaatgggagctttagaactaggctttggcatagtccttctagtttttgccgttggtattatcgccttggttcttcttcaggaaggtcagcagcagaatgaaaatagagttggcggaggttcttcttccgacacatttttatctaaaaataaaggccgtaccattgatgcatttttatctagatggacaacaataattgcacttggcttttttgcatttgtaattgtaattaatgcaattattttctttactacaggaagttccggccaataatgcatgtgaaaaccctcgtttggcatcgtgctaagcgaggttttttattgttaaatttttaaatccatattctattgtataaatgagtaaaaataggttaacgttaaatgataaaggcagggaaaaatatgacgatagacgatatgaagaccagaattttaactacgctgcaaaaagaacgcggtccgctgccatatgtgcagctacaggaaaaagcgcgtttacagcaggaaaatgactttgcaaaagcaatggcagagctgaaatatgaagataaaatttcagtagatgacaaacaaatggtttcccttgtgtttggggatatccgtgcgcgtgtatcttctttatcaaaagggttcgcgtttgtcagacccgaagaaggattcggagatatctttgtccacggcagtaatttgaaaaatgccatgcttaatgatattgttattttaaccaatattaccgagtctgaccgcggccgcagcggggaagtaaaagaaattgtggagcaaggcagccgctataccacaggtacactggtttataatgaaggttattgggaattcgcagcagatattccgattcgctataatctgcaagtcaaccgcaatacgctcaacggcgcacagattggcgataaagtatatgtgcacattacacgtaatccaaaaaacaataaattagttgccaatattgtaaaagtattcggaaaagcaagcagtgccaaagtatgcgcagatgccattgtagaacaaaatggcatccgtatggcttttccggaggaagtattggaggaagccagacaaattgctgcccgcggagtgacacaggaagacatgcaaggcagaattgatttgcgtgatgaagccatctttaccatagacagcgccagtgcaaaagatttggatgatgccatctcctgtaaaaaaacggaacatggctttgaacttggcgttcacattgcggacgtttctcattatgtcaaagaaggtagtgcaatggataaagaggcacaactaagaggaacatccgtgtattttgcagatagagtgattccaatgctgccaccggaaatatcaaacggggtatgctctttaacaccggacagtgataaactggctttttctgctatcatacaagtagatatggacggtgccattacgggctatcgttttgaaaaaactgtgataagaaccaaagtacgcggtatttacagtgaagtaaacgaaatttttaaaggaaccgcaacacaggatttgctggataaatataaacctgtgatgaaaggccttatgacagccagggaaatggcgtctatcacaaaagaacgttccagaagaaacggaaccatggaactggaaagtaacgaaccgaaatttatcttaaatgaagacggtatttgtattgatgtacagcctagacaaacaggtgaatcggaacagatgattgaacagttgatggttactgcaaaccaagcggcagcaaaattggcagaaaaagagcatcttccgtttgtgtatcgtgttcatgagaatccgaaatcactaaaaattgaaacgttaatcgaacttgtttcttctttggggctggatttctcaggtatcaaaaaggagaatccatccactgcggagtttgcggcaattttagaccaagcggtaggtacgcctgctcaaaaaattgtttcttatcaaattctgcgtaccatggaaaaggccagatatgccactgacccacttggtcattttggtttggctttggcagattactgccattatacttctccgattcgacgctatcccgatacagcaattcaccgtattttaacggcatttgtcaataaaaagggcagaaattatattaatgagcattatgcaacttatgcgcaggacagtgcaaccaattcctctgaggcagaagtaaaagccttggtagcagagcgcagtgcggaagattgctatatggcagagtatatgacacagcatattggagaacaatttgacggtattatcagcggagttaccaaccgtggattatttgtacagttaaccaacagcgtagaaggttttgtaccgatagatacctttgtggattccgaatttgaatttgacggtatgatgacgcaggtagaccgtttgacaggtgataaactgaccataggaatgccaatacgcattcaggttgttgcagcggatgtatcttcaggcagaatcgattttatgccggcatccgaggtcggtaagattataaaagaaaataaataaaagagagcgtaagccgtgatatgcggcctgcgctcttttttttataagtctactttttcaaactgtttggctgcaatgatattcgtaagaatcatagaaatcgcatagcatatgatgccgcctgccaaaaccggaagctgtaacagcaaatcaaaagaaatggtactgtttagccaatctgttccgggcagatgaggaagcacctccatagcaatcatacaaataacggccggtatgattccaaatataaatgctttacccgttttgtaagcagttttaaaaaattctgtgagaaatataaaatgaaagatggcatatatcataagtccaaatccgtagtaagcgatgtttggattgagtcctaccacattgctttgtgggagataaacagcatgtaaaattgtaaaaggaatcgaaaataacaattgactaagttgtgtaaccgcaaataaaaagcactttgaagtgacaatttttcttttttctatgggcaacaatgccatgtaataaatatcattggtttctcttccgtacatcatggtaataaatggagccaaacagccaaaaaagaatacgagactatacggataagagggaacgattaccaaagcacccagtaatataaatatataaagtgttgggtgtgcggcaagacgtaaatctttataaagacattgtatcataatcagactgcctttctgtacgtatcataatttgctccagagatagcggttctgtttcatcgggtttctttaagtgctcaaatgattgcagaaatgttgctttgtctgcgcaggccaaaacagtgctgtttttgatataacagatatcatcagcacattataaatgcaaaaatataagccgtaaatgaaagtcaatattcaagcccttgaatcctgtatccagagagaatttgctagaattgtttcaaagcattgtaacagacaacaaacttaatctttttttatttatattgcaacaggattggataaatatgccatcttacttactgtctgcattgtcactaattactatgtagaggatattacaactatgatttctgccaagataggaaaggaattttgtcacaatatagcagattttgtttatctctataatctcaattattcatttgaaatttaatctttcagaatttattctcggtcagccgtcattagtatattcgttaatggcacccaaaatactttttgtatataaacacgatatgtcccttctgtatagcaatctagaatatttgctctaaaacccattatcataagaaaagtgaagtggtgttaatgtattatataagataggttattttttattattcaatttattccttacaactataccaattttgtgtgataatctgttttatctttttcagtatgacatcaattaaaagttattctattgattttctatattatttttacatttattcagattttatctattgatgtggaattttccgtcaaccttgattatggagagtcaaaaatattttttaatcaattcagtatcgttcatattaatttttctaataaaaaagggatacgcttgtgtgagcatatcccttttttatcgtattttaagctgtatgacattttaacttgtctagtagagaatttatatggtgtgagacataagtaaagtttgtatatcgttataaatcgtgatacgtctgtgtgtttgaatattgtgggtctttttgtaagagtagcccctttaccaaataatggagctgtatattaccatgagcactgttaccctttttaaatatggaatattagacacctaaagacgctgatattattaactcttaattgacaacactttatctgttaaatttttttttgttatatagcaatacaagcagcagaacaaatccacctaataaaatacctaatagcagtaaaatttgtgtagtgtctccggttttaggggaagagagattactttttatttcttcctttaccgtatcctttttctcttcatcctttttctcttcgattttactcatttgatttttaggtattgaagaaatttcttcctgcatagtattctctgttatatccttttcaattggttgagatggtaccaacggtggctcatctttttttggatcattattttcgtgcgttatatagaattccattggtaggctgtattcttttttactttgatttacagcaagaattattgtatatgttcccggttctaaatttccatcacatataattatatccagcagagataaatcatcataatcttgtaaaacttccatcttagaacttgatggtgttatagaagtgccacttggatctaagacatccataacatcgattactatatcatttttttcaattacttgatttctaacatctttataaattagtttaaaagattttttggcatcttttacaatctccattttagcatcagtgatgtctatgttcgcaatttctaatggtactatttgtgtattgt

SEQ ID NO: 1168 - DNA, 9601 bp, Unknown
  16S sequences of unknown bacteria
ggctcggagaagattacactatgacaggcggttactatattgtcgtaaaaaacgacggcggcaaattacttttatcgaattttacacctattgattaaaaatttgtttaaacataagtatattttggtataatattaagtgatattttaagaaaaacaaaggagcacactatgcgacaagtatatttggactattcggccacaacaccggtaaaaaaagaagttttggatgcaatgcttccttattttacggagcatttcggcaatccgtcgagcatctacggaatagggcttgaatctaaggacgccatcacgaatgcgagaactcaggttgcaaaactgataaatgccgatcccgcagaggtgtttttcgacgccggcggtacggaaagcgacaactgggctgttttcggtatcgcagatgctcttaaagataagggaaatcacataataactaccaaaatagagcatcatgctatgctgcattcatgtgaatttctcgaaaaacacggttatgacgttacttaccttggtataggccccgacggaaggataaagcttgacgagcttgaagctgcgataacggacaaaactatcttgatcagcgtaatgatggttaacaacgaaatcggcacgattcagccgataaaagaaattggagctattgctaaaaagcatggcattgttttccacacagatgctgtacaggctcttggaaatgttcctatcgatgtcaaggatatgggcatagaccttatgtcgatgtcctctcacaagatttatggacctaagggcatcggcgctctttatataaggcgcggagtcaagatttcaaattatcttcacggaggagctcaggaaaataagagaagagccggtacggaaaatctgccgggtattatcggcttcggaaaagcagctgagcttgcgagagaaaattttgcagagcatgtaaaacattgcagtgagctcagaaactatttaatagatgaagttctaaagaaaattcccaatgtaaaagtaaacggaagtatggaatacagacatccgggcaatgcaaatcttacatttgagtatattgagggagaagcaatgcttcttatgctcgatgcaaaaggtatctcggtatcgacgggatccgcctgctcctcgacatcgcttgttccgtctcatgtactttcagcgcttggtattcctgttgagcagattcacggtactctgcgctttacaataggagattttactactaaggaagatattgactatgttgtcgaatgcctgtctgaaatagttggaacattaaggggcatttcatctgtaaattcaaagaaaggttggtagcgataaatggcactgtataacgataaagtaatggatcattttatgaatccgagaaatgttggagaaatcgaaaatccggacggttccggtacgtacggaagtcccgtatgcggtgatatgatgatgattacaatcaaagttgacaatgatgtaatcacagacgcaaagtttaagacattcggctgcggaagcgcaatcgcttcatcgagtatggcaacagaaatgatcataggaaagacaatagatgaggctcttgctatcacaaacaaagatatcgttgacgagcttggcggacttcctgctattaagctccactgctctgtgctcgccgatcacgcaattaagtgcgctatctatgattatgcacagaagaacggtaagacttatgcaggtcttgagggctttgatccgaatgcagatgatgacgatgaagaagctatcgaacaataatttgctttttgtagaatgaatgccgaacagaaaatgaaaaacaataaaatagttttaggcatgagcggcggtgtagacagtacaaccgctgctttgttattgcttgaaagaggttatgatgtatacggaatgtattttaacatacatgaaaccggtttcggcgggcgtgaagaggcgcgcgcggcactgcgcgaagcgtacaaagcctatgaaaacagtatcatgaaatgtgagcatcatttttcagaagacaagtttatatataaggatgcgtcgcatgagttccgagatatcgtcatttctgatttttgccttgaatacaagcgcggcagaacgccaaacccttgcgtaatatgcaatccaggtatcaagttccgcctgcttacggaaactgcagacgctttgggcgcgccgtacgtagcgacagggcactacgcaaaaacggtatacgacgaagcgcgcggagcacactttatagcggctacggcaagtaaaaaagatcagtcgtatatgctctacagactgccgcaggaaatcatatcgcgcctgatatttcctttggccgaatttgccgaaaaagaatccgtgcgaaatattgcgcggaaaaacggtctttcgtccgctgaaaaatcagacagtcaggaaatatgctttatagataacagcgtagattatgtcgattttataaaaaacttcaatggagacagcgaagataaaacgggaatagaagagggcaattttatcaatgcagaaggaaaagtattgggcaggcacaaaggtcttgtaaattatacgataggacagagaaaaggcctcggcattgcgctcggctatcccgcgttcataactgaaatagactgcgagaataacaccgtaacactcggaaaaaacgaaactctttttaaaactgaagctatcatctgcgatttgttttttacggagacgggaaacgcagaactgccttgcggaatagaaaaaagaaatttgagcgcaaaggtcagatacgctgcgccgagagccgcggtaaaaatcgtttcagcttctgacaaaaaatacgaaaaagtccagagcgctgacagtagcagcactgtactgaaaattatatttgatgcgccgcagcgggcgatgactcccggacagtcgctcgtcatatatgatgatgacggcgataaagttatcggcggcggcagaatccttaaagcgctgtaaagcgcttttatatttttaaaagaataaatgcctaaagcattataatggctctttcgggacagacgggagcgcagtagccgcaggtgaggcacaggctgtgatttatttccgcctgtcccgtttctttattcagcgatatcgcttttgaagtgcagcgcttgacgcacgcgccgcagccctcgcagtcgcctttgtctatatgcatacgcttttttgaaacatcgggtgcgtaatcacttctcattcggccttcgagataagtgcagatatcgtcgacttcgtgcttttttccgaaaccaatcatcattgcatctatgcctctaagcccgtacacatagtcgagtgcctttttatagcttccggtaagattgcctcctccgaaggctttcataccaagcacgccttttcctgctttcgcgcacttagctatagcagctgccatttcttctgccgtaccgaaaccatctccttttctgataccgagcccgcgaaagtttatgagagggaaaacgatatcaacctccggcatacgcgatacttcttcgcatacctctatatgatgagttgatattcccacggcctttataatacctttttcacgcagatcaagaagcgcctcgagcgcgccccttctaaatggaagctcccaaaggcctcttacctcatggagcataaagatttctattatatcgcggtcaagcgcctttctcgcgtcatcgacagcagtcatcatccattcacgcgtatttgccatagatttgctcgaaattacaagattatcgctttttcctttaaaagccttggccatatatctgtatgtattgtaatattcagctgtatcaaacaggtttattccctttgttattgcatatgatataagttcgcttccttcatcctccgcgagatttagctgcgtttcacccattgtaagtacgccgaagccgacctttgaaatttcaattccagtatttcccaaaaatactttttccattttttgctccttgctaaaaagttctttgctgcatgtctttaattttaacataaaaacacgtacagcagggcaaaataatcacaaaaataaagaaaaggagattttgaaatatggacatcggaaaaagcgcactcgcaataggtattctgggcggacttgctggagctgcagcatatatgatgactccgcacaagagtcattctgagctcgaaaagggtatgaggaaagcagcagacgagctttcgggagtatcaaaagagctgggaaaagctataaaatccataggcgaaacgataagctaaattataaagcggggagggaatatttcctttcccgtttttttacatttttttcttttaaacgattcttttatatgatataattaaaaaataagctatgcctgtaattttaggaggacatacatatggaaaaattaggattaaatgagatcagagagaagtttttaagtttctaccagagtaaggaacattacagaataaacagtttttcactcgtgccgcccgccggtgacaagagtcttcttttaataaacagcggtatggctccgctgaagccgtatttcgcaggaacagaagtaccgccgtcaaagagggttactacttgtcaaaaatgtataagaacaggcgatatcgaaaatgtaggtattacggcgagacacggaactttttttgaaatgctcggaaatttctctttcggagattattttaaggagcagtctcttacctgggggctcgagtttatcacggatgtgctccatatgcctttcgataaaatttgggctaccgtatatgaagatgacgatgaagcagttgagatctggaaaaagctcggactgcctgaagagcgcatagtaaggcttggaagagaagataatttctgggaaattggtctcggaccctgcggcccatgttcagaaatttactttgacagagggcctgaatacggctgcggcaagcctgactgcaaaccgggctgcgactgcgatagatatcttgaattttggaatcatgtattcacacagttttcaaaggaggaaaacggtgaatacagcaatctcgaaaacaaaaatatagatacaggtatgggactcgaaagaattgcctgcataatgcagggcgttgattctatattcgacatcgatactataagagctgtgctcgatgaggtgactaagaaagctggagtcgaatactgcgacggaaaagctaagacagatgtttccattcgtctcattacagatcacgtacgctcggtaacatttatgattggcgacggcattattccttcaaatgaaggccgcggctatgttttaagaaggcttttaaggagagctgcgcgtcatggcaaaatactcggcataaagggtcctttcctcgcagacatctccaagaaggttatagagacatcgggcgaagcttatcctgagcttgttgaaaagagcgactatatcttcaaaattctctcgatagaagaagagaagttcgcttctacaatagaccagggcacagtaataataaatgaatatatagatgagcttaaagcaaattctaaaacggtgctttctggtgacaaagtattcaaactctacgatacatttggcttcccgattgagctaacacaggaaatactcgaagaaaacggctgtactgcggatgtagacggatttaacgaaaatatgcagcatcagaaagagcaggcaagagccgcaagacgagagggtgaagaagcgggctggaaggaatctgtaggtcagggactttcacttaacgctacagaatttattggctatgaaactctctcaggaaccggcaaggttgaagctatatttatcgctggaactccaagcgatagcataaacgaaggggaaacgggcagaatagctcttgatagaacacctttctatgcagaaagcggcggacaggcctcagacctcggaaaaatatatggtgataacggctttgaagccgatgtgctcgaagttacaaagctgcaaaacgtatttatccacagaatagatgttgttaaaggaacgcttaatattgatgataatgtaaaacttgaagtatgcgttaccaatagaaatgcaacagcaagaaaccatacggcaacacatcttcttcataaggcgctcaaaactgtactcggtgaacatgtagcacaagctggctcaagcgtagaagctgatagtctcagatttgacttcacgcactttgaagctatatctgacgcacagctcagagaggttgaaaagattgtaaataacgaaattatgaaattcatacctgtaacgacagatattatgtctatggaggaagcttctaaaagcggtgctacagctctgttcggtgaaaagtatggaaatgaagtaagagttgtttccgtgggagatttttccaaagaactctgtggcggaactcatgtagcaaattcaggtcagataggtgcgtttaagattctctccgaaaacggagttgctgcaggggtgagaagaataacggctatcactggcacgggcattctcgatatggcaactgatgaggaaaatgttataaagtccgcatctgagcttcttaagacaaatacttcgcttcttcttgaaaaaataacggctatgaatgaagagcttaagagtaccaagaaagagctctctgaactcaaaaaagccgaaatgaacagtgctgctggcgaaataatagaagaagccgaaacaataaacggcgtaaagtttatcaccaagaaatttgagggcgcaagcatagacgatatgcgcacgatttcagatgatgtaaagaagaaaaacaagggtgtcgtaatggtatttgctgcagtaaacgcagacagggtaacatttatagtttccgtgacagatgaccttctcgacaagggttatcatgcaggcaatatgattaaacaaattgctgcggctgcgggcggcggcggcggcggcaaagctgatatggcacaggctggagcgaaagacccttcaaaaatcgcagctgcatttgaaatagcaaaatcactgataaaataatattacagatatgttaaataacgcaaaagcagttgtacttttttatggaggtgtgtataatttagttaggctaaagaaaggagagcggaaagttggaaagaaacactattatgtttaatgccgcagacaaaggcgagcttaaaacaaccgaagatatactcaaaacagtttacgatgctttggatgaaaaaggctacaatgccatcgaccagatggtaggttatatactttcaggcgatccttcatacatcacgagtcataacaacgcaagaaatgttataagacatatagaacgcgacgatttggtagaagaattgctgagagcatttcttaaaaaataagtaaaaatacattaaagcggactaattgtccgctttattttttgtatattaagagcagaaaataattatagaatacgaaaataaataacatataggagagaaaattcaaatgagaaaaattgcacttgatgtaggtgacaaaactataggcgttgccgtaagcgacgagctaatgctcacggcacagggtgtcaccactatagaaagaatcggtataagaaaagactgcggcagggttatcgattacataaaagaatactactgcgatacggttgttgtcggtctgccgcttaagctcgacggcacagatagcccgcaaacaaaaaaagttcgtgaatttgcagaaatgctcgctaacaaaatgcgcagctccggaatggcagatatcaaaatcgtatttcaagacgagcgccttacaacagtaatggccgaaaaagttcttattgaagccgacatgcgcagaaacaagcgcaaggaagtaattgataaacaggctgcagttattatactacagagctatcttgaaactgtaaggtaattaataactaaagctgttgaagagggaactttgattcttgttttaaagcctgcaactattcctaaaatcctcattttcggaatagttataaccaaaaaaataaaaacatcagaaatttctttcaaatttttgatgttatcattcgctcaataatcttgatccatataagctgtatttatgttttttgtatatttctgatcttattattctcgcttaattattaataaggaaatctaatatgttacagccgctgcttccttcattatttataaagttctgtatatccacatttcgtacaagttattgttataaatttcttattctgtacatcaaatatttttgcgaaatttcctcctgttgcctgaaactgatagctctcaaaatttgtatgtccacattttgcgcatacatactgttttttgtccataaatttttttctactatagtgcttgatagctttttatttatgcaaaagcccaaaacctctaaattttaatgctttcaaaaatcaaggctctatttttcgatttaagcgactttttttgatttagtcgataaattataccttgaattttactttattctttaacaaatcctcaactaagtacaaaataagcctatatttaaatcactgtcataaaatttcacatcttattataagatgtgaaatcaatttaatgataaacaggtatctgtatagtctgacccggatatatatcagccgcagtaatatcattaagattgcatatctgatgaacggctctgcgagtgtccatatctgacggcatatgttctttagcgagctgccaaagagtgtcgccagagcatatttcaacagatttatattccttaacagtaagacttgaagcatcataaagtccaagcatcgtatttgtactgcttactgtgattataatcatcattgctataaaaaccgtaaatctgattctcgatttaattctgtaagttttagccgttttcatatatgttccctcctgttcacatttgcaaacaaatgttcgtaacattataatatacgaatatctgttcgttgtcaacagtttttgaaacatttgttcgttttttctgggaactttatgaaaaacaagcctccgcacttctcacagctaaaattcctttaaagtcagttaaagtttcatcatttttacatattttttatctatccattcatgtatctttttatgtttgaatactcctataatacatagaattacggcgattgcaaagagaattacagcctccgtatagctgcctgactcgaacatcgaccccataattactgagcctatcatagctggagctctgcccacgagcgaaactataaggaacggcataaaacgcatgttcgacacacctatagcatatgcaaataagtctttgggaatgcccggtatcagataaataacgagtataaaaagaagtgcgcgcttgctgttaagcttttctatataattattgagctttttttcaccgaaaattaaatacatagcgtcttttccgagaattcgcgcaatataaaacgtcattatcgtgccgatagtcgcgccaatcatagtcagcaaaaatccgatcccaaaatgaaaaacatatccgccagcaaactgaagcacctttgcctttgccatttattccacccccacttctatcgcccagtcagga

SEQ ID NO: 1169 - DNA, 10787 bp, Unknown
  16S sequences of unknown bacteria
cgtggctgtgacagaccggcgaggcaatggcgatatgcgtgacaaaccggcgagctgctgaccatttttggccagagcctgaccgatttgtcgcgtatacggccaggagctaaccggtctgtcatgcggacggagccaaagccgggcggaggtgcccctccgcgccactttctcgcttgcgctgcggcatcgtataattaagcgaatgttgcagggggcaggggaggttcctatggacatgcaaagggttcagaccatcagcacggtatgcggcgggtgccacaacacctgtccgatgttcgtcgatgtctccgatgggcgcatcgtcagggcgcgcggggttcccggaaacaagcgcacgggtggtgccctgtgctcgaaggggctggccgccgcgcagattgcgcacgacccacgtcgcgtcctgtatcctatgcgccgcgtgggcgagaagggcagcggcacgttcgagcgcgtttcctgggaagatgccctcgcgctgctcgccgatcgcatcaagagcgcgcagaacgagcatggcgcttcttctgtgcagttcatccgtgggcaggcctgcggctggggcttttcctatgacatgacacagcgcctcgcgcactcgctgcgcaccactatcggcatgggcgcctccgagtgctttgtcccgcgtgcggtcgccgagggcattacctatggtggcatgccctcgttttgcgattacgagaacgtcgatctaatgatcttctggggcaagcaacccgcgttctcgtgtgcccccgcgcttcggaagatctacgacgcgcaggagtgtggtgcacgtctggtgtgcatcgacccgctgcatttccacctctcggcgcatgccgacgagttcctgcaaccagagccgggaaccgaccttgcgctcatgctcgccatgatctacgtcatcgtcaacgaggggctgtgggacagtgcgttcgtcgacgcatacaccaacgacccgggccttgtgcagcttactcgccatgtcaacggcgaaaacaggctgggaatcgcctacacgcccgagtgggcggagcggatcagcggcgtcgatgccggcaagatcgccgcgctcgcgcgcgagtacgcaacgacaccgcgcgcgtcgattaccacgggtcatgggctcgaaggcagggtcaacgtcacgcagacctcgcgtgccgtcgcgatcctgcgctcgatcacagggcatttggatgcacccggctgcgacctgttcaccccgaagagcccgccgcgcaaccctaacttcacgttcatcgaccatatcgtcccagactatgctcccgagcacccgaccatgatgttccacgttccacccgtcaatcccgagcagtctcgttacccgctgctgttcggcgggcaggggctcctctcgacgcccgacgcgctgcgcctcatgcacgaggggaaggtcgccgtgagcatcgtgcagggggcgaaccccgtggcaacgcagccgcagcccgacgtcacgtctgccgcgtttcgaaacgtggggttcctgtgcgtggtcgacccgtacatgggggagaccgcacggctcgccgacctggtcctgcccgccgcgacgtatctcgagagaacggagcccgagtggttcaagtcggactcgtggtatccggagctcacgttgcgccagaagtgcgtgcaggtgggcgaggcaaagcccgacacccagatcatgatcgagcttgggcgcgcgctcggtcttttagaggagtttccctccgaagacatcgcctactacatcgacgaggacctcaagccatctcatatcacgttcgagcagctgaaggagcatccccacgggctggtctacggcacgattgagtaccgcaagtacgagcgggcgggttttcgcgtgccgggcgggaaggtgaacgtctggtctgcggttctggcggagcacgggttcgatccgctccccaactgggaggagagctcggaatcgccgcgctcgaagcccgagctcgcgcaggaatacccatatgtcgtcttcaccggcaggtcgggtcccatgtacgtgcacgagcagcggcgcaccatcccctggctgcgcgagatgcagccccgcggtcgcgcgctggtcaacacggcgcgtgcgcgcgagctcggccttggcgatgacgactgggtccgcatcacctcgccgcgcggctccatcgacattcaggtcgaggtgtcgccggtgctcaagcccgattggatatacgtccccggaggctggacggattccaactacaactatttggggatcgacgaggacctcgacccgatttcgagtcaggcaaactacacgatgtgcctggggcgtatcgacaagattgcacgtcccgcgcacgccgaggaggcgaggtagcatgcagtacgcgtttcacttcaacgtcgaccgctgtgcggagtgcttcgcatgcgaggtcgcctgcaaatccgcgcacgaccttgctccgcatgtgcaggagcgccccggggcaaaaggaccgcgttaccgccaagtcgtcgagctcaaagacgagcatgctgcgggatgccccatccagtacgtgtccatggcgtgcatgcactgcggctccgccgactgcatggcggtgtgtcccgcgaaggcgatctaccgcgacccggagttcggagcggtgctcgtcgaccacgacaagtgcatcggctgcaggtactgctcgtgggcgtgcgagttcggcgcgccgcagttcggggaagatggccgcatgcagaaatgcgacatgtgcatcgaccggcttcgcgaggggctccagccggcctgcgtcgagaactgctgcggcggtgcgatcacgttcggcccggtctttgacaacccgggcgacgcgcgtgtgaatgcggcgcgcaagatgatgagaacgggagatgacgagtagcctacggggcagtgacgcgagtgcgggcgagcgccgtgaattgcccctcatctgcttcacgttgctgtccccggcaagcgtcggggtcgtgtgtggcgccatggccatggggaagacggtggattttctcctcgccctcgtcgcgctcgtgcttgtgagtgttggcatggcgggctcgattctgcacctggcgcgtccgctcatggcgcccacatcgcttcgaaacgttgcgagctcgtgtctttcgcgcgagattgtcgtggtgtccgcgtattgggcggtggcgctcgtctggtgcgcgtgttgcctgctcgcgccggggctcgcagttctcgcgtgggtgctctgcctctgcacgatggcgatggggtgcgcgctgatcgtcgcaattggcaatgcgtatctgctcgcgtcgcagccggcttggaacgggcacgaggtgtacatcgagcttgccggcgttgcggcaagcgtcggcggccctgctgctgcaagcgtttcagcgctcgaggcgcttttccgcgggagcgcggcgggtcctctgatcgcagcgattgcagcgggcatgctcctttcggcagtcggtgcggcgttggggtatggtgcccgcagagcgaggacaaggaggatggcgcggctggcacgcgctgagcagaagactggcagcttcgcccgaaacccgcgcgttctcgaggcgcaggagaggcttcagggtctcgtgacgcggtaccggacggtgcatgtgctctctgcagccggcgtcgtcgccggggtggtgcccccggtggcacttgccgttgagctcgtgtcgcaggccctcgcgcgcgacgccttctatcgcctgcgcgtcacttcgcgttatgctgtgcgccttcaccgctggtaactgtctgctctttttggcacgaggggccgtgggtatcgtgccatttttcgcggctcgtccgttgtccgtgacaaaccggcaagctattggccatatttgcccagagcctgaccggtctgtcacgtatatggccaggagctctccgatctgtcacgcggacggcgtcgatgccggagccgtcgcggagccagcgccggcgccggggtgtccctccgtcccaaactgacacgatacccacggcccctcgtgtcacttttcgtgaaagcggatacaataggcgctcgacgttaccgtttgagtgtttgaggggtcccgtgaaaaccgtcaacgtagttgcagcaatcatccgcaagggcgacaaggtactggccacccaacgtggctatggagaattcaaagatggctgggagtttcccggcggaaaaatcgaggcgggggaaacgcccgaacaatccattgtccgtgagataaaagaggaactcgatgccgacatccgggtcgattcgcacttggtcgacgtgagctacgattacgacagcttccacttggagatgcagtgcttcgtctgcgagctggtaaacagcggtgtcacgctgctcgagcacgaggcgtctgcctggcttgacttcgatggtctctattcggttgattggcttcccgcggacaccaaggtcgttgatgcgatcgtggaacaccgcatcgtctagtctgattcatcttccgctagttcctcgaaatcgctgaggaagaaatcatagagatcgggccggacgggttcttcgagacgatatgtgatctcgactgctgcggcagttgcattgcgcatggtgaactgctcgaatttccctgtcgggtgcatttctccgagaaaatagaactcggaatccttgtctttgtcttttcgcacgaacagaaagcagcggatgccgttgctctctgcatctttcagtctcacaatctcgggggatgagagagtccttttgttcttcgagatggcgacgagctcgcgatcgctcgtgaaccggtcctcgtactgcgtcgtgatgctgatcgaggggtccttcttgtaattgatgaacacggggaaggtgttcgtcgccttgtcgtagaaatacccgccgacgttctggaagttcggctccttttgccagtgaagaaaacggcagacctcttcgcgggaatacgttgcatagagcacgaagtccgtatccttataggtgtcctgataattgtcgcggttgcgcttgattccgaacctgatcgtgtccatcacacaggtgcggaaggtttcgtcttcgagcgcccgatcgaatcgctcgctcaacatgactcccgagtcgccttcggttatcagctcttctccagatttcgagaaacttccgtcgagtatcgcgaggacggaacgattgcgctccgtagccgctagattggtcatgcggcaatctgtccgcgtgccatttcttcgcgcttcgataagacgctcgagcaccatcagatcgtcaaaccgtttcccgctcgcgagcttctgagagaggtacttcagtatgctcagctttttctcggagaaccttgactgccaatcgacttcgtacttttcgaggaacgcggcgtatgaaccgtacttcttgatgataagcaacgggtctatggactcgttttcgtcgaattgctcgagtgtggggatatgccccaggacttgcttcaagtgcagatattcgtttcgaatgaggcgggcgctgtcgaacttcccttcgtcgagggcgtggaagatccgcgcttcggagatgcggtcgaagctgatcgtcgaagacccagggataatcgtattgccttccttgacgactctccgaagcgagtcttttttgtaagtgcggtcacccgacagcgcgattgggacgagatagttctgttggtagttgccaataaaatcaagcacgagcacgtagtccttgccgggcgattttctgaggccgcggccgagctgctgaacgaacacgattgcagactcggtcctgcgcagcatgatgatctggttgattgagggaatgtccacaccctcgttgaggatgtccacagaaaacaggtactgcaagtctcccgactccagtctgccgatctgccgttggcgttcttggtcgctgtcgtgtccgctgattgccgcggtgcggtagccgtgttcgttgaagagccgagaaagccttgccgcctcttcgttcaggttgcagaagatgaggccacggcggtcttgcttgttgaccgaatactcttcgatcttgttcatgacgtggttggcacgctccgctgatgcgaggcggttgaagagcgacggatcgtcgaccgtgtcatcgtctatctcgagatcggcgatgccaaagtagtgaaagggggcgagcatgtcgttctcgagtgcgtcttgcaacgtgatgcgataggcgatcacgttgttgaacagccgatagacgtcgtagccatctgtcctcgagggggtggctgtcatgccgaggcagaactttggctggaaatactcgagaatcttttggtagctgctgctgccggttcgatgcgcttcgtcgatgatgatgtagtcaaattcctccgggtcgaattcctcgagatgccccttcagcgtcatgaccatggcaaacatacacgagacgttcggtttgatagaaccgcccgtgtataggccgtatgtgtggtcgtcccccagaatcgtcttgtagcttttcaaggatgcctgcaagattcgttcgcgatgcgcgatgaacagcacgcggctcggatggcatttctgcacgtccatagcagaaagaaacgtcttgcccgtacctgttgcagaaacgagcagggcgcgcggctcgtttcgttcatgaaggaccgcgagtgcctcgagtgcgagctgttgcatcttgttcgggcgaatggctcctgcttgggcgccgggggagccggacgatgaattgggctgcgacggggagaatacgtacgctgtatatgcttgcgcaggttgttggcctgccaatcgctcttcgcgatattgctgatagccttcgatccaactttgggtgattgccgtggtctgctcgtcagcccaaagcgtctcgaaagcggcagaggcttctttgaagatctctccgttttcgaatgagcggaacaagacattccactcttggttgcaggtgagcgcactgtccgtcaggttcgaactgccgatgatgatcgtcgagatcccgttgcgatcgaacaggtatcccttcgcgtgcaagtcgccctgaaagacgcggcactcgatattggggtattcgaggagctttttcagggcttcggggtcgttgaagttcaggtaggttgaagtgagaattctgcctgggacgttttggcgtttgagctcgttgagcagctccacgagcacttgcaccccgctcgaggtgatgaaggcgacggagaaatcgaatcttgcgcaattggagagctccgtcttgagtatcgagaggacgttgctgccggcatgcttgtcgtttgtgacgatgcgcggcatgtagcggtcgtctgctgctgggttttcctcgatgaagctcgatttcagactgttctcgaactccaccatgttgtacgtgcgcgcgcccatgagatcccctgaaatagtgactgcagacaatgatgaggatccggcaacctgtgcttgttgaaaaggaggcaattccaggagcggctgcatgccttccgaagccggtgcagcgtgcaggacaattcaggcgaacgtgatcttgctggcgctccttgctgccaactcccgcacatacttcaacattggaataaactacaacctggcgcagcttgtgggatggcctgcgtccgtcatgtccacgccgctattggcgcatggcgagtaaccgcaagtagaaggggagtatcgtgaacgacaacgttgttgcatcaacggcgcgtgcgaggggcctgtgccatctggtcttggcggtgggcatcgcagcgctgtgcgcgctctgcatcggcttggtggggtgcggtgggccgtccccgacggacgtcaccaaacaggcaatcgaggcggtgaaggcgcaggataccgatgcgctcgcgaaggtctatgcgggggatgcggcaaacatatccaccgacatgtttgcctccacgtcggaaggcgaggagctcgcggattcttcagacctgaccgacgaccagcaacaggtggtcaaggacttctacagcaagcttctggacttcgactataccttgagcgacgagcaaatcgacggcgactcggctacggtcaaggtcaccatcaacacctacaacttcggcagcgcgctcaacaaggtgttccaggatgcgctgagcaccgccttcatgtacatattcagcaccgatcaggacgcggcgcagaaggccaccacgcaggcgatgatcgactcgctcgacacccagatgaagagcctgaccgacaaggacaagagcgcaatcgccacggtgtcgcttgagaagcaggatggcaagtggatagtccagccgttcgatagcgacttctacaatgccctgaccggcggcgcgtacgacctttcgaacaacatgcagaaatcgttcggctcgaacagctagtcattcgcgccggccgttcggcatgcatcgctcttgacgcagcgcatcgagtagcgcaataatcctcgccgctagttgtactaggaaaccaactataaaaaactaggagtcttcatgcgcaatttctccaagcaaaacatcttcatgttcatcgcggccctgtactgctcgtgcctcatcgtctcgaacatcatcgccggaaagaccttcgcgtttttcgcatggcagctgccctgcgccgtcgtgatttttcccatcgtctacatcctcaacgatgtgatgacagagatctacgggttcaagtccgcccgcgcggtcgttctgaccggctttttcgcgaacctgatcgcggtgctcgcctatgcagctgccattgctctgccgtcctcgcagttcttcgacgcgcaaagcgcgttcgagaccgtgctcggcagcacgccgcgcctgctcatcgcgagctttgccgcctatcttgccggttcgctgctcaactccaagatcatggacgccatgcacaggcgctggcccaagttcctcatggcgcgctgcatcacctccacgctcgtgggcgagaccgtcgacgcggcgatcttcatcacggtgagcttcgtcggcaccatgccgctttccgcgctcctcacgatggtggtgctgcaggcgggcttcaagacgctgtacgaagtcgtcgtctaccctctgacgcgcgtggtcatctcgcaggtccgcaaactccccgatacgttgcccgcaatacagcagtccgagagcacggcagctgcgaaatagcgcataggatcgctcaagcacgggccaggcggctcgggcgatgcggggcgtcacatgctccttgcttgcgggtcgtgtcatgcgcgctgccctataatacgggcaagcaacgcgcgttcacgaccaaggaggcagcatgcaggtgctcgtggtgaatgctggcagctcttcgctcaagtgccagcttatcgaaaccgacggcaaggtctcgctcatgaggtgccaggccgagcgcgtgggcaccgatgcggccacgatgagcgtctcgtttgcccccgatttcgcgaagcgcaccgtccgggtgcccagcctgtcggtcgaccagtgcctggccaagctgctcgagtgcctgcccgacgatcccgatgcgcccatcagcgggctcgaccagatcgacgccgtgggcaaccgcctggtcgcgggtggggagtacttcacgcgcgccacgctcatcgacgacgacgcgcgcaagaagctcgccgatatcgaggtgctggcaccgctccacaaccctcatgcggacgcttgcatcgacaccgtgcgcgctctgatgcccaacacgccgcaggtcgccgtcttcgacacggcgttccatgcgacgatgccgcccaaggcgtacatgtacccgctgccgtaccgctactacgaggactatcgaattcgccgctacggcgctcatggtacgagccatcgctacgccgcgcagcaggcggcaaaccttctgggtcgtccgctcaaggatttggggctcatctcgtgccatcttggcaatggcggctccatcacggcggtgaaccacggcaagtccatcgacacgacgatgggtttcacgccgctcgaggggctgatgatgggaacgcgctctggcagcatcgaccctgcgatcgtcacctacatcatgcggcgcgagcaccgcacctacgacgagatggacgagatcttgaacaaggagtcgggtgtcttgggcgtgtcgggcctgagttccgacatgcgcgacgtcttgcaggcggcaaacgagggcaacgagcgtgccgcgctcgccatcgacatgtacgtctacaagatccaaaaggcgatcgggtcgttcttcgcggtgatgacgcgtaccgacgccgtcgtcatgacggcgggaatcggggagaactccgccgagatgcgcaagcggatcttctccgggctggcgcacatgggcatgatcttggacgaggaccgcaaccaggtggaaggcgccatcggcgtgaaccgcatcatctcgatcgacgactcgcccatcaagatctgcgtggtcacgaccgacgaggagatgcgcatcgcgcgcgagactgccgcgcttctgcagctggtctagggtcacgacccccgagcgcattccacccactcctcgcgtgagatgcgtggcactgccacatatcccgtgcgccctgcgccccgcatacgcgagaagcgtggcactgccacgtttctcgtgcaaagagaaggggaatcgtggcactgccacgattcccctgcaagaagcgtcttcgatgcagagaacgccgtcttttttgttgccttacgccttgttgcggttcacatcc

SEQ ID NO: 1170 - DNA, 32759 bp, Unknown
  16S sequences of unknown bacteria
cctttttccgccgtcaaaatgggcgggcctttttccctccgctgcctatcgccgctctgttcccccgcagctggcgtgaaacaggctcaaaactatgcgggttgggatgcttcaaagtggctttgatggcttcgcggcgcagaagaacaggcttgatttttcttctgcggttggaataaaccatactcaaataatgcgagttgggatgtttcgacgtgaagtggatattcctgcaacacaaaaggccagcgtggtttcaaacccacgctggcctttttatgcgagccatgaggcctgtcgccgaatggcggtcttttctattcaactaccacgaagccacaccagaccggcgagccgcgaggcctgtcgccgagcggcggtaaaaccacggccaactcgcatgtccctctacgcccctgcgcgcatcgcgcgcagtccgaaaggggctcagcccctgagggtatcggcgtaggagttgatgagctgctgggtgcggcggagggtgctctccttggaaacggcgcgccattgtgtcagataggcggcgtaccagttttccagcgcggcggccagctcccagccgtcccgatggggaagctcccggccttcctgctcggcaaagatccagcagacgatgtcgttgaaaagcttcgcgccggtggcggaaatttccaatgcctgcagaatggaacgtttgtccacagccatgtggagcgcggcctgcgccagttcgtccagagccgcgtcaatggcggcgtttgcggcgggtacctgcgcggggtcgatctccttcagctgctcccgacgcttctccggatcggcggcttcgatccaacggacagcgttgaaccacgggaaaatctcgtggtcggtcaggtggacgaaggctttcatgaaggttccttcccggtcgccgtactcaaagagggaaatggcctgattgatctcgtcaaagggcacgttgtctgcattccacgcgaaagccgcgccgtagagaatgcccggtacggaaaaccacgggtggcagatgtgaccgtagtcgccccagtccgtgttcagaaggccgatggcgtggtatttgcgcccgtggccgcacatggcccgattgttcttgtagctgttctccgtcaggggcagccagcggttccacgtgcaaacgccgggacagacgtactgggtcgcgcccatctgggccagatcgcggacttcgttttcccgctgctcgggcagatagccccagttcagacagatcacgccttcgggaatttccgcgtaggcttccgggtgccgccacatgatgtcgccccagaacatgggggtcacgccctgcgccagcagccagcggcacagctccaccacatgggccatgtagagggcgtgctcgcccttttcgtccgccagcgccttgctgcggcccttgcccagatcgaaggtctcatcgcagcagatgttgaactttttggacgtgaacagggcgcggtattccgtaatcaggctcttgatgaaatccacggcccgggggttggagacgttcagggtgtgatggtcgccggcgtaagtgtagctgaacgggatcttttccgaatcgggcagttcgcacaggtcgcagcaggttttggtgctgagaatcctgtacatgtggccgaagctggacagagaaggaatcagttcgatgtgccgggcacggcagtaacgatccagttccatgatctcctcggcagtgaggggcgtgtcatcccgccacgcttcgctcaggttgcggaagagataggtatgctcgatgtacagctgccattcgttgatcttgtagcggcacaagagatcggcgtagcgcttgagtgtttccaacgtgggcacccggccccgggagcagtctagatagtaaccgcgatagcgcaggtcgggcttgtcctcgatctccagcgcgggcagacgggctccgttgcgctggaagcactggctcagcgtcatcacgccgttcagcaggctttcgtcgctgccgccgcagacgagcactttttccggcgtaatggagagccggtaactggtttcctccaacgacgcatccgcccggaggatcacgtcgcccggctgggccgttccccggagaatggccggtttcagtccggtaaagcgacgaatgtcctcctgcagcatctgggcgtagagaaacgcggaaggctccgtgttttccagcacgatgcgggtatcatagcgcaggacgaagaacccctcgcccttgcggacggagtggggcatgggcagaaagtccatggtcacacctcctgttcccggatgcggaaggtcttgatttcatagggcaggatggtgaaatgaatttggccgttttcgaaggaagcgtccgctttcttttcctcgatgcagttgcatccctccacggaaagaacgggccgattccagcgcaggaaggtctccgtgcgggcgttgtcgcattcgtacagacggacgatccagccgtcgccgtcctcggcctgcttgatggtctccagcaccacgttgggcgcgcccacgctggccagagagtattccgaaccggccttgccgcctcggaaggaaagcacgggctggttcaggcaataagcctcccgaacggtgccgttgcgccagtccccggcgtgggggagcagagcgtaggtgaagaaatgctcctcctgatcggtggtggggttgggctcgatgccggatttgatcagggtcagcgccatgctgccgtccagcacggagtgaccgtacttgcagtcgttcagcaggcttacgccgtagtggccctcgctcaggtccatccacttctggccgcagctttcgaaacgggccacatcccagctggtgttctgggtgatcttgcgcttgaggttgccgaactgaatatcgaaggtggcctcgtccgtgtgaacgtccacggggaagtgaaccttgagcaaatgctgatgctcgtgccagtccacccaggtttcgaagtcgatgcggcggctgtccgcatagaagcggatggtctgccggatcaggctgttggagaccttccgttccagcttcaaaaccgcgcataccgggccgatctcttcccattccaaccgctgcaggtcggtcacgtcccagctcttttcggtgtaatagatgtcgatgtcccagttatcgtaataaatgggcttgtcctcgtacatccgcatcaggttgcccttctgaccggacttgaagacctcgcggcggttctccttgtcgtaaagacgggcgaaaaggccgttttcatccagctccacggtgtagtagggcgtttccagatggcggtcgtccgacagagtgaagggagacggcgcggaaacggcttccgtgcgggtctgataggtgcgccagcccttggcaggcaggtctttcaggctgacgaacgcgcccttttcggtatgctgcacgggatagagcgttccggcttcgtccaaaagcgcctgaacgtcggtctcgcccagcggaacgatctcatccccggcaaagcccttggtgttgaagacggtcagaccgtcgccgggcgggcacagggcggccatgcgctcctgctccagccgggcgatggtttcttccatggcggcgtattccttcttggtgacttcatagacctcatggatgctggaaccgggcagaatatcgtggaactgattgatgaggatgcccttccaaaggcggtcggtctcgtccgccggataggggagcagcccgctggccagcacggacagcagctccagatccatcatgtgcagctccgccttgcggttggaacgcttgttgcgcgccatggaggtataggtgccgcggtggtattcgaagtacagctcgccttcccacaggggcaggcggcggttgtgctccacccgctgccgcagttcgtcaaaataggtgcgggagaaggcctgacgcacccggggaaggccggtcacgccgtgttccattcggtcggaggtttccagcatggcgcgggtagggccgccgccgccgtcgccgtagccgtaggagaccagaatgtcgttgttgatgtccttgttctggtagcgcttccagccgccgatgatcgcatcgggatgaagcatgccgttgtaggtggtgaagaagctcttcttttcgtcctgcccaacgcccagcgtggtaatgaggtgggtcagaacttccgagccgtcgatgccgcgccagcggaaggtgtcgtagggtaccttgttaaactggttccatgccagcttggtggtcatgaaatattcgatgccgcattccttcatgatctggggcagggctccggaatagccgaacacgtccggcagccagaggatgcggttctccacgccgaattcgtcccggaagaaacgcttgccgtggaggaactgccgcaccagactttcgccgctggtcaggttgcagtccgcttctacccacatgccgccctccggctcccagcggccctcccgcacccgctccttcaggcgcgcgtacagctcgggatagcgctccttgaggaaggcgtacagctgaggctggctggacatgaaacggtagtggggatattcgtccatcagcttgagcaccgtggcgaagctgcgggcgaccttctcccgggtctgggccaccgtccaccaccaggccacgtcgatgtgggtgtggccgatgcaggtggcgatcacgtcgtcatgaccgcccagctcctcgtagagatgcttctgcagataggcgcgcgcctcgtgaacgctctgctcaaaggcaggggagtagggcgtgcggagatccagcaggttgatcgcgtcgttcatgacccgttccagatccatccggctctggctttcggcctccagccgggggaacgcctgcaggggcacctgcagatcccagtacaggccctcgatctccgggtcgatctcccggaattccacgatcaggttgaactcggtgtgcagggtgccggtgtaggcctgcagctccagacagaggggctggcccgcctcggcgctgcggctcagcagcacgtcccggtggttcatgtcgatgccctgtacgatttcgccgttgacaaacagcaggaactgcgggttcttgccgtcgtcccattcgtcgatctgggtgcagacgtgcatccacaggggcttgccctgaaagctttccggaacggtggtatcggaatagaaccagtaatgctcgtccgggccgtaccagtgcatgttccggcagtcaaagggagaaaaggccgccgcgtcatgccgcgcgtcctcggggtgaatgaaattgcctttcttgtacatccagccggaaatgggggcgcgctgacggatgctcagcttccgcagctcgtcgcagatgccctggatccgcttgtccagataaaacatgatttttgacctccgcgtgtttcagaatgggacatggggttcagttgtgttctttgacaaagcgcaataattcgtccaccgtggtgaacgcaatgccggtaacggtgtcggcgcagccgtagtaaacggcgatgcggcccgtggcactgtctgtcagggcggcgcaggggaagaccacattgggcacgtcgccaacgcattcgtacagctcccaaggggccaacaggtagtccttggagcggtatttcaccttccacggctcgtccagatccagcagggccgcgcccatgcggtacacgaagccgttacaggtggtgattacgccgtgatagatcagcagccagccctcgtccgtctcgatgggcgcggggccggggccgattttggtggactgccaggcggattcgttgcccttgacggtgcccatcatgtagcggtgacggccccagaattccagatcagggctctggctgacgtaaatgtccccgaagggcgtatggccgttgtcgctggggcggctcatcatcatgtacatgccgccgattttccggggaaagagcaccccgttgcggttgaagggcagaaaggcgttttccagctgatggaaggctttgaaatcctccgtccatgccacgccgatggtgggcccgtgatagccgttgcaccacgtgatgtagtatttgccctccatgggggtgatgcgcgcgtcgtagcggtattcgttcaccgcgatctcgctgtccgcaccgataaagtgaatcggctcgtcgtcgatctcccaatggaggccgtcctgactgcgcccggcaaacagatccatgctgatggagcggctgtcgcagcggaaaacgcctgcaaagccgccgcgaaagggaacgaccgccgagttaaatacgctgttggagcgttggttgccgtggcggccgataatcggattgcctgaatagcgccagatcggctccttttctccggcaggcttgtcctcccacggcatattggcaagcgccggcccgatgatttttgccatgtccgatctcctccgtgaatgcgatcgattggaagtataaacgaaaatgaatggaaaggcaagcccgcgcggctcttgggaacaagctggttttcccgcttgtgcctgcggcgccgcgcgggcggatgggcggaaagaacgctttccgcaagtggttctttttcgggtttgtttcaatcccatagatcagacgggttgaaactttcccttctcacacgttcgaaagcaggtgttaaccggccaatcagaacgtgaaccggggtacaggggcactgcccctgcctggggtgcagggggtcaccccctgccgaaccggggttcaggggcactgtccctgccttcccctgccacgcgttcgaaagtgggtgaaactcgccagctggaacgcgaaccggggtccaggggcactgcccctggtgggggttacttggaggccttccaggcgtcgatctgagcctgagcttcggtgatgatgtcgttcaggccttcggcttccatttcttcgtacatggtcttcacggcttcttcgggatccacggagccggtcagcagttcgggatgataacgatcccagatggtcttgcagttggcgatctggtcttccaccttgctgctgtcgaagttgaagcccagcagcacggaaggctcagcctgctcgttcagttccttcacttcgtcccactggttgaactccacgtcgtcggtgggggtcacggcgaaaaaggtgccctgagtgtaaccagccatgccccagctggagtcggggttcttgtgcacgcggccgtcctcggtgtaggtgaagttgtcgccttccaggccgtagtagaacgcatcgcgaaccttggagtcggtgttcatcaggttcaggaacgccagagccttgtcaggatgctcggagttgacggaaacgaagttcacagagcccagcacggagtcgttggacaggatggtggggccgtaggtgtaggcgaccagttccttgcccatgttggggccccaaacggtcttggcggcggaggaccagccctgagccaggaagcaggccttgtaggtggggccttcagccaggttggcagcgtcggcgttgatgatgccggactcgaaccattcgcggacgatcttcagctgatccatcacgtcctgctgctcgaaaatcttcacgaccttggtctcctgatcgtcgtagcgcacgccgacaccgcgcagaccagcgccgaagccgtcatacacgaagggaatctgagaaacgccgtccttggtcacggggaaggaagcggtgccggtcttttccttgatggccttcaggataggggtggcgtccgccagcgtgtggcagttcatggcggcctcttccatgcccagttccttcagcagctccacgtcccagacgaagtactgggtgatggaggaatccttgtaggtaggcacaccgtagatgcggccgcccacgcggcaggcgtcccagtaaccggcaggaatcagctccagcaggccgggagcgttgtcagccagcaggtcggtgatgtccagatacgcgcccacggacacgtcggcaaccaggttgccgctgtcgccgaagatgacgtcatagggctcgttagagttgatgatgacgctgcggcggttgccccagtcgccccagccgatgcattccacatccagtttggcgccgatcttctcttcgatgtagggattgagatgctcgatccacgcgctgtagttgtcgggctgtccgttgcccagcgtgatgatcttcagggtaggaacttcctcagcggaggcaaagctgaccatgcacagagccatgcacagcgccagaaccagagacaggatctttttcatgtttgttctctccttttttttattcgttaaccctttaccgcgccgatcgtcagtccggaaataaagtatttctggaagaacggatacgcgcacgcgatagggattacgatcacgatggcaatggccatgcgaaccgattcgccgggcatctgggcccggtactgctgcagggaaacgccggcagtggggttgttggtcatgtactccagcgagcgcatgatgttgttcaaaagcgcctgcagagagatgagacgtttatcggaaatgtacagggacgaaaggaaccagtcgttccagtagccgaagctcaggaacagggcgatggtggcgaacagcggcttggaaatgggcaccacgatgctcagaaaggtgcgcatctgggtcgcgccgtcgatcttcgccgactcgatgatcccgtcgggaatcgaggtcttgaagtaggtcttgcagatgacgatgttgtaggagctgaccatcaggggtaaaatcagcacccagatggtgttgcgcagccccagaatgttggagttgaccacgtagctggccaccagaccgccgctgaaaagcatggggatgaagatgacccaggtgtagaactgcttcagcttgaagttgggccgggacagggcgtagcccatggccgtggtaacggacaggcccagcagcgtgccgatgcaggtgacggccacggagatcagcagggcgttcaaaatggtgtcccgctcgttccacaggaactggtacgccttggaggaaaactcaaccggaaagaaggagtagcccacctgccggatggattcctccgaggagatggagatcatgaataccagcaccaccggcaggatggcgcaggcggccagcagcacgaacagaaggttgaaccctgcgttggtgccggggttgatccggttgatctgaaaatcggttttttttgctttcattcttttcgcctcctcttaaaacaccgcgctgtcggaatcgaccttggagacgatgaagttcgtcagcaggatcgtgatgcagcaggctacggactggaaggtggaggcggcggccgtcttgccgatgggggcgttgccttgcagggcggcgtagacgtaggtgtcaaaggtggaggcgaccttgtacagggagttgggcacgccctgcgtgacctgatagaacagaccgaagtcggaggcgaagatgccgcctaccgacaggatgaacatcatcacgatgacggtcttcagcatgggcatggtgatgtaccgggtctgctgccacttgctggccccatccagcatggccgcctcgtacagggagccgtcgatgccggtgatggtggccagatagaccaccatgccgtagccggtgcccttccagaccttgaggataacgaagaacaggggccagtaggtggcttcggaataccagcggtggggctcgccgccgaagaacataatgacccggttcaaggtgccgtagtcggtgtttaggaaggcgaatacgaagtagctgaccaccacccagctgaggaagtgggggaagaacatcagagtctgataggtcttggaggcccgcttggagtacagctcgttgatcatgacggccagcgtgacgggaatgacgatgcccagaatgatgaagacgatattgtaaagaagcgtattccgcaggagcatggcgaatgcgttattgtggatgaagaaggaaaaattcttgaaccccacaaactcgctatggaacagattataaaggaaggactgccgggggaagatcttgtattgcttgaaggcgataatcaggccgaacatcggcaggtaactgaacagcgcgtaccagataaacgcaggcagacccagcaggctcagctccagatcgtcccgggtcagtttgctccgcttggggcgattggcggcgaggggctgcctggttttttcggtgtttccgaccataaacagtttcctccgtttctgaaagtgaagaatgttaacgaatctttttgaactttacaggcacatattaacatgcttggaaacaaaaagcaatagctaaaatcaaatttttgtcaataacggttattaaacttctgaaaagaatatgtaaatgaaaacgagcaaaataaaaatagaaacattagttaacattttttatcaaaataagttgacatttggagccggacattgtatgcttaagaaggtttatcaagcagaaaagttttttcggaacgagggtatgtcatgctgaaaagtaccatgcaggatctggccgacgcggtcggcgtatcccgcattaccgtctggaaagcgctgaacgaccgggagggcgtgtccccccgaacgaaaaagcgtatccagcagaaagccgcggaaatgggtctgaccgatacagagatccaaatggaaaaaacacctgaaaaagaaaccggcagggatgaggcggaggagcgcaccttctctgtggtggtctcccgacctgaatcgtcggcgttctggatgcagatcatccatcatatcgccaaggaactggcccggagccgcatcaacctgatgtatacttatatgccttccttttattcagagggctataccctgcccgcgtcggtgaagaacgtggacgggctgaccgtattgaatatttatgacgcacggctgctgcatatgcttaacgagcttccgctgcccaaagtttttctggatacggtgcccggaatgcatccgcccgcgcttcacggcgatctggtgctgattgagggccgcacctgcatccgggagatcacccggcggctgatcgacagcggccgcacccggctgggcttcgttggcgatattgggtacgcccagaccaatcaggaccgttacgagggatttgcggacgcgctgcgggaaaagaatcttccgctggacgcttcgctctgcctgacggctccgttgagcctgcgcgcccattatgaggagatcagcgcctttctggacggactgccggagctgccgcaggccatcgtgtgcgccagcgacttcatcgcccatttcgtcagccgctatctgacggaaagcggacggaaaacgcccaagggcttcctgctgaccggctttgataataacgccgagtacggcaacgtggcggacaagatcaccacggtgcatgtggagacttccgcactgggtaagcggctggccaataagctgctgttccgggcggatcatccccagatgcccccggaggtctgctatattacaacggagaccgtctaccggggcccgctggccgcggaaacggaaaaataggaggagaaccatgcttccctttcaagacccgaagctttctcccaaagaacgggcgcacgatctgtgcgcccgcttgacgtgccgggaaaaggtgggtcagctgaaccaacggctatacggctttcggagcgtccgcagggagggagagcagctgacactggacgaagcctttcaaaaagaagtgctgcatttcggcggcttgggcacgctttacggcctgtaccgggccgacccatggtcgggccgcacccgggaaaacggcctgtatggggaaaacgccgtccgcgcctacaatctggcccagcggttcgtggtggagcattcccggttcggcattcccatgctggtcagcagcgaatgtccccacggccatcaggcgctggacggctatctgctgccggtgaatctggcggcaggtgctgcttttcagccggaacttctttatgaggcaggaaaggtctgcgggcggcagcttcgggagctgggcgtggacttggcgctggtgtccatgctggatatcctgcgggatccccgctggggccgcagtgaggaatgctacggtgaggatcctttccatgcagcgcagtttgcccgggccatcgtccggggcattcagagtcagggcgtggcggtagtggccaagcatttctgcgcgcagggggagaccaccggcggactgaacgccagcgcggcccgtatcggcccccgggaactgcgggaaattcacctgcccgccgcccgagcagcctgccgggcgggcgtaacgggcataatggccgcctataacgagatcgacggcgtgccatgccacgccaacgaagatttgctgcagaaaatcctccgcggggagttcggcttcaatgggatcattatggccgacggctgcgccattgaccggctgaacgaccagaccggcagtacagtggcttccggggcgctggccctgcgctccgggatcgacatcagcctgtgggacgagggcttttcccggctggaggaagcgctggaaagtggcctgatcgacgaaaaagttctggatcgggctgtggagcgggtgttggcgctgaaattggaacggggcctgtttgaacggccctacctcccggaagaacggaaaccttcggtcttttccaagaaagcattcccccaaagccttgctctttcccgggaaagtctggtgctgctgaaaaatgagagcgctttgccgctgcagaatcgtggaacggcagcgctgatcggcccggcggcggacgatctgtaccgtcagctgggcgactatacgccgccagtggagccggacgcgggctgcacgctgctgcagggtctccgggagctggccggcccggaaatgcgtctttggtacaacgacggcagcgaccccaagcgggctgcggcgttggcggcgaaggcggatacggtggtgctggcgctgggcggctcgtccagccggttcgaacaggcccgttttgacaaaaacggcgcggcgctgaacggcagcatggactgcggcgagggcgtggacagctcggcactgcggctcccggacggacagcattcactgttcgctaaggtgcgggccgccgcgaaaacgctggtcacggtgttgatcgttggacggccctatgccgtgccggagatcgccgaagggtcggacgcgctgatggtcgccttttatcccggcccgtggggcgggcaggcattggcggaagccctgctggggcggttcagtccgtcgggacggctgcccgcgtcctttccccagcatccgggccagctgccggtgtactataaccccaaggcgggcacggttccgtggaactatgccgacctaaaggatgggcctctgttctccttcggcgacggcatggggtatgggcatattttgtaccgtgattttgagctgctgccgaagctgctgccggagggacggctccctgcggacgatacgccggtgctggaaatgaggttccgggcggaaaatcccggcccggaggaggaacacgccgtgccgctgcttttcgtcaccgatctggaatcggacgtggtgcgccgggtacgggaactgaaagcctttgccaagaaagctgtcccggcgggggagagcacggcattttccctgacgctgacggcagacgatctggccgtgtggaaccgccgcatggaacgggaattgcagcgcggccgtttccggctgcggctggaggacggcggccgcctcctttatgaaaccgtttgggaactgaaatgaatcaaaaaatccccgccgcagtttcgggaggccaaagcgcggcggggattctgttacgttttcacttagtttccgcactccacggaaatttcattgaagagcttgagcacctcgtccagctgggtgtcctgcttttcctgcccggcgcggtccagcacgaccttgccctcgtggagcatcagcagccggtcgccgtattccagcgcgtagcgcaggttatgagtcaccatcagggtggtcagcttcttttccttcacgattcggtcggtcaggcgcatgatgatgtccgccgttttgggatccagcgcggcagtatgctcatccagaatcagaaattcgatgggggtcatggtgctcatgagcagcgccatggcctgccgctggccgccggacaggttgcccacctgcacgcccattttgtcttccagccccaaccccagctgcgccagcatctcccggtattcgtccgctttcttacgattgacgcagcggtgcaggtcgaagggcttgcccttgttgtccgccatggacatattttccaaaatggtcatggacgggcaggtacccagcgccgggttctggtacacccggccgatgatgcggtggcgtttatgctctggcatggcggtgatgtcctgcccgcctaccagcacctttccgccatcgatggggatggaaccgcagatgatattgagcatggaggttttgccggagccgttggagccgatgacgcagacgaactgccggtctggaatggccagcgagaaatcccggaacaggcaggtctcgttcaccgtgccgccctgatagtatttggcgatattctgaagctcaagcatgatgttttcccttctttcgatgtcctcccgcgacgatgatgatcagcagcagcaccgccgtcaccagcttcaggtcgaagggcgaaaggcccaaactcagcgccagcgccacgcaggccttgtacaggatggaacccagcaccaccgccgtggtggccttgaggaaccgcaaaccccgaagaagctgggtgcccacgatgacggaggccaccgccagcaccagtgtgccggtgcccatggaaatatcaaagtagcgctgatactggcacatgacgcatccggccagcgccaccagcccgttggcaatggcaaggccgaggatcttcacacggccgctgtccttggccagactggctaccagcgtgggattatcgcccgtagcccgcagcaggaagccggaacgggtagccagatagccgtccatcagcagcttgaccagcagcgttaaaagggccagcacgatcaccggggcatacacctgcaccccggcgggcagtccggagatcagcggatttttgaaaagtgtgtcgaaggagaacagctgcacgttggagcgccccgcgatgtgcaggttcacggaatacaggcccgtcatgacgatgatgccggacagaaggtcacccacgtgaaagcgcacatggatcacgccggtgatggttcccgccagcgcacccgccagcagcgaagccggaaggctccacaacgggtcaatgccgttcgagatcatcagcgcggtcacggcagcacccagcggaaagctggaatccaccgtcatatcgggaaaatcgaggatcttgaacgtgatgtacacgcccaacgcgagaatggcgtagatcaggccctgttccagtacgcccagcagctgtgccatggaaaaacctccaatgcgtgaaacgggtagcgggaaaaagtcaaaagagaaaatcagccaaaagcccgcacagggcgggaaacgcgcctgtgcggagcaaagggtttttgcggatcattccgcttcggtagcgcgggcggccagttcttccggcagggtgatgccgaagctctccagcaccttggaattgacgtacaggctgggttcagtgatgatctcgtaggggatgtcgctggcggcggcttcgcccttgagcaccctggcggccatcaggccggtctggcggcccagcgccacataatcgaggccctcggcggcggcgcagccaagcttcacctgctcgatttcggagccgtaaacgggcttcccggcggcgttggccttgtccagcaccagcgccagcgcgttgaccacggtgttgtcggtcaggttggtcaggcagtccaccttgggcagcagcgcatccagcgccagcgggatgtcagcggaggtgctcacgccggactctacgatctcaaagccgtaatcaccggccagggacttgtaggtctcgatggtggacagggagttgacctcgctggtggtatacagaatgccgatggttttggcctccggcatcaaagcgcggatcatttccagctgggcggccacgggcagcgcgtcggaggtgccagtggcattgccggtggccttgccttccgcatcggcgaaaccggcggctaccgggtcgctgacggctgtgtaaatggtggggatagcgcccgcagcggcgttatagcaggcctgcgccatgggggtggcgatgcccaccatcaggtcgacgggcttggcggcgaactgggcggcgatctgctgggtaatgcccatgtccgcctgcgcgttctggtagatcacggtcaggttcttgccttcttcgatgcccgcttcggccagcccttccaggaagccggtgcggcagttatccagagaaccatgctcggcaaactggccgataccgacggtataggtcttttcctctgcgacggcgcagaagacggcggtcagggtcagtaccaggcaggtcaggaagctcagcattttcagggtctttttcatgggtcagtccatcctttcgtttttccgcaggggcggaagtttgatttgatggtgactgcgctctgccgctcatgggatcggggaaacaaaaacgccccaagcaacgatcgttgcttgaggcggaacgtccgcggtgccactcaatttcctctccataggggagagctttccgtcgcgtaccatcatacgcgccgccaggataacgggtacggttcccgtcagcgactacggctctgcagctttcgccgccgccctcggaagtccattcgccgccttctgctgtgccgcggtcccactgttcgcggctccctttgccagcccgtcttggcggttactactcttcctcaacggtttgatgggcatatgataaacccggtttgggagattgtcaatagggaaaattgttttcagaatgttttttgtcccgtgcgcggtagtcctcccgatgctcgatcagccccagccgtaccagccgcgccgatacggcgctttccgaacgctgcaattccatctgaatctgcgcattggattctccctttcggaacagacgagtcagcagggattcttcttccgccgtccacgctttgccctgattcacatagaaaatgctggtattccttcgctgcttttgattggaaagacagtccagcgcaaagtgcagggcacggatgacctccggctgattgcacacggaatcctccggcaggatttcgcccgtttccgggtcgatcccgtcggccagcaggcttagaatctgtttggcggtcgaaagctccatatttgcctcctgatgcggcgtatttcattcctgtgatgcagatgataccacgtttctgcccacttgtcatcccctgcctgatgtggtaagatttgcatgtcaaaatggattcgttcaaggaggatgattttttatggcattcaccgaatttcattattacagcgaaaccttggagatcgacgtttccgttaacgtgatcctgcccgagacccggatcatggcccagcaggaggggaagcccctgcccacgctgtacctgctgcatggcctcagcgacgatcacacccattgggtgcggcagacccgtctggagttctatgcccgcaaataccgtctggccatcatcatgccctgtgtcaaccgttccttctatacggatatgaagcgcggcgcgaagtatttcacctttgtgagcgaggaactgccccgggtgatggaaatgtacttcccgctcagttcccgccgggaagaccgctttgcggcgggcctgtccatgggcggctacggcgcgacgaagttgggccttcgcttgccggagcggtacgcggccatcgccagcctgtccggcgcgctggagatggaaaacgactaccatatgcgcaagatgcgggacagcgatcggctatatcaggaactgctgaacattttcggtacggaagaggaattcctggccagcgacaactgcctgacccggctggcggagcagctggaccccgccaaggctccccggatgtacgtggcctgcggcacggcggacttcctgtttgactccaacgaggacttcatccgccgcttcggcgaaaagttctccatccactacaccaccgaagagggcgcggcccacacgtgggatttctgggatcgccagatcgagaaggttctggcgtggctgaacgtgcctgaggcggaataaccggcatgaaaaaagcgacggcaatggagcggctgctccgggaaggcttctttgagaccaaagaagccgcccttccttacctgatgagcggcgcggtctactgcggcggcgtgaaggtgctcaacggcgggcagaaggtggacatggctctgcccatgaacgtgcggggccggaacgaacgctacgtgggcaagggcggctataagctggaaggggcgcttgcggacttcggcatttcggcagagggccgcgtgtgcatcgacgcgggcgcgtgtacaggcggcttcaccgactgcctggtacagcacggcgccgcattggtgtatgcggtagaggtgggcttcggccagctggcgggaagcctgaaccagaatcccagggtggtcaatctggaaaagaccaatctgggcgatgaaaagctgctggcgctggatccgaagcccgatctgggcagcatggatctgagctatctttccatcgagaaagccgtccccctgtaccgggccatcatgggcgggcagggcgaggtactgtgtctggtgaagcccctgtttgaggtggacgacccggaagcgcggcgcacgggcgagatcgccccggaaatgtacctgccgctgctcaaacgcctgatccgcaccctgaaccagcaggaaaacacagccgtgctggacgtgacccgcagcccggtcacgggcaataacggcacccacgagttctttctccgcacggtgttcggctattccggcccgattccgcagctggatgaaaaggccgcgcaggcggtggaagcggtgctggcgctgcccaagtatcataaagaactttaaggggaaaattttcccggcgctgcgggatgaaaccgccgctttcgcccgttgattgggtacagaaggaatcaccaaagggggcattgatttatgaagggaaaaggaaaaaagctcgccgcgttcgtactggcgctcggcctgcttctttcgctgtgcgcaggggcgctggcggaggaatacggcgtggtcatcaacacggatacgctgaatctgcgttcgcagggaagctcctccagcgcgtggctggggcagtataaccggggcacctgggtgcagatcatcggcagccagaacaatttctatcgtgtggtcacgcctgacggcaaaagcggctacatgagcaaaaattatatcagcatcaccggcggcggctacatgaccagccgtgtggcgctggtgaccaatcagaacggcggcgcattcctgaacttccgagcacagcccagctataacgcgcaggtgctgggcatcttctactacggcgtgcccctgctggtgaccggccaaaccaatggctggtatcaggtgcagatcaatggccagacaggctatgtgcgcagcgagtacgtcaccgtcagcgaccagatcgcctccagcacggtggcaaccatcaagacccccggcaataccgccatgaacctgcggagcggccccggccttcagtatgacgtgatccagcagttctccggcgaccgctatgtgatggtgctggcgcagggcaatggctggtggcatgtgtccatcgacggctacaccggcttcatggacagcagcttcctgacgctgggtctgcataccgcacaggacattgccgcccggaacggcggcggtgcgagcggcggcagctacgcagtggtcaataatcccaagagttcccaagccctgaacctgcggcagtacgcgtccacctcctcggtggtggaggccaagctgtacaatggcactcagctttgggtggacgaacagggcaccgaatggtcggcggtaacggtcaagaataccggcgtgtccggctatgttatgacccgctatctgaagctgtacaatctgcccagccgacccacccggcgggtggtgcatccggcgggcggcagctatgtgaacctgcgcaccagcccggatatgacctacggccagatcgccgcgcgggtgcccacgggcaattccgtcacgatcatgatccccggtcaggattggtgcaaggtgacgtggaacgggtacaccggctatatgctgacctatttcctgcagcagtaagggcggtcagccgcggcagcagggcgttccagaagtcgcacccccatcgaagacacaccatggccagcagccagagggaacacagataatagccccatccacgctgcgccagccattccagcggcgttcctgttggcaccgctcgtaaaaacagataattggcgggcagccagtcgttgcacagctgcaccagccacccataaccgctggcccagaggatcgttttccgcgcttcccgcagggtcagcggttttggattttcgcctagcacaaacaccgccgcccagaggatcaggctatgcaggcggttgaaatgcaggcgcatgagaaagggccgggagcagccgatcactgccgggaagcatagggccagaaaggcgcagggcgcgcccagaagcaaagaaaagcacaaaagtcctcggggacgcagccacagaaggggcagggagcacagtcccatcatgccgcaaagatgcaggggaaggccggtctgcaggctccataggccatcctgcaccagcaagacctcctgtcccgccatggagaccgccagcccggccgtcagcgcccggcgaacggttttacgccgtttgggctgccgaagcccatacagggtcaaaagtccccaaagcccgaaggataaccagcccacgcaaacgcccccttgtccgtgattctggacaagggggcgttttttcatgcgtttcaggtggattctcgctccaccagcgtaggaacggtgcagaaggactgggtctgcaaattgggtttgtgcagcttttgcagcatgaagtgggccgcttcccagccaagctcgaacatatccacctcgatggcggtcagctggggcttgagcagcatggaaaacgggtagttatcgaaggtcatcagcgccatatcctcgggaatgcggatgccctgctggcggagcatctgcaggcagccgatggccagataattgttggcgcacaggatcacctccgggagttccggccgcttgagcagctcagcggtctgccgatagctgtcctcgtatccgttcacgccgggaatgctctcgatggtcaggtcttcctcctccaaggcggcgttcaggccatccagacggcgctgggcgatcttgccctcgccctcggtgtccagcagaaagacaatgcggcggtagcccttgtccagcagatagttggcggccagctgcccggcggcctcatggctcacgtccatccagcagacgttgcaggggaaggagggcttgcccaccaccagatggggcatttcctcccggatgagcacactggccaaagagcgggtcaggatcccggcgtggagcatgaccccgtccgcctgttcgctctgcatgagagagcagatgcgttccggcgcgtcctccggcggcacgtgcttgatcagcagcgaatagcccttttcgtccagccggcgttccacgccgttgatgatctcaaacaggtgcggatcctcaaatgccacgccgcgggccagattggcggcgaacagcacggtgccgttccgctgccgggcaaagctgcgggcccgggcgttgggctgatagttcatctgccgggccaatgtctgaatccgttcccgggtcttgtcggaaatggtgtagctgttgttcagcgccttggagacggtggcgatggaaacatgggcttccctcgccagatcgtaaatggtaacggccatggtgttcctttctggttcgcggggaaaagggggagagggcgtcagggcttcgccgtttggaagaccacatagccccgtccttccagtaaaccacccttccagcccttttgcaagaggggcagagcatctttcggaagtcccggtaccggaagcgcttcgccgcccgcgttccagcacagcagtagactttcttctgctgcgctgcggcggcagaggaacagcgccccctgcgccagcaccgtctggaaatcgccgtgccgcagggccgggtgttccttccgcagagcgatcatccggcggtacgcctcctccagcccgtcggcgcggccaaagtccatggggcggcggtattcgttttccgaagcgccctccagacccttttcatcgccgtagaagacgcagggcattccgggaaaggccatctggaacagcaccgcctgctccatccgggcccggtcgccgccgcagagggtgaggaagcggctgacgtcgtggctgtccagcaggttcagctgggcggacagcatctgccggggataacgggtcaacaggctgctgagacgcaggtcaaactccgccgcgtcgatggagccttcggcgaaaaactggcggcagaagcggcggaaatcgtagttcatggctccgtccatcatcccgtgattgacgaaatgcgccgcgttttcccagacctcgccgatgaccagcgcatcgggcttttcccgccggacggcctgccggaaggcccggagaaagccgtcgtccatttcgttggccacatccagccgccagccgtccacgtcaaactcccgcacccagtaagcgccgacgttgcagaagtagtcccgcatttccgggcaggaggtgtcggttttgggcatctgcggcacataggaaaagcaggcgtactccggcatttcgcctgcgtcgggataccggggctgctccggcaggtcgtagaaccagctccagtagggggaggccttgccccgcttcagcacgtcctgaaagaagggatgccgccagccgatgtggttgaacacgccgtcgatcagcacccgcaggcccagccggtgggcctccttcaccagcgcccggaagtcgtcctccgtgccacgggtggggtcgatgcggaagtaatccagcgtgtcgtacttgtgataggacgaggcggcgaagatggggttcagatacagacagttaaagcccgcatcccgcatgtagtccagattttcccgaacgccattcagcgtgccgcccagccgggaaagacaggtttcgccctgaaagtccgcttcacccgcccgtccggaaagagaacgcctgccgtcggcaaagctgtcggggaaaatgttgtagacgaccgcgttctccgtccagtccgggacggacagccggtcggcccggtggttatagggcagctggaagtgctccgaacgctggatcatggacgggtctttttcgaagcagtccccggcatagcggcaggtctcgctgtcgtcgtccagctcgaaatgataggcgatgcgctcaaaggggcatttcagcgtcacttcgaaccagtcgtagagtttatcgctgcgccagaggggcatttctacacgctgaaaatccagctccggagtcatggcggcccggtcggcgtagtgcagcgcgcagcgcttcaggtcgccccgctgggcccgcagacggaaaacataggtgttctcgtccatggcaaaggaatattcgctcatgggacggtgaaaaacagcggcaagattcatgggggatcatcctttcgaggcgccggcggcaacgcccgccacgtagtatttttgcagccggatgaacagaagcacgatcgggacggccaccaccaccgctccggcgcagaaaacggtgtagtattcgtagatattggccttgtccaccatggtgtacaggcccttggccacggtatagttgttgtaattgtccttcatgatgaccgaaacgaagataaaatccacccacggcgcgatgaaggcgttgatggcggtattggccacgatgggcttggcgttgggcagaatgatcttccagaagatcgtgtgccgggtcgcgccgtccagcgtggcggcttcgtccagcgagcggggcagcgtgtcgaagaagcccttggcgatgtagtagttcagcccggcactgccggagtagaccagaatcagcgccagcagggtctgatccagccccacggccttcatgaagtggtagatggcgatcatgctcatgaagcccgggaacatacccaaaatcagggaaatgttcatcaggggcttccgggcccggaaccgcagccgggaatacacatacgccaccatcagcgtcaggacggtggtgatgacgcagcagacgctcgccacgaacagcgtgttcagaaaccagcgggggaaattgaacagcgacgtatccgtaaacaggcgcacgtagttctgcagcgtcaggatgcgcggccacaggtagggcgtaaacgcgcccttttcgccccggaaggaggacaggatcaaccagaacaccggcaccatccaaagaatggaaagcacggtaagaagcgtgtgcagggaaacggagacccccagcttgcgcaggttctttctgcgccgcgccgggcggtcgatgcgggtcgtttcagtcttcattggaaggtatcctcctttttcacggctccggtgtggttgtacaccgtcagggacagggtggagacgatcatgaagatgaaaatgccgatggtagaggccagcgcgtagtcgtgctgatccaccgtaagtttatacagccacgtgaccagcaggtcggttttgcccgcctgataatagtccagcgcgaagggcccgcccgccgtcagcagatagatgacgttgaaattgttgatattgcccacaaaggtggtaatggtggcgggcgcggtgacgaagatcatatagggcagcgtgatgctgacaaatttgcgcaccggccccgcgccgtcgatttcggcgctttcgtacaggtcggaggggatattcatcagaacgccgctgaaggccatcatggtgtagggaatgccgatccacatattgatgaccaccacgcagacgcgcgccagcgtgggatcctgcaaaaagggcaggggagagtcgatccagcccagctccatcagcgccacgttgacggccccctgcggctccagcgcccgggagatcagcagaaggctgacgaactggggaatggcgatggaaatgataaacagggtgcgccacagcttcttcagccgcacggccctgtgattgatgatcacggccagcagcattcccagaatgtagttggtgaaggtggccagcaccgcccagaccatggtccacgccagaatgtggaagaaggtgtgggtcttgatggcattgccaaggaaaatatccgttacgttggtcagccccgtccacgtgaagagctttcccggcggctgatggctggcgtcaaaattggtaaaggcgatcaacaccatgaaaatgatgggcaggacggtaaaaagcagcagcgtcgtcatgggcgcggccagcagcgtcacgtggaagcgctcatccagcagggtctttacttcctcccggaaggatggaacgggcttgccttcctcccggagatggagaagcttgaccgtgcttttcagattcaggaaccatacatacagaaaaatagcggtgacggccagcgtcagcacgctgtagagcaggatgagcatggaattgtcgccgggcacccgcttgtagatctggttggcttcatcccagacccgcagctgcgtgttttcgcccaaggtgccgaaatgggacaggtacttccagccaaagccgaagaaaaaccagaagtacagcgcctccgcacccagatacagcagtcccttgacgatctggccgaagcgaaagcagccgctgcccatcaccaccagcgacaggcgggtgaagaaatctccttttttccagaaggttttccagaagccgctgaatcggtttttcacgggaaaacttcctttccgcaagaaaatctggcgcggccgaagggaatagtccctccggccgcgaatggttcgttagttctgcgcggcgacggtctgctccaccagctgatccagcatggcctgcaggtcgctgccgttgtgcgctaccagctccgcgccgaaagcgccggcaggggtccagtagccgcccagcacgtgctggctgatagcgtaggcgctctgcgcagccaaagcggccagagcgggctcggaagctacggcttcggaagcggccacattcacgttggaggggccgtagcccagcgcctcaaagcggcgcagctgagactgctcgttggtcaggtactcggccagttccatggcctccacgggatgagcggtctgggtgttcacgcccagaatcttgcagcccaggaaggaacccatctgaacctgttcgccgccgcaggtgaaggtgggcagcttgcaggcggcgtagttgtcgcccagcttttccttcacagcggaagagatccacgtgccgcagatgccggcacagatggcgtcgccgatggagccctgcagaagatcctgcccgccggccaggaaggcgggatggtcgcacagagcgcggatggcttcagcggcggccagacccttttcgttgttgaaatcgcagatctgctttccgtcagcgtccagcgtcagctggcagccgttgcccaggaagaaggaggccagataccagccgttggccacgtccatgttgaactttttcccggccttttcggcggcggccagaataccgtccagcgtctgcacgtcctcctcggtcaggacggacttgtcatagtagaggaagtagccgttgtcggcggtcatggggtagccgtacagcacgccgtcgtaggtggcggcgttgatggctccggcggagttttcggcgatgatctgatcccggttgcgggtcacctcatacagcgcatcggccttcaccagcttgatgatctggtcgtccgggtaggagaacacgtccgcagccgcggcggggtcttccagataacgggcctgcgcgtcggcctcgcccaccacgccgtaggtgaacttccactcgttttcgggatgctcggcggcaaaggcgttgcaaagctcctccagcagcgcctgatcgggctgggccgaccagactttcagttcgatcgtctccgcacaggcggcggcgctcaggcagaccatgagaagggccatcagcatacaaagcttttttttcatcggttctttcctccattttcaattgatttcggtctcaccgttgcttttatcataaggctttgacgggaatgcgtcaacgaaaaatcacgaaagcgctttcgctcgaaggctcggtggacggctggtctcattttatgccgcttgaggaaggaaaagccgtgaaacacaagaacgttccgcctgtaaggagcatctgctgcaaatcggtagaaacaaaaaacgcccttttcgaaaaggcgtttttcgtgggattttcaaatcttctgcattttcaacccgtgccgggtgcagtaccagaacagcgtgccgtgagcgaagaaaggaaaacgagcttccagactccattccgggtacagctttttcaggatcagcgtatcgttggaaagaaacgcgataaaggaaatgtagtgctcccgacccatttcgtggccggaggtcacgtaccattccccgtcagaaagctccgcatggagccgttcctccggcgcggcggcctgtacgggcaggggagagagctttcgtccgcagcagaccgcgtcggcctgctccgtggaaaacagcagattgccgcagtccgggcaaacgtagaagttcagctttttcaaattgccgctgctggaaccgcgctcctgaagctccccgtacaaaagggccttcacatccacgtccagcgcccgggccagcgcgggcagcagggaaatatccggcgctccgctgccgcattcccacttggaaaccgtcttatcgctgacgcagagcttttcggccagttccagctgcgtcattccattcttctgccgctgggagcggatcaccgctcctgttttgatgggatccatttcgtccacctcctttcccatcatagccgaaaagcggtcgcggcacaatcaacgcttcgtagataagcgggaaagtgtggaagatcgtctcttgacaggcgtttttctatgcggctatactagggcaaatccggccaacggacagggaaacggcggggcggatgaataaaaatcggccgcgtttccaatgcaaaggaggtatttcagatgattttgggaaaaaatgataaactgctgttcatcggcgactccatttcggattacgatcggaaaaagcccgtgggggaagggctgttcaatgcctggggcaccagctatgtggcggatgcgggcgcgcttttgtgctgtatgtaccctgagctgaacctgcgtatcgtcaatatgggcatcagcgggaatcagatccgtgatctggacgaacgctggcagacggacgtgctggatcagaagccggatcatgtcagcgtactgatcggtatcaacgacgtgtggcggcagttcgactctccccaaatgacggagcagcacgtgcctttggacgaatacgaggccacctaccgcaagctgatcgaaaagacgttgcccacggtaaagggcatgatcctcatgaccccgtacttcatggaacccaaccgaaacgaccccatgcgggcccggatggacgaatacggcgcggtcgtccgcaagctggcggaggaatacaagctggtttttgtagacctgcaggcaggctgggaccggctgtttgagcatatgcacccctgcaatatcgcatgggaccgcatccatcccaaccagaccggctgcatgtatatcgccaagcagttcctcaaggccatcggcgcggatcgggcgtaaaaatttcaggcggcggaagaaaactttcgccgctttcgtttgaatcaaggaaggaatgctgcggatacggtgctgctgttttccgttgttgccgaaaaagccgaacaaaaagaaaggacgaaggtgaaattcatgaagcatttcgtatttttcctactgacgttctccatgatgctgtccccgctgctgggagcaacggaggcggcgcttccgttctgcacggctttctatgccgtaaagggggacgaagttcaatacgagtcgtcgctcgtgcggtgcagcccgctggaaaattatgcgtgtatcagcgtttccgtgacttatcagatcccggtcaattatgaaataaccgctgtcaacgtatatctcaatgacgaaccggcgcagcagttgagccaactgtcgccggggacttattacggaatatttgaaataccgcaaaacgggatcgagacgctgaaactcgtccctgttgccaaaacttcctatgcagtcgatacgatcatggaagaactgatcgatgaaacgcttgaatggaacgactttgagacgatagaaaaagcagtttaatgcggtgcactggcggcggaagaaaacttccgccgctttttgcatagccttttgcggcacataaaaacgccccggcttccttcggttcaggaaggaagccggggcgcagaaaaaacggaaattacttgttcacgctgtccttcagggccttgccggccttgaaagcgggagccttggaagcggcgatctccacagcctcgccagtgcggggattgcgggcggtgcgggcggcacggttcacaacttcgaagctgccgaagcccacgatctgcaccttttcaccggcggtcagggactcggtcacggtctcggtgaaggcggccagaaccttctcggcgtccttcttggagagagcggctttttcggaaatagcgtttaccagttcagctttattcatagtgatatcctccttatcatagttggggtagcagaatgggagtatagcaaaaccgatcgcggctgtcaatgcctgaaagcccttctgaacatggaaaaagccaatttttacgctttttggaagacacaggcggatgtttttactttttttacgggaaaagccgactttttgaccgtgggacgggctttgacggacaggcaggagttcccgtgacgcacgtcgtatttctttttggtagaaggcgagaaaaacgtccgcttttttgcacggacgagagaattttttcggaggcaaccagatggaaaaggaaaagaaagtacgggaggctctttcactggaaagggcgctgatggaacgactgagccagtcggagattcgaaattggctgaaaaaatacgccatgccctatcaggaactgatgtcctgctaccgctgcgcgctgatggaggcggaaaccaaattcaacgtgctggacgaggaactttccctgcgctatgaccgcaaccctatcgaaagcatcaaatcccgcatcaagtcgccggaaagcatcatggacaaggccgtgcgcaagggcatccctctgacggtggaaagcatcgaggaaaacctgcgggacattgcgggcctgcgggtgatctgcgcgtttcccagcgacatttatatgatggccgacgcgctgcttcgtcaggacgacgtgacgttgatcgaacgcaaggattacattcagaaccccaaggacaacggctaccgcagcctgcatctgatcatcgaaattcccattttcctgcataatcagacccggcggatgaaggtagaggtgcagctgcgcaccatcgctatggactggtgggccagcctggaacacaaaattcgctacaaaaagaacctgacggacgatgaagcgatctttgccgagctgcgggaatgcgcggagaccagcgccatgctggatcagcggatgcagagcattcatgaaaaagcgggggattaagggaaaacttccgtttggattttggccatgcgaggggacttttttctcccagtatgggacgccggacaaacacgtctgataggatgtgattcatggaacgaaacagacaaaccgccaacccttctgtcactgcggaatgttggcggtttgattttttggaaagcccaaataaccggcctctccgttatttttttccttcgcttttcagcagctccaccagttcttccatttccttcacagtgatctcgccggagtccaccagcgtgttcatcagcagcgaagcgttgccggaaaagacacggttcagcagcttgtgggtctggtcggaacgggcggcctcccggctgaccagcggtgtgtacattttcaccgagcctgtctcgtccaccgagacggtgcccttttcctgcatccgtttgagcagcgtaatgaccgtgtgacgggtccacccggtggcgggggccagcagtttggtgatctccggcatggaacggggagaagcgtcccacataatttccataattttccattcggcttcggtgcattggaaaggcatgaaacattcctccttcggttgggcacaggtgatgttacgcctttagaatacatttgtctaccaaatctgtcaatggaaaaattctgccggatggaaataaaagcagcttcaaggaaaaaacacggcgcggaagcgtttttcttccgcgtcggccggcgttatttcttttgaaccgggtagcatacctccgtcacaaattcctctggactttgggtctcgtgagggctgacgtgataaatattgaacatgggccccgcgtaatcgtagccgttggaatgaatccaggaggtcatggcggcgtatacgtcgttcatctgatcgtactcgccccggaaaatgcagctggccacagtaacggcgggcagcgtgtggaaacgcacgtgctccgtgtcggtatagctgcccttgacggtcttttgcacctcgacctccacgttgctctctttgtattcgccgtccagaaaaacggcacagcaaaggcagggattatcgggaatcaggtgctgggagtcggtttccgaaagaagcgtctgccaggcaaggccctcgtcctcatagcggggcagaatcatgcgcacacaggcggcctggcgctgggggatgattttgacgttgacgttataattcatgttttcttcctttctcagcctttttcgggcggtgtccagaagcagcattcggcgggctgtttcatcggccagaacgagcagctccgcctcccgggctgccagatagccgtccagccgctcccggtcgtcgtagatcagcagaatttcccgaatctccgccagaccgaatcccatttctttcaaggcgttgatgcggtagatcgtaggcagctgttcttcgccgtaatagcggtagccggtgaatgcgtccactttgccgggggccagcaggccgatctcgtcatagtggcgcagcatccgaatgctgactctggataatttggaaaaatctccgatttttagcatggcggtacctccgtgcctttcttcttgagctcggagccagcataagccctcccacaatggaagagtcaagcgtttttttcaatcaaaaatcaggctggtggaaaacggcctttgtgaagcgccgcccgcagcctgatccaaataggttgttatagttcgatcagcagggttcccggtctgccggagggaagctcccgcacgatggagccattccgaaaatgaacgcaagcgcctgtggcgcagtccgtggcggtggggtcagtgca

SEQ ID NO: 1171 - DNA, 32759 bp, Unknown
  16S sequences of unknown bacteria
ggtccaaaaattttacaatttattccatatatcaaacgcgccttctctgcaaaaatccgcctcaaaaaagaaaatccatggtttttcacgctcttttcaactgctttgtccgccggtcaaggctgcaaaaaatctgatataaaaccttataacagtaactttcctacaaaaatccgcaaaaaaggtccataaactttcctcgcattttttatcgattctgcggatacacaatatcgaaaaaatttcgtatgattaaaatatcatatcttgcaaaaaacccgcattccctggcggggcatcccggcagaaggagggaaatatggggcgaaacacgttaaaagcaaggctgtcgcgcacgggattatggttttgcctgccgcagctgattggatttttattcgtatttctctgcccgctggccttgtgcgtctattactccatgaccgccaaaagcgggggcttttcggggcttgccaactaccgggatctttggaattccggcacgttccggctggcgctgggcaatacgttccgattttcggccgtcggcgttcttcttctggtcgggatttcttttctcctttcggtgggattccatcacctgcttttgtattccagctggaagatcaagtggatgcagagcggcctgatcacaccgatggtcatcccatcggcagtcatcatccttttttgtcagattttcttggactccggcggcatgctcaaccagtggatgggcagtaaaacgctatacttacagcaatcgccctatgccttttggatcctgatcgccctgtatctttggaaaaactgcggttactgcacggtgattctgctatccgccctggcgggtattgaccgcgcccaatacgaagctgcccgctgcgacggtgccggcgtttggacgcagatttggcgcatcacctttccacagattctttcctcgttatttttcagcgcgattatcgccattgtgggcgtattcaagattttccgggagtcctatctgctcatgggagaataccctcatgagagcgtttatatgctgcaaaactttatcaacaacaatatggaaacgctcaactaccagcggttgtccgccgcatcgctgacctttttgtgcatcctgatggttgtgatcattctctttatccgattcagcggtattttagaggagggaggcgaagcaagtggcaaaaaggaaaagaagaagacccggtgaaacgcttctttatggctttatagccctattttcccttttggtgatggtgccgtttttgtttacggtcatccattccctgatgccgccggagcaggtgcgggacgcttatggaagccttggcagcgaagcgattcggcttcagctttggccaaagccattgggcattcggcagtatatccgggtgttcttcggcacggagctggagtggtactattcctttcacaacactctcctcctttcggtgcccattctcctcatgaccattctgctgtgcaccatgtccggctatgggctgtctaaattccggtttccgggccggaaagcccttttgatctcctacatcatcattctgcttttgccggtgcaggtgactctggtgccgtttttcatctttttcaacaccatgcacctgatggaatcccggttcccgttgattgcattctgctctttttctcccttcggcgcttttttaatgtatcagttcattcgcagcattccggatgattccatcgaagcggcgcggctggagggcgcatccgaatggcggatcttctggcggattgtgtttccgcaggccacgccgggtattgcggcgctgacgatcctgacgctgatcgattgtttcagcatgatcgagcagcctttcatgctgctgcgggaaaaaagctggcagccgatgtccattatgctcaaatatctgtcgcagcaaaatatttccgaagcttttgtgctggccgttgtctttgtcatcccggtctttctcgcatatctgctgctgcaggattacctgatcgaagggatttctcatacggctcccggccggatcaaatgagaaaggaggggttcttttgtctggaaagaaaaaaatactggccttgttgatcggcttttttgtctttttctatgcctgctgggcggtggggatgagcatctatacggaaaacatgccggtggtgaaggcaaaaagcgccgtcaaaacggcgctgacctttgagggcaccattgttgctcactaccaccgggtagaaaaacagcaggaatatgtctctgtgtttgacgcgacggtggaggaagtccttttcgaagacggcgaggacgtcggcatggggcgggtggtcatccgattctcccccgacgatatccaaacgcagctcaccgaactggagcagcagctgaacggcggccttttggacggcgtggacgaagaatccaaagaggcgctgaacgaacaataccggctgctcaaacaggcggcggacagcggggaactgactgcccagacatcgtggagaaaggtgcaggcactggtttctcccggcgaccgcgtcgcagtggggacgccgctcttttccggtattaccgttactgaccgggcctatctggcttgggacatgtctgccaacgacgctatttattttgaacgcggcaccccgcttgcaggcatccagctgcaggtacgggagaataatcggacggtgcccaccaaaatggatctgtctgttaccagcaaggtctatgagccaaagactaaccggtatatttaccaagcccaattgccggagtcgatggattacggcatggtagacggcgcggcagtggcctttacggcccaaagccagggcaagcacgagcatggaggcgttatccccacatccgccgtgacctttgacgaaaccgatgccaccttttttgtcctcagagaacgggaacgggtctggggtaccgaatattacgtggaagaatgccacgcggcggcggaagaggttgccggagggcaggtggcgctgacctactttccaaacgacggccaggtcatctacgaaaccagtaagccattgcaaaatgggatggccgtacgcctggaaaaataacaaaagcgcgcttgtatcatttggtgcagaaaggagcgatgaaatgaaaccgtttttatggctttttcttgtttttatgcttcttttctccttgttaggcggatgcaaaatgcaaaccatacaaccgccggccgactcctctttcgcagataaagaaaaagagctggaaatctactgtctggaaagcgccaatctctccggcagtttattggcttttcgggaagcatatccggatgtgcgcctgtcaatcgagaagtttaaaacatcccggcagatggaggatgatctgatcgggcgcattcacaccaaagatgcgccggatgttgttttgttcgattattccaccacactggattttgaaaagcttgccggcgcgatggcattttatcctcttacccagttgattgcagcagatgaaaccttttttgcagacaactatttgccggcggtgacgaaggatcattcgattgacggggaacaatactttttaccgttcagcgtcatgtcttttgccgccttcagccccaaatccctgctggaagagctgggattggaacagggcgtcacctctcttacagactattttacagctgctcaaagccacgcgttacaacatgagaatgatcctttttccttgagcttctaccgctatcagacgaatattgacaacatttctctcatgatggctgccaatggcatagaattctccgacagagcggatactcccgattggaaggagaatatccgtcaagtggtggactgcgccctttttatcgacagtcaatcacaaaaggcaaatgcggcccgggagcttgactggacaaagatttactgggaaaatactttttgtatttcttcgctttacaccgatctcggcagggatatcatgaaaggcctttctgcttaccagtccttttttcaggacggggtaggatattttgcccttccatcggcgcaggatgtttttcgcctttgggaatccattggcgattttcagctgccaaatcccaaatacaaagagtttttcgcaacctcctttgccccctactttcaggggacagactcttttggcgcgtgttatgattcgttttgcaaccgtctttttttatatggcaatgaatgacggccggtttttctccggcagctccgcgcggcagccggaaaggaattttttcgtcgattcataacagaatgctccctgctgcccgaccgaaacggggatagctcaaaacatttttgtccgcaaaggaaaacgaagccgaaagcaatccgccaaaggatttccaaagaaaagcagggggattccctgcttttttgattccatattcttcttcgtcctcgccttctcagcggcggcatttggcagctgcaaacacagccagtgctatcaacagcaggcacccgcccagcaaaagccagctttgggctgaaacagtagccgatcctgtacctcccgccggcatatccgaactacccggcatctgcccgccgggtttcccgccttggcgccctgcgtttccgccgttccaagcggaggattctgctgcgccggaatcattttccgccccggacacctcagtgctttccgaggaagacggctcttgttcctggctgggcaaggacaccatggcggcacctgcctcacccctgtttggcagcattcccccgccgttttggggcattccctgcccgctttggttcggggcgggaatttcgccgttctgctgcggcggacgggtcgcattttctccggacggcaaagccgccgggccgctgttatccggcgccacgggggcaacctccccgctcgttggaccggatacggcggaatctgcgttgccctgcggactggttccgtcatctgctgtgctgttctgctgcgtatcttcgccgccggtcccatcctgccgcgggtcgaaaaatcccggaatgccgccgcggccgccgcccatcatgctgcccatgacggacagatcaatggaggacgtttccatcaaaagggaggggttttcctgctgttctgcagtggcggcaggaacgctgcccccaatctgccctttcacgctttcggcccgcaaaagcaccgtctgatacagcatttgcgccgcctgatcgtattcctcataggtgtaaaaggaggtcgggtcgtctgctaccagcgcatcaatctggctgcggatcctttgatatacttcatcaaaccgcccgccatcgacatactcctctaccaactgcgacaaataggcatggtactgctcccggtattcttccaaatttaaaagcgccatgaaaaactgccgatcctctgtcgaaacgccggaagaaaaaggggtatccaccgggaaattgatcgtcgatgacgcatcggacgactgaaaaccgccgaaggccagattataatcccaggggattaagctcaactggccgtttttctcatagaggtagtaattgtgtgctatatttccgctcaggccatccagatttaccacaaaggtctgcaccgccatataccgcagaacgctgtccacgtccattgcctgctccagatttgtcccctcgctgatatttttcagtgcctgcaccacgcgcttgtggtcgcttttgtgctggaaaacacctgcgaatcccaaatcaccgaatagctgtccagatcgtcgtcgatataatgaagcgccgccgcgctgcccgaaccaaatcctcccgtcccgcctccaaaattcggactgccttcccatggggttctgctgtccggatttccggtttcttcttgctgcggcgcggcagtaccgtcaggcccgccatccgcttgttgggaagcggcatcctccgatgaggcagaatcaaagccgtccaatcctcaatctgatccagatccacatccttcatccggccggcgccgcccatttccatgctgtcgggcttatacagattcccgtaatgggtgccgtaattgcgcagggcaaaggattcctccactgcttccagcgccagatatacgccccaatattccccgttgacagaaatccgggcatagttgtaaagactggcgtccacatctaaaaaggcgaacatatcataaacaaccgcctctttcatcatggtcgcgtcagagtaattattgttcagcaccagcttatccaggccataacaggtctgcccgtccacgtattcgtcgaatttcactttaaagctgtaccggtccgaatcgctggaggccaccatggaaagactggtattgccctttgcgcgaatgccaacccggtaatatgtctctccgttgatttcgatatcacagcagtaataggtctccgaaatggccgtttccagcaaatcatcccactcgtcctcatctatccggatgttgaccgtcatcacctgatccgtatcaaaaagcttttgttcataggacagagaaatgcccgacgaaagctgattggaaaaggcagctaaaatccccagcaccaacacagccggcagcacagccgcccaaatgactttctggatatgtctgcttgttatcacgggctctcccccctaccaggacatatattccccattgtagctgaccatcgacacgctgtgtattccttccacggcgctcagcgcattgacaaagtttgtggacgcgtctttcaacttcacttccaccgacagttccatgctgtcccgggtcacagtcttcgcttttaccttgctgcggcatccagactgatccaacagggccatcgccgcggtttccgcattttcattttcacagcgcagaaccagcatataaggtttgtcgctgtatttgcggttggccagcaaaagcagaatcacgccgatgatgacggaaccgatgatggcaagcgggatcatgcctgcgccgatgacgatacccgccgccaggaaccagaacagaaatacaatttccaccggctccttgattgccgcgcgaaaacgcacagtggataaggcgccgaccataccgagggaaagtaccacattggaagtgaccgccataataaccagcgttgtcaccatcgtcatacccaccatcgtcagtgccaggccggaggaatacatcacaccagtcagcgttttttgataaatcagaaaaatgaataaacccactaccagggcaaaaaccaatccaatgagagtatctaaaagtgaaaattctgtgatgctctccaaaaagctggacttaaaaatatcattaaaactcatgatcctattctcccattattcaaatttccggcagacggcgtatttggaaaacgcgcctgtccggatatggccgatttgcagggcatcggcgatgaaagacggcaaaaacgcgtcgtatttcacctccagtaccatgcgtcccggctctatggccggtacaaaaactgctttcggatccagaaatccgataccggccaatccgctttggagcgccatgtcaaaggtaatgcgcacattgcccgcttcataaacatacggctcccacagataacgcaccagcgttttggggcgcagcagctggcttttcatctgaaagtccagttcctgcaaaagcggatgtccgtcaggcggcagccagtccggttcccccgagagcagcctgatacagacatcctgcggtatcctgcagccagttttcaggcataacccattgaccttctgctttttttccaaaaaaagtgccgagcaatcatcattatagcggcgcagccggaacttttcccggcggttgatcccatcctgtttttcccgcagcgccttatcgcagcagttgtcaaaatacaggctgacaatctggtagcgtccgtccgttccagcatgggaatcccggcgcataacagtcgacagccgctgacgcagaaccaaataggaaaatggatcgattccatattttaactcatggcgaaagccctgtgccttttgcattggtcagattcctccttccctgacttgttttacaggaattttacaaaacgaactttaagcgaaacttaaaaaagtcgcctgtttgcagaaatttacactttattcataagcaaaaatataaggtttaccggcgaaatatcgaacacgccccttaaaacagagcaaaaaaggcaggctgtatctgacagcctgcctggtcttaaataatccggcagaatctacgactgcaacggctgcgcctcaccggcggccgccgcgtcctctccgggctttttgcggcccagattttgaatccaatcaatcagcagggaagagaccgttaccgtcaccagagaataagcaatccgctgaaacgggatataggtcaaagaaagcagcagtaccgacaggtccgttaccaaatacgctctggacagccggcactggcttagcttggaaatcaccagtgccagcgcgtcgtcgccgccgctggacccgccttggcggaccactagtcctacaccgattcccacaaaaaggccgcccagcaaagccgctgccaacggatatgccgaaagatccggcagcattggcgcaaactgctcccatagccggaaaaaagcggacattcccaaagaggccactgcggaaagcttgatgaaatcccatcccagaaagcgcaggcccagcaaataacagatgatatccaaaaccggcgtcatcagccatgggggaagcgaaagctggtgatccaacagcagcaccatgcccaaaacgcccccctcggtaatacccacccgccggtggatattatgcatcccaaaggagagaatcgccgttcccaacagcagcagcgccagctgctttggcgaaatccaagacagcatctgcctgttccagcgccttgtttggttgcgaaaactcatttttaacaaactccttgtcttttgcaataaatggtcgatttttccccgatgacatttagtataaaggttggtataataccaatgtcaagcattctttcaatccgccgtttccccccaaacatcttgggaggattccccggctggattcctgttaccaaatggaggattcgatgaaaaacgaatatatgatcaaggagctggccagactgtatggcgtcggcaccgatacccttcgctattatgagcgccttggcctgatccggccgcgccgcggcgaaaatggataccgcctttacagcctgcgggacatttaccggctgaccatcatccgggacctgcggcagcttggtttttccaccgatcggatcagcgcctatctggacgatttgaacatcagcaacacccaggccctgctcgcagaggagcagcgtctgatccggcagcaaatccagcagctttgccaaattgaccgggtcatttccgaacggcaaaagcatttgaaagaacacgccgccctgcccgccggcgaaatctctgtccggtccatctccgaacgcccttgccttttgtttaacaccgatatctcccgcgatgaggaggtggactttgccattaaaaaactgcataaccgccacgcggataccatccggaacctgggtgggcaggccatcggcgccgggatgcggctggaagaagtccgcgcaggacgattcggccactatcattcggtctttttcctgctggaacaggacgcaggagaatacgacctgctgctgccggagggggaatatgcctgcctggtatacaccggcagttaccgcgccgcgccatcccacgcccgccggctgctggaagaaattcatgcgcagggaatgcacgccataggggacctgctggagctgtaccatatcgacaaccgctacacccgaaaagaagaggaattcgttaccgagctgcaaatccgggttacgcgctgaacccaaaaacagggccgggatgaaaaaatcccggccctgttttctccattattcctcccggtacaaacgcagtttgccaagaaagctttgataacaaccctcaaaatccgattcgccctgccaataaggggcaaattcactctctaaaaatcccacgagcttgggggctggcagccaaaccgaatgaaccgcatcatagcattccagcaaaaagctgccctcttccaccgtcaaagccggaatcgtttccccgctggacgagatgcgcgcctgcccggaaaaatattcgatggacgaaacgatattagcccggcaggcaggcgtgtaccacatggaattcacagcgggctgtgtgacatgatcgtagcaatccatcaccatccgcagaaaatcatacgcctcttggggatgagccgcatccttggtcactgcgccaaacagcgccaacagcccggagagctgttccggatcgtcggcagaaggcggcataaaccaggaaagctcctctccgttataaagttcccggtcggtaacccgccggataaagtaggtcatcaccgggtcgtgggtgctgtaagaataggtaaaagtccggtcatactgcagcacaccatccgaagcggaccgcagcttctcgtcctgacgccggatgaggccgaaccaatccacagcccggcgtacccgctcccgggacgagtccgaatcgtcgatttcgtccaggtctacaccgcacagagccagcatctgatgggccggcgaaaaacctatgccgtccatataatcaatccagcaccggaaaaaggcaatgacgcccgcctcatcccggtgggctttttcataagtatccagcatggtgtaatagtcatccaaggaggtttttccctgaacgattccctgttcctgcgccgtttgccgggtatgctcattgagcatcagcataaggccgacaggcagcagatactgcttttggtcgaaccggcagcaagccatcgccgccggcaaatagtcctccggccggtaggaggcgtccgcctgcagatagggctccaaatccagaaacgctccggaccgggccatttttcgcacgtccaggccggtggaatggttgaaaatcacaatatccggcccgctgccggtattgagctgcgccaccagctgatcctccatttcctgcaccgaatcaaaccgcacaagatccactgtaagctgaggatttttactgcggaacgcggccagcgcgtctgacaaatcggtatactcttcctcggggcaaaagatccgcagcacctgctgctgtttttgcaaagccggatcggacacaggcgttttttccccgcaggcacagcaaaaaagcagaaaagctgccatcagcgcaaaaatttttttccaggccattctccacccctcatttccactgcatttcacggtaacatttattttcagtatagcatagatggaaaaatccgtcaaaacatctgcatttttacgtcatggtgtgggattgctctgttttatttcagaaattccgacttcccttttctttcaaaccggatattcttccgctcccttcttgcagcacgctctccttttcccctttccggccgtccccggtggacaacaggcggaggctttgccgggcaaaacaggactaaatcatcggtttttcgtaaaaatgtagtgtttttccccttttttcgtaatatttcagggtaaatattccatcttatcattcaccaatatgttggcgttaaaaacctgtatctcggcattgcttgtttcggtctctccctttatcgtgaaataaaggaggagatttcttgaatataaagaggaatttgtctgaaacgctgaaggtttaccggtctctggaacaaaaatctctggtcgatttttccgaagagctctcaattggcaaaacaactttgcaggatatcgaatcctgcaaggccaatccaacgctggacaccgtccaacagattgccgacaggctgcatgtcaatccgctctccctgctttccgattgctatgacgcttctgatttgtatatggcgcagacgcttctgggttctttggatcggttcgagcgtttatccatcgagaaccagaaaaagggagtgattctttttgataagcttgtccaaatcttatccagaggccaatgaagaagccgaccgtcctttttccgccgggacgcagcttctctgttccgctttggacgagatgcagaaacggttcactttatcctattcgctgggagaattgaatccgctgcaatatcaaaccgcttaccaaaacattaccgaaatccgtaagattcttttgcggatacaccaaaatcagagcgctgacacagactggtgagcaaatggcaaaacaccggcatccatctaaaaccgcttatccggcagcagaagatgtttttctctgctttgtctttgattggaaaaaggctggacaaactgcctggttccacgggcagagggagcaccgtcatttcgcctgcacgatgcggtaataagttttggaggttacgtgataaacggcataatacagcagtgcaaaaaggaaaacggcgcaaacggtacacccgaaaaacagcggtttgtttgccatttgaaaagcgagcagcagcttgcacagaaccggaaacgccactgaaatatgaacgactgccatacccaacggaaggaaaaagaccatgagagcctgtttgttaatggtactgcgcgcttcccggtcgctcataccaaccttgcgtaaaatgtcaaaacggccacggtcgtcaaagccttcggtaatctgcttataatagataataacaccgttgcaattaaaaacagggaaataaagaaaatccctacgaacagcaagctgccatacaactgataaaaatcttcccgggccatatcggcgctgccggtctgcgccaggcggtctacggtttgcaaaagatcctcccgcagcggtcgtaatacgcctgcggcggctccgcggacaaatcgtagctgtaataatacatcagattgcagctagcccgtccggcaaacgcctcattgacgcgccgcaccaaatcctccagatgagagtaatccggcagcacgatcagcgcccccggataaccgctgaagcggctgaggaacgccggcatttctattttttcgcggatgtggtaagagaccccttccagcgttatttcctcttgatccagctgcatttcagacaaagccaccagcacctgctgcccggacagctgcaactgggtgcccatgatgcagttgtaatccgccaaggaaatggcatccatttcatacagcgcatccccgccgtccgacgccgaaaactccccgttttcacagcgggccggataattgaaattggcatagcccacatcgttttggaccgatatcccatagtcttttgcatggcggcgggaggcctgcaccaactgttcgccgctttggcgggtctccaccacacagctggttatgatctgccttggatagcgggcgcgtaaaatgtcctcctcgccaataaacaggctgacagtagaggaaagggtgaccaggacacaagtggaaagaatacagatattggaaaggcccacagcattttgtttcatgcggtacatcataccggaaacagaaataaaatttttcggctgatagtaaaagtttttgtttcggcgcagcagttttaaaatcagaatgctgcctgctacaaataagcaataagtgccaatgatgaccaaaagcaccgccggaaagaaaaccgtcagcgcatcgaacggggttttgaccgtcagcgccagccaatatcctgcgcccagcgtgacaaagcccaaagccgccaggggccattttgtcctcggttcccgttccccctctttttcgctgcgcagcaacgcgatgggatcagtgcggcagacgcttatgacatcataacccagtaaaatcaaaaagccaatgccgaacagtacaaatgttgccgccgcctcttgaaaagggatcacaaattccagcgccaccggcaagccgacgatcttgagcaaaagcaaaaacaaaagctggctgaacagcgccccagcacaataccgcagaaaatgccgatggcgccggtgatcagcacctcccacgccattaccagcgcgatatggcgtttttccatacccagaatgctgtaaaggccaaactcttttttgcgccgcttcataataaagctgttcacataaaacaaaatcaccagggaaaggataccgcagatccaggagctcatctgcagcatagcgctcatggtaacgccgcctgcggcggtgctgttcgccaccataaacgacacggaacgcagactgtaaaacagcatgacaatcagcgacgcggccataaaatacggcagatagatgttttgattgtttttgatattggtcagcgccatgcggatattgaagtttctacgcattctctttccctcccgtcgccaggactgtgagggtttcggaaattttactatacaattcttcgttattcatcgcacccctgcgcagctgatggtacaccacgccgtcttttataaataaaacccggccgacatggctggctgcccgggcggaatgggtcaccatcagaatcgtctgtccttcggcgttaatctgctcaaaaaagccgcagaaggctgtcggttgctttggaatccagcgcgccggtgggttcgtcggccaacaccagcttgggggttgtaatcagcgccgcgccaccgctgtccgctgcttttgcccgccggacacttcgtatggaaatttgtctagcagatcggaaatccccagtttttgcgcgacgggcgtcagccggcgggccatctccggatagctctttcgcgccagcaccagcggcagcaggatgttgtcccggatggaaaaggtgtccagcaaattaaaatcctgaaacacaaaccccaggttatcccgccggaatgcagccatctgtccgtctgggatgcggacagtatccttgcctgcgaacagcacctgcccgccggtgggcttgtccagcgccgccaggatattaagcagcgtggttttgccagaaccggattcccccatgatcgccacatattccccttcctccactgtaaagtttacgtcggtcagggcctgcacctgattccctccaaaacgggtggtgtagatttttttcacgttctgaacctctaaaatcgtcatgtcaaaaccccctgtttcttttttgccctttcagtataagcaaatcgctttttcccttccatcgaaccggcttacattttgccggttttcccttacagttttgtaagaatcggttttactccgtttccagctcctgccgggcaagtccgatctctaccgttgtgccgcaccccggctgtgaccggattgcaatggtgtgccccagcatcgtcagcacccttttgcacaaattcaacccgattccggtggattgggactgcatgtgtccgttgcagccggtatagccccattcaaaaatctgcggcaaatcctcctgccggatgccgattcccgtgtcgcggatatacagtgtcgccccctcataccagacaaacacgctgcctgatgacgaattgcagccatttggaatcggtcaggacctcttcttgcaggctgcccagaaccagcctgatctttttatgaataaaaaggattgaaacttctttcaccgcctgcttgacaatttcctccagcacgcaccggcgcagcagcaaatcgttggcagaatcgttcagccgctggtattgcagcgccatgtctacatactgctgcgcctgaaacacagactgctccagcgcgtttcggtccggatgttcctcctgcaaaagcagctggattgccgccagcggcgttttggcctggtgcgaccaaagtgcgtaatattgggctgccgccgccttttccctcttttggcgctgctccatattctgataatcggattttattttttcgatgatttcggcaaacagcatttcctccggcccatgggcgggatagtcccaggcttcaaacggcgcctgcgccttttttgtttccaggtttcggatccggccggcaaagcgccaaaaatccaacgcgataaaaagcagtaagacactgcccatcaaaatcaaagcatagaaaaccggccgcagcggcagcccatacagccagcacaccaacggcagcaaaaaagcctgacacatagccaaaaccatccatccgcccgcggctggcgcaataacctgaaaccaaatcccgccgcctcacagctcggtcctcacaaaatagccgaccccttttcgggttttgataaaagacggaagtcccagctgctccagcttttttcgcagcctggccacattgaccgtaagcgtgttgtcatcaataaagctttcgtcttcccaaaggcttttgatgatgctctctcttgtgacggccccgccccgggcttccatcaaaatttgcaaaatgcggctttcattccgggttaattctatgaaagcgtcttcccgccaaaccttcccgtcgcagggatttaaggagacatctgcataccgcacaaggctttgccgcgcgccaaaggaataggtgcggcgcagaagcgcctgaatttttgcaagcactacctctatgcggaaaggtttcggaatgaaatcatccgctcccaactgaatggccataaccaaattcatatcgtctccggccgaagataaaaatataatcggcgtttggctggcacgccggatctggcggcaccagtagtatccgtcaaaaaagggcagggagatatccaacagcaccaagtgaggctggaattcctcaaactgctccaggacattctgaaaattttccgctgcctgcacttgatagccccatcgggaaagatgccggcccagcgcactccgaatcgcagcgtcatcctcaaccatcaaaattttatgcattctatcctctccttctgccgttttcactctcgccaaaagacgggtcctttggataaaacgatctgacaaaaggattttcgacgtaggttccgcccgcctgaaaaaataccggcttctccgccaaaaggaaagtgctacatgcgtttttcaaatattccaagatggagcaaaccgacttttcttttcgacaaaccgggcctctctctgtgtccggtttgatccttacgtgtcttgtctgccgcttggcagatacaaaaaacggcggcgctgccttatcggtcagcgccgccaaaaccttttttatcgcgaagcctgtatcaaaaaaaccggattttgagccatcagcaggtgaagctgcccggccggccgggttcggctgactgcgatctgcgtcacctgtatctgcgtcagcccttcctgcttgcaggcatccagggtctgctgcagcgtttccagtgcaattgcgctgaccaaaaggcggacagacggatttctctggcacaccgtccggataatatcccccatccggcctttgctgcccccgataaaaacagcatccggtaccggcagatcctgttcgtcaaagatatccggcgccgtccccggtacaaccgtcaagttataaaccccaaagcgccccctgttttgttcgatcagatccagcgcctgcggcgcgttttcaatggcataaacccgaaccagcggagaaagccgcgccagctctatgccgaccgacccggttcccgcacccacgtcgtaaaccgtttcccccggccggaccgacagcttacccaaaatcgccgcccgcacctcctgcttggtcatgggcacctcgctgcgtaaaaactgctcatcagccaatccaaagccggtgggtgcatcgagcaccggacggcgcacccaaacggcgctgagcggcgcaaaggtctgttccaaaagcgcctgcgccggctgggtgataatccgttcatccggataggacagcgcctctcccaccgtcacctgcgcgccgcccaatccggcggcgcacaggcggtggataatggtctgcggcgttatgtccccgccggtgagaaaaaaagtttcttccccgcataaaacctgccctaccacatcgcagtccacgccatgggcgctgaccaggcggacatcctgccaggaacggcccagctgcgctgccagatactggaccgtgctgatgccgcagtggattttcacctcatagcccttttcctgcaaaagagcggtcacttttttcgcgccgctgtaaaacccggtatcgccgctgaaaacaacacagattttctcctgcggcgcttcttcaatcagccgcaggattgcctgcggtgcaacggcttccaggcgcagcccgccaaaatgcggcggcagcgcctccagcagccgccgggcgccgatcatccgctgggcctgttccagcgcggaccaggcggcccgggtcagcgtatcgggattccccatccccattccgaccagtgtaattttcatcctttttcctcccgtctgtttttcgagatttcatcaggcggctgcctatttctcccgggcgctttttttcccgtatccccggggcgttaccatccagctctggacaactttcgtatcccggttgccgataaacacggtgcagaacatgtccagcttttcttccgccagctgccgcagcgtcaaaatcttctgctcctggcccggccgcccgatattgcgcacccagccgcaaactgtatccggcgctttatgccgcagaaaaatttcacaggcccgccgcagatgcccggtgcgcttccggctggccggattatacaaagcaacgcagaaatcccccagggccgccgcttccagccgccgctcgatcacctgccaatcggtcaaaagatcgctgagcgaaatgaccgcaaaatcatggcccagcggcgctcccaacactgccgcgccgctgattgccgccgttacgccgccaacgacctcgatctccaccggcggatactcctgcgccagctccagcaaaggcgcggccatgccgtacacgccggcatccccgctgcataccatcgccaccgtttccccgcaggaggctttttccagcgcccggcggcaccgcttgatttcttcggtcatcggggtggtaaacaccggcgtatccgggcagaccgctgcggcctgttctacataaataccataaccgcagatcagctgcgcctgttttaaagcggttctgcccgccagcgtcattccgtcgggattgccgggccccagccctatgataaaaatttttttcatctttccaaacctcctgaaaaacgaacggtataaggcgccacggccattgccattgtcacaccgtttcccgcatttttcttacaatacagcgtcccgccgctgccgagaacggcgctgcgttcgcagacgttgtcggtgccggtgatcttctgcacaaaggcggaggcggaaaaatccccctggacagcgttgagcgcattggccgaaaaggtgcgaaaaggcagtcctttgttttggcagaacgttaaaaggcccggctccttggccttgagcgatatgctgcaaatttcccgcacggcggccggatgaatgttccccttggccaaaagcatttgataggcctgttccaacacctcatcgcttattcccttgcggcatcccactcccaccgaagccaccggtgggatcagaataagagcggattttctgcccgccgctttcatggtaatccttacgtcatactgtttgtccgtcaccagcaccacaccttgcggcagcgccccctccagcgggaaatcgcagcgcagccgaatctgaccgccggccagcagactgccggagacttttcggattgcgccggggttttcgattttcatgttctgctgcgccgcccactcgtcaaaggcaaaaacaccgttccggtccgtcgcagtagtgatgaccggctgcgctcccgtcagccgcgcaatccgctgcgccaggcggttagcgccgccgatatggccgcctgccagcgggatgcaaaagcgcgctgtatcatccagagaaaggacggcgggatcggtggttttgctgaccagatagggggctgcggcccgcaccgcaatccccgccgcgccgatgaataaaagagcgtccgattccgaaaaagccctttggcaccattggctcaacggctgtttctctttgccaaagccgcaggcaaggcgcgcctgttccccttcgtcattcaaaatccgctccagcttctggcccagccgatacccttgctgggtaaaggcgatcatatcaatccgcatgcgtcccctcccggaatccggtggtaaaggccgggtcgtacagcttggagcggctgtatgactcgcccaagaaatctcccaccacgatcagcgccgttttggatatgccgttggccctggccgtctgctccagcgtttccaccgtacagcgcaggattttttcatccggccagctggctttgtaaacaatcgcggccggcgtgtccggacgataagcaccggacagcagttcttttgtcagcggcgccagcagtccggcgcttaaaaaaatcaccattgtgcagccatgcgccgccataagcgccatcttttccttttcaggcaccggggtacgcccttccatccgtgtaatgatgacactctggctgatatccggcagggtgtattccgctttcagcgccgctgccgccgcgcagaagctcgacacccccggcaccacctcatacgaaattccctcttgctccagcagatccatctgctcccggatagcgccgtatacactgggatcgccggtgtgcaggcgaaccgtggtctggccctgcgcctcggcctgcctgatggaaaaaatcacctgttccaatgtcatttccgcactgttttggcaaaggcattccttttttgcatagtccagcagcgccgggttcacaaggctgcccgcgtaaataatccgatccgcaccggccaaaagccgcgcgccccgcaccgtaatcaaatccggcgcgccgctgcccgcgcctacaaagtacaccatttttcacccatcctctcagctgaaatgttctatgatttgccgcgcctgttcggtgataaacaacgctccctgctgctggctgtaaaaaaccagccctgcctgataggcgccgcccacccggcggctgacatgccactgggctttgtccgccagcgtttccactaccttctgccgcaagccgcagctttccaaaagatccaggcaggcgtcggtcgtggccgcctgcatcagcgcctctattgttttgcggtcggcgccatgcagcgccgcatgggcgctgatcagctccatccggcaatccgcccagcgggaatgggtattcatgattcctcctgccagtttaacgaatttcccgatgtggccgaccagcaacacctgctcaaagccaaattccgccgcgtcgtccagcgaatcccccacgaaattggcgcactgcaccaccggtattttggcaagttccaaatgggaagcaacaaaatcctcgccgtagtggcccggtgtcaaaagcagctgtttggctccgtttgcggccagctgccggatttccaaccggatggactcccgcagcgcctgcatgcttttgggctccacaatgccgctggttcccaaaatcgaaattcccccttcgatccccaaatgaggattgaaggttttttccgccagttcccggccctggggcacccaaacggttacagacagcccgccgccgtatcccgcctgccggcagacctgccgcacttccgcttctatcatctgccttggcacccggttaatggcggcggcacccaccggctgttccaacccttttcgagtgacccgcccgaccccttcgccgccgtcaatgcggatgccgggttccgaagaatcggatacccgcgcacagatcagcgccccgtccgtcacgtcgatgtcatcccctgcgtccttataaacgccgcaggcggctgaccgcccgtcctgggaaagcgcgcagatatccacctcaacccggatgccggacggcgttatgatcgcctccgtccggctgttttcccccagcagcaggcggcgggcggcggccttcgccgccagcgcggcacaggaccctgtcgtatagccgcaccgcatccgaacgcctccctgatacaggtaatgctcaaatttcgccatctttttcctcctttggccctgccggaaaaaacaggtatcccccgcttttctgcaggccgcctttttgaatccgaacccggaacacctgctccaaacacccgctttccaatacctcctgcggcgaaccggcgaaaacgagccgaccgaactgcataactgccagctggtccgcataggaaagggccagccccagatcgtgcagcaccatgatcactgttttgcccgcctgctcaagctgccgggtcagctccatgatctcaaattgatgggacaaatccagataggtggtgggttcatccaaaaacagcacctgactgtcctgggccagacacatggcaaaatacaccttctgccgctctccgccggacaggcgggacatgtcccgcccggccagatgggtaacgcctgcccattccatcgccttttggaccatctgccagtcctcctttcggtagcgccggggatagcccaaatagggaaaccggccgtgcatcaccatactttgcaccgatatgccgggaaccgggcgggactggggcagataggaaatcagctgccccaattcccggcgggaaaagccggacaggggtcttcctttcagcagcacctgcccggcggatggcggcacgattcccgcggccatccgcagcagcgttgactttccgcatccgttggggcctaccagcgccgcaacctccccgcttgggagcgtaaggctgaaatcctgtactgccatttgtctgccgtagctgccagtcacgccgatcagttcaaccattgtctgtccgcccccctttgcgccggatgagaagatacagaaaaaacgggccgcccaaaaaagacatgacaatccccaccggcagctcgaacggcgcaaacagaatccgggccagcacatcgcagacacagacaaaagccgcgccgctgaccccgccgatgcgaaagctggaagccccggtaagcgtatcgggaagcagggttaccaccgcatcaatcccggcgcttaaaacgctgctcaccgccacgccggacagcaccagcgcaatgcgggaggcgcgggtagcccgggcgatggcgtataccaacagcatcgccgccagcgcgcccaaaaaggcggcagtgggcacagcggccggccagcggggcagaaacgccgcgcacagcaccgcaaaaaatcccgcccccgcgttgaccccaatgatattcggccccgccagcgggtttgccagcaccgattggatgatgacgcccgacacggccagcgtcctcggcaggcgcacatgaagaaaaatgcgcagcaccgccgccaataaaaacagcgccagactcatcagcaaaatccagatgttatgccgcttcttctgcataaaggtagtcggcaaggatctcataactttcccccagcgatgattgggcttgttgtgaaacagttctttgggcaaaaggatataccgtccctcttttaccgcggtcagcccggcccaggccggattggactcaatcccttccgccagcgcctgcatggccttttcgctggaggcgcccatggtggtgacaaaaataaaatccgggtcctggcggatgatttcctccatgctcaactcttccagcaggctgccgttttgatcggcaatgttcacacatcccagatcgcgcaacattgcgccggtcatgctgtcgctgccattggccttggcgccggtggaatacgcccggataaacaacaccgtcggcgcatcctgcccctggctttttgcgatggcccggtcgatccgcgcctgcactgccgtaccgttttgttcgtatagatccgcgcgccccgtaatgtcggtgcagatttttaacatatccagataatcctcaaaggtttccacatcaaaataggcggcgggaatgccggattcttccagaaaatcccgcagcttcacgtgttccgctacattggcggacaaaatgacaaagtccacctccaacgccagcagctgttcggtgtccggcgatttcatcgcgcccagattggcgggtgcatccggaagcgcaaagctttcttcctccagcgcgtcctgggtggccgcaatcagctggccgcccgaaaggtcagcagttggggatctcccggcccaacgctgacaccgtaaaaacaagccttttccatttggccgcctcctcagcgaaccggctctgcatcccgaaggtggcgcagataaattttccggatatccgccagctctcccaggccctgcaaacagcaggatacttcaaatccctgtgaggtaagcacgcttttccagctatccggcccgtcgccggccatatcgttgcaggcgtgatcgccggccaccagcatcatgggcgcaagcaaaacgctgccgcatccagtgcgccgcagggcagggagcacatcctccagcgcgggacaaccctccactgtaccaacgaaaagatctctcctcccctggctgtgacacagctgttcaaacgccgcgtaaaccgaattggcctcgtgcggcgttccgtgtcccatcagcagaatcagccggccctgcctttgctcgaatcgggtgcaaatgacggcggcagcctcttgcctatccgcggcggaggacaaaagcggcattcccagccgaagggactcaaaccggtcctgaaaagcccttaccgcttcccgcaaaaggtcaaattctacgccgcagatcaaatgggtgggctgcacggttacgtcgcttatcccctgcccggccatttgcgacaacgcctgctccggagaaagaaccgcctctccccggctttcccaaatgcggcggatcaccccgctggtataagcagaaaggatctccgcttccggatacgcccggcggatggtttcttccacagctccaatggtcttttggcgggtagagacatggctggtgccaaagctaacgatcaaaatgccctttttttgcatatttccactcctttttctgctgtttttcacggcttttttgcctttcaaacctggaaagggctcaatgggttcccctgaccaccttcatccctttttcttccattttggaaagaatcttggtgatctgggagcattcgctcccatcatgctttcgggtgcaaataccggcgtggacaatctccacgccgatttgctccaagcgctccagtttttccaaaaatcccgggtcggtatcgtaatcgcacgcacagccgttgcagtgcagaaaggccatcagctgcaacggctcgcccttgtaaggcgcaaacgaacgggtccgctcattcatcgcttttaggcagctggcgccggtacagacggaattgcttttgatacaggttaaaatcgcaatttttttcaatgaaaccgcctcctgttttgggcctcatccggccgattcgtataaaatgtgcatttgcccggtttccgggtcggtgtaaagtttggcttccacctcatagacctggcggataaactcccgggtcaacacctgtttaggcgggccgaaggcgataatacggccattttgcagcacaaacaacttattgcagtacatcgccgcgatgtttaaatcgtggatggccgcgaccacggtcagacgcagggaacggacaatgtccattaactgcagctgatacttgatatccaggtggttggtcggttcgtctaaaatcaggcattgggtctgctgggccagcgcgcgggccaggatcacccgctgctgctcgccgccggacagggtggaaaaactgcgctgggcagggtggaaagcgggatcagctttttatggtcggtgccgaaaagcatccgcaccagatggggaatcaccagaccgacaaatccgatcatcccggaggcatacaccacaaagccgatgaccagcgaggtcaaaagcaaatatccctgccggcggcggtgcaggtcggtgcccagggtaatggacacttcgtcgcccaagagcatgaggttcaaagaccggtactgggtccagaaaaacaaaaagctgaccagcacgatgggaaaaaggaagaagaggttctgccacttggcgcccgccaggctgcccatgagccagtaggtcagcgtctgcattccctccttatcgttggcaaaatagaccacaaagctggaaaaggcggagcagacggaactgagcgccatgccggccagcaacagcttgatggagttggagcgcccgccaatattggacaaaagcaacaccagcagggaaataccgaatgcgccggcaaaggcgcagatcacgatggagccagcccccaaaaaggcgccgaccccagcatgatcgccactgttgcccccagcgatgcgccggaggatactcccagaatatacgggtccgccagcgggtttttcacaatcgcctgcatcaccacgccgcagaccgaaaggcccatccccaccgcaacggctaaaattaaccgcggcaggcggatcagccagacgacatcgtgaatcgatccgctgcccagttcggaagaaccgactccgaacagctcgtgcaggatcacccgatgcacctgcgaaaccgggattttaacggtgccaaaagtaaccgccgagagcacggaaaccgccagcaccaccaacagcacggcacaggtcaaaagataaagcggggtgctttttatcagccctgtttcctgtgaaaatttttgtttcatcatccgttcctactttgccagttccggatacagtccgttggcaaaaatctcaagcccgtcggcagtgcgcatggcgctggtatacatatctcccagcgggatggcatagacgtcgccgtttttcaccgcggtcaagctggacagcgcctcattaccggtgatattggcaaccgatttttccgccatgccctcttcgtccccatccatatacaccacaaaaatcacctgcgggtccagctcaatcaggtcctccaggccgatggtctgttccggcgtatccagcaaatccgcgccgacggtgattgccatatcgccgcccagagtggttttatcataggtatagatgctgtcccccaaaaattcgatgatgagggccgagcgcttttccatatccttggactgatcgacaatctgctggacctgcgcctggatttcatccacaatggcctgcgccttgtcctctacgtcaaagattttgcccaaatcgaggatataatcgtattcatttgccagggtgcggtactccacaatcgagttggagttttcggccatataggtcttgaccccacgctcattccagaaatcagtgccgtccagccgcttctctccaaaggtagaccaccacccccaggatcatatccggctccagcatcagcaccgattcccgggaaacggtaaaatccgtcagataattgattgtttcaaaatccgcctgatattccgctttcacttcatgatccagcccggcggccgctacgattttatcgcccagccccaaagccagcatggtttcgacgttgttttggttcagcaccagaaccttttcggggcagcgttcaaaagtgatgtccaccggttccttggcataattataattggaaaccgttacaggataatgggccgcctgcggctgtgcggcggagctttctgtctctgtttgggaagagccctgcgattccggcgcggaacccgcagtgccggaacaggcggtcagggacaatagcagtactgccgccaacaatgtgcataaccattttttcatgtttcattcttctcttttttgttttcatggacagaaaaaaggaacccggttttggcaatcggttttccggaaacagctgtccgttttgttttccacccggcgcttacccgccctgtggacgcacagggcgggtaagctgaaaaagcccgtaacacagattttgtctgcgttacgggcttttccatgttattttccgttaaaagaggagaatccgccaacgataaaaccgttgccagcctgtcatgccgtccccgaactccctgataattcagcagaaacaacaaattccgtcctcgcagaattgctacagcggtgccgccccgttcacacggtccggcgctcaaaaaggcaggtattctggcttagggatcgacacacggttttcgtcttcccagcgcacggtacgccagtgacatgctgaaaaccgcattcctccaatacagcaacgggattgcgcgggattctcacccgacttcccttttcatccgcacggcagccgccgcacgaaacctttatgaccgacttcagtataagggcaaccgcgaaaaatgtcaataaaaaacggatcaagggggcaaaagttgccgttgtgggggattttcatttaataaactttccctgtgataaaaccgttccccagtgctactatgtcccggctattccgctggaatatgtaaaagatccctcggtctttggaatgcagtttcgaaattggaaaagcagggagtgatcccggcctgccgaaatgttcagcacaaccaactctcttttgctttttctcccgtttatgatataattgtaagaaaatagaaacatgataaaggaggattttggcatgctgtctgtcatcatttgtgaagacgagccaatccagacgacccttttggtcaagctggtgcagcaatgggcagatcagtgcgccctcccggttcagattttatcttatcccaatgcggaaagctttcttttttcttatgaggaacagccttttggggatattctcctgctggatatccagatggcccagatgaacggcatggaactggcaaggaagatccgggaacgcaaccggcggatacagatcgcctttctgaccggcctgccggattttatcagcgagggctatgaggtggacgcgctgcattatctgattaagcccatccaggagaaaaagctctttcaggttctggaccgggcggccttgaatcttcagcaggcgcccaaggtggttttgcttcccatcaacggcaggccggttcggattccaatcaccgatattttttatgcggaggccttttcccacacgattctgctgcatctggccggcggggaggaatccctgcggatgcggatgtccgatttgcaggagctgctgggagaggatttttgccgctgccaccggtcctatatcgtatcgctggagcatattcggcatctgtcccgctcggctgtatttctggacaacggccagcagattcccctggcccgcagcgcgtatgacgggattcatcaggcgtttatccatttccattgaggagggctctggcgtgcggatttttgattttttctttcaaaaggcgatcagccgccggatctccgcctttcaggatgagatgatgaaccgccatgtggccgaggtggaaaacctgtaccggcagatgcggggctggcggcatgactaccacaaccacattcaaatgataaaagcctaccgcgctctggggcaggatgaccggctggacgcttatctggacgagttggaacaggatctcaagggctttgacgtactgatccgctccggcaacgtgatgatcgacgcggtattaaattccaagctctctttggccaaaagccatggcatcgccatcaacgccaaggcggttgtcccgcaggagctgtcctttcccgatattgatttatgcgtcatcctcggcaatctgctggacaacgccattgaggcctgtcaatggctggaggagcccgcttcccgctttattcgggtttatctggatttaaagggagaaaacctgtatttgtgcatcaccaactccaccgggaaaatccaaaagcgaaatgggaaatacgtcagccggaaagccggacggcacggattcggactgcagagggtggaccggctgatcagccggtaccagggatatctcaagcgtgcggacgaggagggtgtgttcacctgcgaggtgctgctccccctcggcagccctctttaaaacaaaacagcggcgcttcggaacatctgggcgccgcttttgctgttcacgctcaaaatcagacatttggcgccaaaaatgccccacaggatcttttttctactatcatagccttaaaggagggagcgatatggcaaaacagacctcaaaaccgcttattctttcggcaacaacctgatttatatgctgaaaaacatgtgggcgcactgcaggcgatacacgttcatggccttttttcaggcgccgttcggcgtattggaggcgctgctgaccatctatctgtctcgggcggtggtgagtgccataacgcaggcgctggagcccttggcggtgctggcccaaactgcgctgattggcgccgcgcttttgctctgcgcctgcgtgaaaaaatatatgtacgcgcatatggagccgtttatgctggatcacgacatccgctataatctgatgctattccagcacaccatctctgccgactatgaggcaatggaatcccccgaggggctgaaccgaatggcacaggcattgaaaaacaccgactcggacacaagccctacccggatagtggtgaaaaccatgtcctcctttttggagaacagcattggcattgtggcctatggggggattttggccagcctcagcccctggattctgctgaccgtcagcgttaccaccatcggcagctttctgctgatgcgccagaactccgactgggcttaccgcaacaagggccgctggctgggcgccgaccggcggctggcatatgtgcgggatcgatctgccgacttttcccaggccaaggacctgcggctgtacggcatgtccggctggcttcgcagcctgttcgaccaggctttgaccgaccggatgggctggcacaaaaaacagcagcaggtgggcttttttactgacggcggacaaacgctcatcgcctttgtccgggaaagcatatcctacggcggcctgatctgggccatttacgccaaggggatgagctccgcggattttgtcctgtattttggcgtaatcgaggggctttccaactggctgttccagctggcccgcaacctcgaccaattataccggtcgcacctcggattttgtgaaatccgggaatttctggaccttacccccggcgacccggcgggcgaggcgccccttcccaccgcgcctttctccatcgaattccgccatgtcagctaccgctgcgccggcaacgaggaggacaccatccacgacctgagctttgtgatccccaaaggggaaaaactggtgattgtcggcctcaacgacgcgggaaagaccacgcttgtaaaactgatctgcggtttttacaccccttctgccggctccgttttcatcggcggcaccgatatccggcaatttgggcgcaaagcgtattacaagcttttttccgctgtgttccaggaaatttttctgctgcccgtatcagcggcctgcaacgtctccgccctgccggttgaagagacggaccgggaaaaagtgcagcaggtgctggagcaagcggggcttttggaaaaaatccaaagccttccccaagggatggacacccgcctgatccgcagtgttcaagatgacgcgtcagacctgtccggcggcgaaacccagaagctggctttggccagggcgctttacaaaaatgggctggctctgcttttagatgagcccaccgccgccctggaccccctttccgagtttgagatctattcccatttcgatcaaattgtcggggacaaaacagccgtttacatttcccaccgcctttcctcctgccggttttgcagcgatatcctcgtctttgacgagggcaggctgattcagcggggcagccacgatcagctggttgccgaccgcttgggccggtactacgagctgtggcacgcacaggcccagtattacgatacggcggccgaaagaaaggcatagaaaaaaacagcagggagcgctccctgctgtttttttctatgacccatgcttattttcccggcgccagctgaaccgatgaaatctcttttgcgcaaacgcacagggtataatcgcagcgaaacggcacaaaccgaagctgcaggccatcgacccgggacagaatcccctgcggcccggcaacggaaaaccggccgaaatttccgctgatcccttcgccggaaaatttgacaaaactctcctttgccgcccagacccggtaaaaatccgaaaatccgaaagcctgcaaataccggtcctcctccggatggaaaaaacggcgggacagctccgccaagcggcctggcttgtgaatctgcaaatcaatgccgatcggctcgctggaaaaagcgccgagccagtaatccccgctgtgggtgacggaacaatgggtttcgggtgaaagcggaaaaaaaggctttcctttttcgctttcctgcaccggccagcgctcctcggcccccgccagcggctcaccggcaaacagggcagcacagcgcaccagacaccggcgggaggcagggcgctccggcccataccagtaaatcgtgactgccgccatccggctattcctctattccgcgctgccgcgcatattcgatcacgtcccgtacctgatgcagtttccaaacatcgcgggtgagaatggtcgtatcaaagtaatcttcaaacgcgcaaacgatattcataacgtcaaacgaattcaaccccaaatcccgcacaaaatccgtatcaatggtgacctcgctttttccggttacctcaaaaatga

SEQ ID NO: 1172 - DNA, 29155 bp, Unknown
  16S sequences of unknown bacteria
cggacaactggaaagcaccaaaggaggaagaagaaatgacacaggaacagtttaataaatttatggacaattggctttctgaaagaggagatctccctgtaagcgattgggcaaaggaagaaatggaacaggcaaaagaggaaggcataacggacggagcagctccacaggcgtttgccactagggaacaggtggctgcaatgattttgagaagtaaagataagtaaagaggtgaaataaagctatgccgacaataaacgaagtaatagaaagaaatgacagggtaaaaccaaacgcatactcagaacaggaaaaggctggttggctttatcgtcttgacggaagaataagttctgagattatgcacatcgaaccacctatgcaatatcaatatcccgagaatggggacaaggttcttcttgtccccgaaccttatgacgttgtgtacgattactacgttcaggcaatgatagattattacaacaaggagtataactcatacaacaactctatgataatgtacaacgacgctgtacagaattacgcaaaatactacataagggaaaatcaacctaaatcgtattacaactttagaaatgttttataagaggtgataagtatgaacttaccgcaattaatacagggcgataactcagcaagacagagtattattaattttctcggacttaattacggaaggcttacagaggacggcgaactggaagactgcgaaaacttgtctaccgatgaatttccttgtctgtcgcaaagaaaaaagagagtaagagagaaacagtacaaaagccctacaacgctttattccaaagcagggctttttattatagacggaacggacgttatatataacgatgaaaagataggtactgtaacggcaggcaaaaagcaaatggctactctgggcaaatatgtcgttatattcccggataaaaaatactatgacacggaagaaaagaagttcggaaatatggaagaaacgtacaagagcggcgcagggcagataacatttgcggcaacttcaaaagatgatgatgacccggttaaatatgccaccataacgacaacaggcgcaaactttaacttccgagacggagacgcagtggaaataacgggatgtacggtaaatcccgaaaacaataaaacgcttgtcataagaaaagttaagggaaaagtgcttaagttctatgaaaacagttttaccgcaggaaaggaaaccgccgcaataaccattaaacgcgccgtacccgatttagagtttgtgtgcgaaagcaactaccgtttatggggctgcgcaaaaaatactatttacagcagtaaatacggagaccctcttaacttccaggtatttgacggattaacgagcgacagctactacatagatgtcagcagcgatgggaagtttacaggttgtattccgtttacaagctttatctgcttttttaaagaggacgttgtacataaaatctacggcacaaaaccgtcgaactttcagttgcttacatcaagcgtattcggcgtacaggaaggctgtgagcgttccatgtgcgttatcaatgaaacgctttattatcttggcagaaacggcgtatatgagtacacgggcggtgtccctgagcttatatcgcagaacttcggtacaaagagatttacagacggatgtgccggcagtgatggcgataagtactatatctgcatgagcaacggacccgaaagagccatatatacatacgacatatcaaaaggaatatggctgaaagaagataaagtatcggtaatagactttgcagatatagaaggacggctttattacattgacgaacagggatggaaatataagaccgctgacaatagctctaatgaggttatcaattggagtgcgacattctgcccttttacagaacttatcaatgagcgtaaaggatattcaaagctgaatttcagaatagcgctgggcgcaggagcgtggctgaaaatagagataaagaccgatgacagcctatggaataccgtatatacaacacataacaaaacggcgaaaacaattaatatccctatattccctaacaggtgcgaccagtttaaagtgaggctttccggaaaaggcgagtgcgtaattaaatcatttgttcgtgatttctatgttggaagtgaggtgtaacctatgattttttataagcagttagacaaaatagaccctgccgaccctgccaaagcgatattggctatggagcggcagataagatacatacaagaccagttggaatatacgcttgtcaatcttgacagcagtaacataacggaaatcgatacagacataacggatataacaagtccgggagagagcgacagtatactcggcttactaaatctcacagggaaaaacggcgaatcgtttaaggttggatataatcccaacagaaatgaatttgtattcagtttatccggtgaggacggggttcagtatatgtatatgtcatcgaacgggaacttggttatttccaaaaatacatcgataacaatcgacagcggaacgtggtgaggtgatataaatgggatattcattaacaaatacaacaaagaaaaaaggctcaaactcttcaagctctaataccgataagaaagtagtagtaacacgaagcgagagagaaggaaaaaagaacggctatacaaatagctcaaatgtttccggctcaggcagtaatagccctgctgtaaaatacgaccctaataccgattactactctgctatacaggacgctatcaacagaggagcaagcgattcagaaatagacgggcttgttgcttcaagggatgccaaaataaaaggtgaaggattaaaatatacgccttttacaatcggggatataacaaacttcaaaacacaatcagcaattaaaagaggagattatgtaataggacaagatggaggcaatgataagtatacctataaccctacagatgaagccattaaagcactcgcaacaagcctacactatgaccccaacaatctaagggggtatttagatccttccggctattatactggaaagcaatcatcatatatctggatacagcctgacggaacaaagaaaacaacgtattcaaatgcaacaaactcaaatcaagccttgttggacggaatccacgcaggacaattagcgcaaggttctaggttattaagtgctgatacatacggcacaggttcattaacgggaaacagttataattacggagctattgtatcagacgcagacggtttttctggctttggtaacggctatgaaggcggcaggtatacaagtgataaccaatatggacgtgcccatgatatgaataatatgaacaagtcgtttttaagcggacgagacggcatagattattttaaacccgataacaatacagaatatacaggcaacgggcttgtcaacgcatacaacaagggcaaagactttgagggactgggaccggctatgggcggttcgagtggagctataggaagttacaatgacgctgacttaccgtctgacgcattggcacagattagagagtggcagaagcagtataaagcggcggaagccgagtatgcaagaacaggaagctatgacgcatatcaggcaatgcagaacgcccacgctatggcagaagctataagggctcagttcggatattcgggaggaatagacggttcagccttcttaagcggttggaacggaagcggtacatttcccggaggaggcttccccggaggaacattcccgggtggaggtacacagggatacggcacaaatcctttcccggaatataaaagcccgtatcaggatgaaatagatgagcttttaggcagtattcttgattacgatgagtttgtatataagcttgaggacgatcctgtatttcagcagtatgcttctacatatcttcgtgaaggcgacagagctcttaacgatacgttggcggcagcggcggcaggcgcaggaggtatgaactcctacgcagtatcggcggcacaacaggctcagaattattacaatacacagcttaccgataaagtaccggaactttacggaattgcgtatgacatgtatcttaaaggctttgagcaggagcttaataaactcggtgtggtacagggactggaagataccgcatacggcaaataccgtgataatgtcggtgattggtttaataaccgtgattttaactacaatgcgtatgttaataatcgtgatttcaactataacaagtatcgtgatgaaatatcagacgatagatataacaaggaatgggagtacagtgtcagcgcaaatgatagagataacgcctataatcaggctatgagcttccttgaaatgggtattatgccctctgcggatgtactcggaaaggcaggaataagcatgaatgaagcgcagaacttcatcagtgcggttctggcaagcaggacaaagaaaagttccggaggctcgggaagaaagtcaagtggtaaaagcagtaaaggaaagaaactttcaacaaaacagtattcagatttaaaagcagcttacaacagcggagattttgacgcatattcggatttggtagatgaactggacgcgacaggatatgacttggacgagtacatagaccgaattgcttcatcatcggatatttggtatagagcaaatcaatcaggcggtcgtactccggttaagaaaagcgaatgggctgagggaaggtgattgaatggcttcgggaaaatatgattatttgcacaagaaaaacggatacggaaaagtaaaagaagttgaatacggtgatacaatggaaacggtgagcgcatcttcggatgcgccttccgctaactcctataaaccaagacagacaaaaataagaacatccgctttagatgccgctcatttaagaaatgacagaagcagactgaaaagcgagattggaaaaatccaaaatacacttgtaagcggagaactttataaaaacggagcaaataaggctgctgccgacagggattatcataataaatataaccacatgaagtcccttgaaaaagaacttgctacaatagatactaagcttaaatcttatgagtatgatgaatatctggacgatactcatgaaaacaacttcggcggaaggtttgaagcgaatttagctcagggcagattatcgcaagattcttcagcggcatggaataaatatttaagtaatccaacagatgaaaaccgccaacttgccgagcacatagattatgtggctgaacagttcggagcaaataataaaaaggtattggcagaggacggattaatttcaaagtctctggcaaactatcttccgcagttaaaagaccagacgaaagcccaaataataggcggtttgggtggagcggctgccggtgcaggtgtggcactgggagcaggtcttcttgcgcctactcccgaggaggttgttaccgttccgacattagccgtaaaaggtttaaaaacaggtattacagcagcaagcggtttatattcttatggaaatatgcgtggtgctgcctttagggaacttataagttcaggcgtggatgaggaaacagcacgagcggcggcaagtgatgaagctcttatttccgggcttatagaaatggctgatacaggtattgatataaaaatgctcggtatcggaaaacttatagataatgtcggtaaattcggattgaaaacagccactaaacttttggctaaagaaggtacagaggctgcaaccgaaaaaagtattaaaaaggttgtgtcagcactcggtaagtacggtcttaatatagcgcaggaagctgccgaagaaggttctcaggagatagtaagcatagctaaccaacaaagggcattggaaggcaatacagggaaagccgatcttcttcttaacagtataagaaaagggtttaacttaaacgcagcagaaaaaggacaggtattggaaagtgcggcagagggagccaaaatagcctcaatgctcggtggagcgactatggtaggcacaggaattgccaacagagctatcgagaacagaaataacagaatgtattccgagacaggcagaactttttccgaaacggaaacagttgacgatgttattcaaacaggtcttgaaagtgcgcctgagacagaaagttacaggcttgcacaggaaatacaggctaaacgtgaagcaggtatcgaaccgacagacgcggaaataggaaaactccatatagagaatataagaacaataaacgaagaagaagccgattctgaaataaatgcggaagaaacctctgaaatatcagtctcagagcctctttcacataacgatataagagagccgttatataacaacggtgtaaataacgtagaacttacaaatgcagacagactgctgaatgaattggcaatagaaacacagacggctaaactgagtgaagcggaaaatcatttcggagagaatggcaaaaaagcgtttagaaattactatcagcaggaaaacagcgttgaggattactataacggtttttctcgattttacgaggctggaaaagtaggtcttccttttgataaagtaaataccgtatatagcaaaggcatttctcctgcggtacagtatgccgcatatgccgcaggtcagaatgatgaaaaggtatatcttaaaagagacaaattagcttcaaaggtattttatcctaaaggaaatttggtaattaacgagtattccaaaaagctttcaaaagccgaggctgatttttataacaggctttcggctattacgggaaataaaatagagtttgtcagaatggacagcatagcagacggagcggctgacggaagttacagcaaaggtttaatcaatgccgagataggtacggaagaaacaagatatgtagttatatcccatgaaataactcacggcttacagagaacgtctccacaggaatacagggcttatcgaaactatgcggtacagctggctgaaaaatccaacggcggtgatgtgtcgattgtagagcagtacagccgactttataagaccgacacggaaaacgctatggacgaagtggcagccgattttacaaagcgtatatttaaagataaaaccgaaatggaaaggtttataaatgacaatatacaagataatcgaagtatgctagagaagttcttcgacactgtaaaagcgttcgttgataagattaaaaatgcttttaaaggcgataaaaaagctatggataaagcggctgttgatgagttcggcacaacaatatccgaattggaagaagcaagaagattgtggcttaaagcgcttaaggctacggatgagaaagttaaggtgacacagactgatactgtttctattgtaaatacaaacaacgatatacaattcagtctgaaaaacattaacggtaatcagatagtttgggttgagaacagccaccttaccaataaagaacttaagaaccctcatgctattgcaaaatatattgaggcacatattggtgaggtgtacacaattattgaaagcggacagaaggtgtatataggtaaagaccttcctaaagagtatacacgttcaaagtatacttcatatttgagaaaaactaatgaccagatggcaaaggcaaaagccaaagccacaggcgaacttgggttactgattgaaacagcaactaataggcgttgggaagaaacaaggcatacacataataaagatgctaaatatggtatatatcgttatgatagtagatttgcttttcctgttaaagacaataacggaaacataacaaatgttcgtgcgtatgatgttgaacttattattagaaatgcaagcaatagaaaaaaatatttatatgatattgtaaatataaaagaaaacaccgcaaacgctaatattctccaacaaagggtgaatagatcggcagctcataatgccgccaagcgtagcagtgtttctgaagacaatgtagcacagtataaaaccgatgtcaagttttctcttaaaaagcctgtagaagaaagcggaaatcttattgcattacataatttaactcgggaaaaacttgaaaaaacattaaaactcggcggctttcctatgccgtcaatagcaataacaaaggcagatataccgcacacgaacttcggtgatattacccttgtaatgagcaaaagcacaattgacccaaaagcgaacaaaaagaatgttgtatacagtgccgacgcttggacgcctgtattccctcagattgattatgaggctgatagaaaagtacaaagtaaaataagtaaaaagttttacgaactcgcaaataaattaggatatgatgcagccagacctatgtataactatgtaaatgacatggaacgtgaattgcaggtaaacaacggagaaaaagggattatagataaacttaaagaagacacttctatgatgaacttatatcttgcagacgtaggaaaagagcaggtacagcctatttataaagaggtcgttacaaagcttaaggacagtgaggttgaactttatgagtatcttatcaagggattaggtaaagatacgttacttgatttaacaccgaaaaacggcgaaagtcctataacaaggcgtagggcgtggctagaggagcacgaagaagctcttaaaactgtttatggggattaccttaaaaaaacaggaataccagaagaaacagttaacgaaatgatgagtaatgataagatagcgaaaagccttatgagaggtgcggtttatgctcgtaactacctaaaaaacggatcagaaaaaagaagttctgagtatgatggagaagcaacaaaaaacgcaataagaaaagcggtcgacaaaggcgcttatgaagaatggcttaataaattgtttaagggaatagaaaaaagcacaggcgtatataacaataaggatttatatactcccagcggcaacagacgcacatttaagcagacgcattatcctgtaacacttgaaaacatagtaaagtctatggcaggacagaacaacggagacactaaaaacgtatccggattttacggaataaaaagtttgagagccggaacagctgaacgtttcaaaagcattgcggctatgcatgataaagaaggaagattacaacacctaagtgaagaacaggctgctgctataaacgattctttaagtaatagattagatgatattatcaataaaattttacggactaagcctcacagccaatatgataacgacttcataatgatggattccataggtaatatattggtggaagtaggagacagcggaaaatacacagttgataatatagaaaaaatattctctaaatacggttataagataaacaacggacttgctgcggaaatcagagatcttctgtttgacacttcacaaatgcctgtaaatatatttgaggcaaaacctgaacgagctgtaggctttgatgaggttcttgcggctgttgttcccgatactaccgataatgcctttatagaaagccttaagagtgcaggaattgaaaacataattgaatacaagcaggatgatgagcaatcaagactggatgccgtaaattccgttgatgacgctaagttctctctcaagcgcaagaatatagacaacggcaacgaagataattataataagtatagatgggcaatagataacggacttttgagcaatgcggagagcgcagtgttttttgagaacatcggcgcaattaagcgaggcgaaaagttcagaaaaacgtatgacggttattatatgataccgacaggcgaaaacggcataaataacacgattgtaataaccgatggggattacatcaagccctctattgaaagcgtaataaaaataaatattgataatgaaaccgagttatccaatgtaagggaggatatatatgagagtaaagctggaatgcactcatccactagtgagattgtcagaggttatgaggaagaagggatttccattgaatacaaaagaaaagatatttggatatatgatggaatttcctccgaagtcggaagaaagaacgcagaaaatgaaggagtttacagaaataattcaagacagcgaaacggaagaggaagctttggagaggataaaaactttagtctaaaaggcgatatactgaaagaaaacgctgctcttaagaaatataacgaatatctcaaagcacagatgaagctgacaaaagagtataaagtaaactcaaagcaattggacaagcttgttaaagagcttataaaagaaaataacagcaacatagataaagaagaattgtttaacaggcttgatgggttctatacatatctgcaaaattcaaatgaattggcatgggacgatataaagggcaaggctcttgatatagcaaaagacataattaaagaatctgttatagtaaacgatgaatattacgaaacgtataaggacctgaaacgttttctgaaaaatacagatataactataagcgaagccgacagagcggattttcccgatggatataataatttccgcaaagcaaacttcggtaggttaaaacttgtaaataacggaacgaatatagacagcatatatcaggaacttgacgatatgttcccagaatattttgacgcggaacagtatataacagcagcggagcaagctcagaatatagtagatgttttagatatgctgagtgaatacgaaatgcagccggataattattatgttgaacagggagcgcagttccttgccgatgatattatcgaacgatattttgatattccgcaggaaaagcctacttttgcagataaaaagcaaaacgagcttattcatcagaaaatagaatccggtaaaaagattagaagtatgcgagagcagagagacaaagatattaaggataatacccttgcaactcaaatgcacgaaggagcaaaagcagctaaaacacgccgtttgaaaaacgaagagatagaacgtataaagcagctctctaaggaaaggattaaaaaactgcataaagataagaaaacaagtatagaaaacctcaaaatcaggcagaaggaaaaggaaactcgcatgagtgataaaagaaaacgaagtattctaagaaacaggattatacgtcatataaatcctatgaaaaccaaactgcttaaaccttctgataataaccacatccccgagagtatgaggacaacagtggctaatatacttgacgcaataaatcttgaaagcaaatacagttatgatcctcttacaggaaaaaggagaaacgacaatttaggtattccgacaaaaagaaccgaagagtttttgaatttaaaagagcagtatcaggatattttaaaaagtgattcggctaatgaaataattatagacccatcgttgttaggtgattcgggtgcaggtatcgaaagtatcattgatgaagtaataaaaatgagaaatattcgccttgatgatatgacgttggaacagcttaataccgtatgggacgtattaagagcggttgaagcctctattacaaatgcaggaaaaacgttgtcttctcaaaagtataaaacaacctctgcttttgctgaggcatttgtatcggacacaagcagtaggaagaacaaaaaaagctatacaagaaagcactattcactggatttagaaacaccatatacatttttctcacattacggtcaagccggtaaagatttctatagaatgttaagaaacgctcaagactacgagcagacaatacagagcgagcttacaagtaaaatggaaaatgttgtatctagcgaacagaggaagaagcttgaaaaggagataattgagtttacaacagaaaacggagataaccttatactatcaaaggctcacataatgaacatttatcttctcagtaagagaaaacaggcagaaggacatctatacggaagcggtataagacagccggagataaacagaaaaattcgcagaggaacaaaagacatacgaataactcaggaagaccttaataaactgttctcaaatctgacaagcgaggaaaagagtattgccgataacatgcagaaacttacactgtttctcgctgaaaaaggtaataagactaccatgtctgtttatgggtatgaaaaattcacagacccaaattactggactattaaatctgcaaaagaaggattacagcaaaatgttgaagaaggtcaagatttagcacgctctatccgtaatatgggtgctgctaaagcaacagtacctaaagcaagcaatgcactggaaataggaagtgtatttgaagtattcgataaccacgcttccgaaatgataacttatgccgcatggctcgcccctatggaagatgcaaacaggttgtttaatttcagtttcagagatgaagacggaaataaaacaggtacaaccatgaaagacttgctaaacagaataggcggtgaacaaagcacaaattattggatgaatcttatgaaagacatccaaaacggtataagtatgccggctgacgaagctatgtccggaattgtaaataaagccataggtaatgttaaaaaagcagctgtagcttccaatattcgtgttgtagtacagcagcctacggcatatctcagagcggctgtggtactctctccggaaaatatgattgaaggattggtaaaaggagcgacaaagggaaacggttggaaaaaagccgttaagtatgctccgattgcggctattaaaaaagtaggtggctttgaagtcagttcaaaccccaaacagctttccgaaattctttattctcctgaaacaaaaaaaggtaaagcaatttcgtttgcaaaggagtttcccactttcggagcaggagcggctgacgccataacatggggagcaatttggaacgcttgcgagttacaggttgagaagactaaaacaaatcttactgtcggaagcgaaagcttttataaagcaacagcagagttattcacagaggttatagaccaaacgcaggttgtggacggcgttttacaaaggtctcaggctatgaggtcaagtaatatgcttatcaaacaggctacatcttttatgggtgagcctacatcgtcgttaaatctgctcatgagagcttatgatgcatggcgttatgagacaattcctaaaaagcgttcggcagcattaaagaatatgagccgtgccgcatttgcgcttattctttcaaatgttgcggttgccattgcccaaagcgctatagatgcgcttagagatgacgatgaagagaaagattacattgaacgtttccttactgcattaacaggattgaccggagatgaaaagactaaatttgaattagctaaaaacatcgctcttggcagtaatataggagattcaatgaatgtattgacttggatcccgtatataaaagatatattctcaatatgtcagggttatacaatagagcgaatggatgccagcgcatttggagatttcatatcagctgcccaggatgcaataaagagtttttccggtgagggcaaatggactatggggtatgcagctacaaaaacggtgatgacaggcgcaaagcttttcggtagttcagtttcaaatcttatgagagatattgaaagcatactgcgctctgtactgattgaaacagaaaactggaaagaattgtacaacatggaaaagggtatgtacaatctaaatactcagacctcgcgcttctttgatattctgtatcaagcactggaaagcggagatagcagcagttacgactatattgcagaagacctcattgaaaacggcataaaacctaagagtatagaaagctcaatgcgtgctcatcgaaaaaacgccgaaaatcctaaatacaaaaaagaggacatgggagccggtataaaacttaagtttaaagaagatgaaaagaaaaaggaagaaaaattcgaggtagataatctgtcttcaagtcagtacatagagtatatgcacatccgagaaaagatattagacgatataatatcggactatgaagcaaagggtttaggaaaaatggatgccaaaaccgctaatagcttattagatgccgcttatgaatacgctaataaagtatcgttggaagaagcttctgacggtaagtatgaaatagaagaaaaatggattagggacataagtaacaagagtggttcttcttcatctgttgcatcacagattatacgaagaaagaagaaaaataaataaaaatcaacccctcattcgaggggtttttaaatttaatcaagtatatcacagactgctaataactattattcacggcttttaaataataataagatgttgtttcattcactgaaaaatatttctgacttgcatactgacttgcattttttacatcaaattagttgtttttaaatcaaataacagagtttgatacaaaaataaaagtaccgctaacccttgaaaatactggctttacggtacttttaaaacgaatcggggtgacaggatttgaacctgcggtctctgcgtcccgaacgcagcgctttaccaaactgagccacaccccgaaataacatatttattataactacattttatataaaaagcaagaactatttatttaatataacataaattatatttactgtttaagaaataggatataattgtaaattaattaaaaacatctttgaaaaatcttaaaaaaatattactttcgagactttctgaaaaatttatgttattatacgttatgttaagaaaacaatagcaattattgaaaggatgataatttttatgaagaaacattttagatatgcagctgcagctgtttcagcaatgacagtaattatgtcaacagtacctgctatggcaggaagccttacagaagttaatgatgacaagaaagacaataatacaggtcatcaggttattgtaaacgacgagaaggacaataaaaaagaagacacaaagaaggaagacgaaaagaaagaagacacaaagaaggaagacgaaaagaaagacgaaaagaaagaagaaacaaagaaagaagaaacaaagaaagaagagtccaataaagaggacgaaaagaaagaagaaacaaagaaagaagaagctaaaaaagaagacgagaagaaagatgaaacagaagctcccgcagaagaaacaataggatattctgtacttaagggaaaaattaaagaagttgctgttaatgaagacggaagcacaagaatttccgttgaaacagaaacaagaggagaaatcgttttcaatgaaacatcagattgcatggtaattgcagacaatgcagttaaggctcttgcagatcttaaggcaggaatgacagtttcagttgttatggaggacaatgctcccatgactctcagccttccacctcagacaagcgcagctgttgcaatcgtagttgaaggtgaaacacccagcaatgtagcagttgacaagtttgatgaagagcttacaggaaagactgttaaacttatcatggacgaaaaagttcagattcttgacataagaggaacaaagcaggctcttacagctgaagatattaagaataacaaagctatcgttatttacggagcttcaacaaagagcattcccgcacagacaacaccttatatggtaattgtactccctgaggaagaagcagtacccacagaaacagcagaagttgctgaagccgcagaagaagtaaagacacttcctttaagagaagcagcagacagcctcggatatgaaattaaatggacatcaaatgaagaacctatagttcttacaaagggagaaaagacagtttctcttgaaatcaacagcgatacaataacaattgacggagatatggtaaaagatctttctacagacgttgtaatcgttgacggagttacttacgttccttcagaacttgtagatttattaaagtaatatatctttaacgtatataaacaacctgttataataaaattatagcaggttgttttttgttttaccgaaaggagatgaactttaaaatgaaagagaacaaaaagaaatattcagctagaatatttgcggtaaaaagaaaaaatatactcggattaataggcgtagttatgattatgtcggctgtgatttcaggatgtgcgaaatctgaaaaaacatttgacgaggagaaatttataaatgaaataaaacctaatatagaatgtttacagtcctgcgtacaggaaatattcggagcggatataagttttgacaaaagaagctatttatctgcctatgagagcgaagaagcatacgatgacggaaggggagagcgggtagttttatttttgcctgaggaagaggaaaaatatgcaaaagactattatatagaccctacttattcggatttttatgttgtaaataattttaaaacaaatgatgaagtcagagaaaatctcagaaaatatatgtccgatgaaataatagacaattatttcagggacgatttctttgaatatgacggcatgctttacttagtaagaggcgcaaggggatacggagcgatagatgtggattgcgaaagcgtgaagtatgtgggagaaaaagacggaaaacagtacgtttccgtagacattctttattttgatgagtacgactatacggaaacagtagagttcagccgaattgacgatagatggataataacggaagaaataaaagaataaaaattttttaaacagctctaaacataaagccgaccgggtttttataatcggtcggcttttatcatatatctatgtcagactttatattcttccgaaagaggatttagtttgctttctcttatcatttcccttacggaaagcacataacctgatgaaacggaaagttcgtcgatgcccattgaaagaaaaatatccaacagctgtttatcggcggcagcctcgccacatattcctatccactttcccttacggtgaatattatcggcagccatctttataagacggagtacggctttattttctacgttatacagagaagatagttttgtattctgcctgtctgcggcaagggtatattgggttaaatcgtttgttccgacgctgaaaaaatcaacgttttcggctaactccgcacttataaccgcagcagccggggtttcaatcattataccgacgggaacatcgttgaaaggtatattttcggacttgagactggtttttacttccgacataatttcttttgcctgcaacacttctttttccgaagttatcatcgggagcataatatatatatttccgaatatcgaggctctgtaaattgctctgagctgggttttgaatatatcggtacgttcaaggcagattcttatggctctgaatccgagggcgggattttcttccttaggaagattaagggcgggagcctgtttatcggcgcctatatccagagttcttattataacgggttttccattcattttctgcgctattgttttataaacatcaaacaattcattctcgtcaggtaatgtttttctgtcaagatacataaattcacttctgaaaagacctattccttcggcgtcgttcagtatagccgcgtcaatatcggcggcagttgatatgttggcgtacaaatggatttttttaccgtcttttgttgtggattctttacctttcagcttcataagacgcttttttcgttcggcttcagactttgctttttttgacatggcttctattgtttcattatctggatctatataaatttttccttcgcttccgtctaaatataccgtttttccgtcaattgaagcgtcaagttcggagacgtttattacagccggaatgtccattgttcttgccaaaatagatgtatgagatgtggaagagccttgttttattataaacccaagcacattgtcgcggttaaaagatgcggtttcgctcggagaaaggtcttctgccgctattattactttgccgtgagatgcggctttgtattcgctgcctgacagaattcctataagacgttccgaaatgtcgataatatcagctgaacgttcctgcatgtatgggttatccatattgcgaaatctgtcggcaaattgtttcgatataattgagaccgaatactcggcgtttacatgattatttgcaatataattttctattgatcccgtaaaatccgagtcggtaagcattatctgatgaatttcaaatatcatggcgctttttttatcagctgatttctcggttatttcttttaatgaagaaagctgttttatagcttcgtcaactgcattatgaaatttggatatttcggcataagtatcgcttaccatacgtttttgtgggtcgcaggaggctttattgacaaagaaaacagtgccttcggcaatgcctgcgcatataccttttcctttaagttcagtcattagttatttcctccttaaagattttcacctattaccgatgacagattggcttttgcactcgactcgtcatctccgcttattgttaccgttatttcatctccgaccattattccgagggacattaccgcaaaaatttttttggcgtcggcttctttttcgtttgcatatatttttatatccgaattatattttgaagcttctttaactattataccggcaggtcttgcatgtatgccggcaggatcttttactctgtatgaaaacttttccatgcgcttattcctccataatataaactatggaaataatttgcgcctaaatgagattttttatacatggagtcagctgattgatataccgtaaaaaataaaaaagcacggaaaatattaaatattttccgtgcgtatatattattcagtacgttcgtctccccagaaaaataatgcgactgttcccggaccagtatgtgaaccgataacagtaccgatgttgtttattacaacatttccgttgaggtttttaaacttttcttctacaagagccgaaactttttttgcgtcctcaaggcatgcggactgtgaaataaaacattttccgttatagttaattccgttgtctgcgtgttcttccatgcattttacaatttcatctataacttttttctttcctcttatttttttcctgggaatcagttttccttcgttgtttacgttaagaagaggacatatattaagaagatttcccattaccattgatgtttttgatattcttccacctctgtagtaggatgtgaggtcggtagagaaaaaccaatgatgaagattattttttttggactctattatttttgcggcttcttcacaagaaagactgctgtctcttaaatctgccgcaaaatcaacgagaagaccgtatcctgatgaggctgccagagagtctataataattatttttctgtcgggaaattccgcctttaactcctcggctgctatcatgcaggaattatatgagcctgaaattccggatgaaagagtaagatgaactatatcattgccgttctccagtataggtctgaaaaattccgaatattcggcaatatttacttgggcggtcgtaggaagcgcaccgttttctattctcttataaaactcatcaataggcattgatatacccatatcgtcaggataatccacgccgtccattcggaaatgaaaacaaacaaacggtatattccttttctcaaaatattcccttgacatgtcggctgtagagcagcatgtcagctcaaatttagtcataataatcctcctgaaatagacgttatataattatttgttgatttaaagtcaaaaatgatgataatgagttaaaaacagattcatgtttttgtctgatataagacaaaagacaatagccgccgggctactgtcttattatgaatgtcaaagtttacagtaataatataaacaatatatataaaattagtattaaaatcaactgccaatcgaaaaatttttcttcatactgttgctgcggagcgtaatcaaaaacagattcgtcctctattacaaactcttttttaggcataagaagctttgcaaataacggttttcctctgccgtattttcttcccataagagatacaaggtacaaaattatcggtatggagaaaaccgataagaataagtactggagcacatactgcgccatcaaagcgtctgtcataacaatttcacctgccgccgtatctgccgccgtcagtgagaagcttattcttgaaaacatcagctgcgaaaagttaaggcagaaatgcgatatcataccgggaaaaaccgattttgttctatatacaatataacagaagagcacccctacggcaaatgtatataagctttgctgaggatcgaagtgagcgacggaaaatataataccgcccaatatacaggcttttttcaggctgagatttttaaaaccggaaaaaaccactcctctgaatatcagctcttcgcatacagcgggaataacgcagattgaaataacgctgtatataaacggagactgatatgccgttgccaaatcggttgaaacaacattcggaaaaaatatcgacgttataagagaaagcaagcttgtaatagggccgatggcaaaggtaagagctatggcggctattacgtccccgacgcttattttgtatatggaaaaagtagttttaggattttcgtaaaacatttttggtccaatcaaaattaacggcagaaacattgccagctgtccgataatactgtatatcattgggtccatgctcgaataatcgagcacggacaccagtaaaaatgaacttgctatattaattacaatatatataagaaaaaacgaatatgttttagatgttcttgtcaaaccgaaaaactccttaaggaaatcaaattccgttttattatttaatcgtcgggaatatcttcgacaaagtcctcatcggtataatcccatattgcgtcgtcatcctttggaaattccgttgaaccgtgcggatatttttcacggaattttctgtttacagcctctgatataaacagtttaaacgaagccacaacgggaactccgaaaaacataccgaaagctccgccgaaatatgcgcctacggcaatggcaaaaagaacttccaatggagtaagacctgtcgtatcccccaaaagtctggggcataaaacataattgtcgacttgctgtataataagtatatatataagaagccacaatgctttcataggatcaagcaaaagaacgatgaaaaccgacggtatagtacctataaaaggtccgacatacggtatcatatttgaaacgcctatgataacgcttattacaagggcatatggtattcttaaaaccaatgcgccgataaaacacattacgcccaacgctatggcgtccagaagtttaccgagtacaaagttctggaatatctcatttacacgctgcatattacgtataaatctttctgcctttccttcttcaaaaacggcaagacagagttttttgcagccggcagcaagttcttcttttgttgagagcatgtaaaagcttattattataccgattataaagtttacgactacctttactacgtttacggtactgcttacaaattctataaagttttgtccgttaaagaaagtgcctataagattaggcaggtcatttattttttcctgaataggctctataagtgcgattattgtattgactacggtatcctgtacaccgggaccgagttttgaaagcgtttccggcagcgtttccataaggcttgccatgctttcgggaagggcgcttataagagctctgaagctttgcgccacggtcggtatcatataaatcataagccatgtgaaacatcctatgaatatggcataggttatgaatattgtaatattcctgagaagcttcggcctttcgcgaagatgtttaacatacgtgccgataaacttttccaagaaattaaccagcggcgtaaagaaaaaggctataaagaagccatatataaatgttatcagaatacccttgacagccatcagaagagaacctactgtaccgaaaaagcctcctatattgtcaaggaatctgtttaaaagtatacataaggccaaaacagcaaagctgtatgacgctattttaaagtattttttatcaaatttgggtctgcgcaaaataccccgcctcctataatatcttggaaatattctagcatacatataaggcttttaccataggaatatcattagtttttttgactgatttcttaaataaatcttaatccgattgactgcggacgagtaagaactttatactgaaaaaaagaatacttccgaaacgtgaaggttaaaaagacagggggagaaaacaatggctgacgagaacgctataaaaaattttgcggcggactttaaaaaaatagaagacgaaatatcaaaggacataataggacaaaaagacataatacataaaataataatatctatgatagcggacggaaacgtattgcttgaaggacttccgggaacgggaaagactcagcttgtaaagactgtggcaagggtaatggatttaagcttttccagaatacagtttacacccgaccttatgccggcggacgttacgggaacaaacatgatggatgccgaaagcggaagagtggagtttaaaaaagggcctgtttttgccaatatagttcttgcagacgaaataaacagagctacgcctaaaacacattcggcattgctggaggctatgcaggagaaaaccgttacggcaggaaatacaacattttccctgccggatccgttttttgtactcgctacccagaatccgctggagcttgaaggaacgtatccgcttccggaggcgcagcttgaccgatttatatttaaattggatgtaaaattcccatcggaaagcgaacttatggaaattgtaaatataactacggggaaggaaggagcgaagtctcagaagctttttaacggtgataaaataaaagaaatgagagatattgcagttgaggttccagttgccgacgccgtagcaaggtatgcgatggacgtcattataaaaagccaccccgaaatagataaaagtccggaatcggttaaaaaatatgtacgttacggttcaagcccgagaggggcgcaggcgataataagaacggcaagaataaacgctctttcaaagggaagatttaacgtagcgtacgacgacataaaagatgtggcatacgatgttttaagacataggatattccttaattttgaggcgctttcggacggagtcaatgttgaggatattataagcgaactgctgaaagaggaagcctgattatgctcagagatttattaacaaacgaatatttgtcaagattggaacttttggacatttcaataagaaaaaggctgtcatcggcttcgtcggcaggcgcaagaaagtcttcggcaaaaggctcttcattggaattttcggattttagggagtacacgccgggagatgatttgagacgcgtagactggaacggatatgccagattcggaagactgtatacaaaacttttcaatgaagaacggcaagccgtattgaatataattattgacggcagcgcttcaatgcgtttttataaagaaaaatgggattatgcggcagcaacggcagcctctctggcatatatcgcacttaataattccgatttggttaatatttttacggctgataacggaaaaatagaaaaatgtacgggactttcctcaaagaaagcgtttcctaaggcggttacttttctggaaaaggagtgcgagggaggaaaaaccgaactgaacgaatcggtaaagagtttggtaggcgaaagactaggagaagggatagcggtaatagtttccgatttcttttctgccgacggatacgattatgcagtcaaaatgctgaggagtaaaaaacagactgtaaatatggtacagatacttgacaacagagaggttgttccgcaggagcgaggaaacgtaagactgatagactgcgaaacaaacagtaatagagaacttgaaatgacgccggaagtattaaaaagatatgaggacgcattaaaatcatttcaggctgagatgaaggagtttgccttgcgcaacgaggcggcattttatgcttttgataataagattccgcttttggaagcaataggaaaaatactgaggtgattttgtgaaaaggtttttgtccattgtatttttgtgcgcattgctatgcggatgttctgcggaaaacgaacagacttctgttgatgaaataaaaatatacggatatgaagtaatgtccgaagaaaattatgaaccgattactataaccgagaaaacggaaataaaagaaatatcggaattggcgggagatatatcggagtataaaaaagcggaagagttgtatgagggaatgaattcgatttggatagacttcggagacggaacgatattgggaatgtatgatgatgttgactacggaaatatatgcgagtatgtcggagaaccgtatggagagccatattatgaaattcccgacgggcttagggaaaaggcgttggaacttcttgaaaaaagtaagtaatacaaaaaagtcctgccgttttaatttaaacagcaggattttttattatttctttgcgattttttcagcttcctttttagggtctgatttaatgaagagcatagctctttctctccaagttttctttttcttgtcctgaaggtttacgcctacaacatttacaagataaagaccgctcagttcaaccttaacggtttttttaggtacgataacatcgtatacgtttttctcggttataagggtaactatctgcgggccgacttttgcctttaccatacacattttacgcctttttgccgagccgttaagctgttcgaaaatctgtttattgaaatctttttccgtaggcttgtcaaacttcttatcaataacatatatagagacaacctgtttgtttgcctttatgaagtcatcggcttctatgcttcttttatagtttttggtacttgccctgtaaacaaagaacataattattgccaatactacgataacaataataaatatgtcgcttgcgctcacttgaaatccactcctccaatttattccttcgccgaacatcagcatattctctattctaccatttatttttggttaaggaaatagcaaatacaaaaataaaattaaaaatttttaatatcgtttttaatgaatatttttgcaaaaatcagcagaactatagtataatatatttttaaacagtttgcaacatgtaatgctgggaggaagatttgtgtctgtagtaaacataataagcacgataattgttatagtatttatagccaacgttgtacttgccggacttacggttttttttgaacacagaaatcctgcaagcacatgggcatggctaatggtcattttgtttgttccaatactcgggttcttttgttatctcattttcggaagagaaggaaaaaaagaagaaatgtttagaaacaaggccgagaacgacgacgttacatactatggatatcttaacgagatggacaagtacagcgttatgcttaaagcgcagaagagagccattgaggaaaggatagatataataggcagtaagcacatgaacgaccttgcctatcttcatataaattcgggaaactgtataacctatgacaacagcgttaaatcatattttgacggaaatataaagtttaaggatctgattgaagatatacgaaacgccaaagagtttatccatatggaatattatatactgagagacgacgatctcggaaggactataatagacgaactggcaaaaaaagctaaagaaggggtagaggtaagacttctttatgacggcataggaaatcagtatcttaaaggaagctttttcaaaaaacttaccgataacggaggaaagataggaatattccttccgccgtttatagttaggctgaattaccgcgaccatagaaagatagctgttattgacggtaaaataggctatgtaggaggtcttaatataggcgacgagtatctcggaaaggtaagccgatacggaaactggagagatacgcatcttcggatagaaggggatgccgtggatcagcttcagctgagatttataatggattggaattttgtttccgataacgaaattgttttatcggataaatatttcccggagcaaaaggactccgacggcaatgtgagaatgcagatagtttccagcggccccgacacaaaatttcagaatatacgcaacggatattttaaaatgataaacgaggcggaaagaaatatttatattacaaccccgtattttgttcccgacgacggcatattcggggctttgaaaatagcggcgctttccggtatagacgtaaggataataattccggcaaacccggatcatccgtttgtatactgggcgagcatgtcatatttgggagaacttttggaagcgggggtaaagtgttatcagtataacgatgggtttatacacagcaaaacggtatatattgacggatttgtaacatctgtaggcacggcaaatatggacataagaagttttgacctgaactttgagacaaatgcttttatttatgacagagatattactaaagaacatgaagaacagtttatgaaagacatagaaaaatgtacggagataacaaaagaatggtatgataagcgtacggcatggttccgcgttaaagaatccatttcaagactcatatcacccatgctttgatatacaggaggataaattatgaatgaaccgtttacacaaaatatcgaaataagcttatatgatacggatatgaacgcaaaaatcagtatccagaatattgttaaatattttatggaagctgccgtagaccattccgaacatacggaatataaattggacagacttttggctgcccacagaggctgggtagtgcttaactgggtaataaaaatgaaagaatatcccggatttgctgataagttaaagatttccacatgggcgaaacccggatgctccttacaggctacaaggtattttacgatggaatatgaggacggaacaacggctgccgaggcagtatcaagatgggcgtttcttgatttggaaacgaggcaccctataagatgtccgcttgaaatgatggaagcatactgctatgatagggaggaacctttcaaccccggaaaatttaacttgcctaaagaaaaggaagagaatataatatctgaaagaaaaattacggtaagaagaagcgaaactgatacaaacggccatacaaataacgcaaggtatgtggagtgggctgttgacgatgttcccgatgatgtttacacaaattataaagctgaggaaataagggttctctacaggaaggaatgccgcgctggagaagcggtaacgataaaaacatatttgagagacgacgaaaacggattaaaagaaataataacttcaatggaaaatgataacggagacgtactctgtaaattatcaactatttggagtaaaaaataatccgagtcggctgatacggaggtatttaatggattcacaattttgctgtcaggttttggacagaaaaaaactccttacggggtttaaaaactttgaactgaaagataaaaaattaatagaaagttatacaaaaccgtggaatataggctgttcggacttgtcttttgccaatctgtttatatggggcgcagacgggaaaatgcagtatgttatagacgacgacgtactttatataaagcttaattttaagagctttccggagttcttttggccgccgatacctaaaaaaggatctaaacatgattacagagaacttgtatttagagcatttgaatatttggaaaacaaaaacattgttccggtaataagaaatatatgggaaccttttaaagaaataatcgaaaaatcatgcccggagcttgatatagagcctgccgagatagcttgggactacgtttattccagagaaaaactggctacccttaagggtaaaaaacttcacgggaagagaaaccacataaataagtttatgcaggaaaatcccgattgggagtacaaaaaactggttccgtccatgtatgaagattgtatagctgtatatgacggatggaaagaaagtaaggatctttcggaggatgagtttgcaaacgaaagacgttctgttgtactggcgcttactaatatggaagagttgggtctgacgggaggagcaatacttttgggcggaaaaataaaggcgtttacagtcggtgaaagacttaacgacgatatgcagctgatccatatagagaaggcagatagtgaaataaacggactttttcctatgataaaccagcagtacgtacttcatgaatgtgccgatgttcaatatataaaccgtgaggaagatatgggtgttgagggaatgagaaaggcaaaaagaagctactatcccgactttatggtaaaaaaatattttgcggcaaaaggaaaagtaacagaggaagaactgagcgaagaataaaaaaataattaagaaattttttcatactgtgccaattttggtacagtatttttttattgccgacgttaaaaataataaagcagtttaatattttaaggaggtataaaaaatgagcgttaaatatttatttgcggtttttcttgctacggcgtttttgatgaccggatgctcttcaaaaacagacagtactgcaagaaaaatcgatgatacaatgaaaaaaggcggagaaaaagtagaaaatatgttggacggaacaaattcaaacaataacaatggatttgacccgacattcggcaacgaacttaacgataccgacggaagattgaaaaacacgaaagaatacaatggcatggactatatagatcccgatatgagcggtgtaaacggagtcgggaccacaagagccgaagagttgaataacggtatggcttcttcaagcagcacaggaacaaactattgataaatttgcggcgttcttaattaaaaaaagccgcaaattgtagacaaatagatttttgaatagcggaagggttcgggaaacagctccgtttcccgagtggaatccgcagccagaattcatttctgccgaggaaaacagcaggtttcaaagcatttttgctgatgg

SEQ ID NO: 1173 - DNA, 3957 bp, Unknown
  16S sequences of unknown bacteria
ctctcgttccctatttcgcagaatccgccgtattgtcggcactatttatcacaatctcctattatgccaaaaagatcctattgaaagcgagtgcgcaaaggaacagctatgatgagaagaattagcttccttttattgctcggcattatgctcctggggggatgcacgcagatacagaatggcgattcgcatgctacggacaatgcatcaaacggtttgattgctacggaaccggcaaaagacaatgaacagagaatctatgaatttgaaacgcgagagctttacgcaaggcgggaggaaaagcagatttacggtgttctctacatgcctcagaacgcagatgaccaaatgcctgctgtcatctattctcacgggtttggaggctctcacagctccgcggcacagtatgctatagagattgcatctagagggtatgtggtttattgctttgatttttgtggaggaagcacaggaagcaggagcgatggatccactttggaaatgtctatttttacagaacaggcggacttagaagcggtgcttgcaatgatacaagagcaaccatttgtggacagtaataacatatttctgatgggaaccagcatgggtggcgcagtgtcggccatcactgctgcagcgcacgaagaggaaattcaaggcgccattctcctgtaccctgcctttgtaatagcagatgatataaacaaccgttttacaaacgtggaagatatcccggataccttctatcatatgtggatgactgtaggacatgtctttgcagaagatttgttgaattatgatttttatcaagcgatttccggttataaaaaagacgtgctgttgattcacggagatgctgatagcattgttcctcttagctattcagaaagagcagtggagatttatgattctgccaaattggaaattctaccaggggcaggtcatggattttacggagaggatgctgaacgggcgattacatggatattggaatatttgagtatccatacaatttagcttaagaaaggataaaccacgatgaaaagaagtatgctgatgtttgttatggcgatggttctcagttttatactggcggcctgtggaggtgcccctaccgagggcccttctgcgatgctggaaaccacatccggtgacataagcgtatctccgccaacagagccaaatgacagcaatattttgattgcctatttttcccatacggggaatactgagaaagtcgctcaggaaatagcggactatacaggcggagatcttgcggagatccgacgcaccgaagaatatgaaaatttgtatgaagaagctgaaacagaaattctagaaggcgcacacccagacatcaccgtatctgtggaaaatattgcagattatgatactgtgtttgtgggatatccgatttggtgggatgaagcccccgctatgattgccacattccttgcggacaacgatttttccggcaagacaatcattccattttgcaccagcgccagtgacgatattggcaacagccttcatatttttaaagagctttgccctgacgcagagattgtggaagggttcacagcaaacgaaacaaacgaaatcgaaccgtggattcagagtctcggtattacggaaaaacaagagtgaagataaattcgaatgtataggaggaaattgcccgtctttgatgatggtcgctatttgaaaagtgcaaagttttcacgttatcggaccagagcacgtgcctttttatgcgctctttgctgcgctcaaccattcctccaaatagaagaagagaccgaaatccagcgatttcggtctttttttacgggtttgtgttacaaaaaaatatcaagagttttagcaggggctgtgtgtctgcatccccccggaaaaggagacgcagcggatgagtgcgccgataagttaaaaacgccgcaagcaatgtgaagcttgcggcgacgtggtcgaggtgacaggatttgaacctgcggccttttggtcccgaaccaaacgcgctaccaagctgcgctacacctcgaaaacaactcttactatcagagactagattatgatatagtatttttgcagggttgtcaagagaagaaaacgcaaaaattgataagcggttgaatgaatttctatttttgggaaacagaggaaaaaactcaaaataaacgatgagtgatagttagcctatcagcctgagggagaatctaactcggcaaggctatatcgaatgtgggtagccaatacagagacaaattctgaaacactagggatctccttggcagagcgcttaaaatatagaagaaatctgtcgcttgctacacccgattcataggcatcgatgatggcgcggcgcatggcgctttccacggcaccgatggatcgctgatgttttttggctacagcaggataaaattgctccattacctcggagagatattccggatgcgccagggcaagtgtgatgctggtacacaggtaacgatgacctgcacaatgatggcggatgccaaaggcctgtaaatgatggaaaatggctttttgcttttgtagatctgtaatcatattgtttcccccttgcataaaatcggtatcatagaaaaagacattgggcaagcaaatcgtgatggttagttttgattctgtatgtttctttttctttctgctttgttccattgaattatacaaaaaccgcgtaaaaatataggatttaatgacgaaaagcgatcatgaaaaaatgatgtagacaggctatttttagaaaggggagacccacagttgcctttttttaaatatgggatagaggaaacgacatatctggcgaaaaaagataagcggctgggagaggttatcgagaaaatcgggctgattcagcgcgaagtaatccctgatatgtttcaggcgctggccaattccatcatcggccagcagatctccacaaaagcgcagaaaacgatttggaaacgctttaccgatgcgttaggggaggtgacgccggaaggccttttggcggtgcccccagcaacgatccaacagctaggcatttctgagcgaaagacagcatacattttaggaatcgcagagaaagtggccggtggagaactagatttggcggcgcttaccgaaaaaagcgatgaagaggtgtgtaagacgctgagttctctaaagggcataggtatctggacggcggaaatgttgatgattttttccatgcagcgtccaaatatcatgagctatggcgatttggcgctgcatagagggctacgcatgctgtatcatcaccgctctattgatgagaaaaaatttaagatgtatcacaaaaggtttacgccgtatgcaacaatagccagtttgtatctttgggaaattgcgggcggcgctatacccgggatgcgtgattatgcacccaaaggctccaaaagggagaaaaaataaagggaaccaccaacgcgtttgccaggttgcggctggcaggttcgttgatggctcccgggggaaacaaaacgatattatatatctccgtacaacaatctgtggacattgccggtcataaactctgaaaccgtaggacactcatgcgtatagcgcagaaagattttatggaattggtccttgcaattgccatgttcatatgcatccacaatggctctgcgcatcgaactttccactgccgacggggtcgagtggtgaaccgcggccactgccggataaaacttatccgtcatttcattgagaataccaggctgttccaaggccaattgcaatccggtacacagataacgaaaaccggcactatgatgtttaaagccgaataacaataactgtgaaaatacgagtttttcagtatctactgcattcatcatattcacggtccctctctttcaagtcgattatcgtcaaaatttggtaactaagcaaggacttcgccaaaatacgagcatattccct

SEQ ID NO: 1174 - DNA, 7798 bp, Unknown
  16S sequences of unknown bacteria
caaaggcgaacccatgcagcgcatagtcgggaaaaactcttctcgccctgcaagttgggtgagactccaattgtgcaagctttgcgcagcacaattggtcaagtcgaacccatgcagcgctgtggaatttctgcgctgaaagcgcggaaattatgcgcgcagcagggcgctgccctttcaaacgagagcccagcgaagcgggtctcgtttgagaggttgtcaaaaatacttttttgacaacctcaaaaaccccactgccgcagctgtgcggcagtggggtttcctgtgtagggagatcagccgttctgcttggccttgatcagggcgcgggccagctggtcggggcaggaggtcgggcgcatcccgcagcggatgccctgcagacgctcgatcagaacgtcgatgggcatgccctcggcgagcttggcgacaccctgggtgttgccattgcagccgccggtgaatttgacattggtcacgatgccgtcgttgagatcaaaggcgacctgagaggagcagacgccggtgttggggaattgatatcgcatggggaaagactccttttctatcctatagattcgattgatttattcatgctccgtcagatcggcgggggtcatcgcggcggcggtgagcagcgcctgggggtccagcagcagctgggcgccgcgcttgccggcggagataccgatccggtcgaaggccagggcagaggcatcgagaaaggcggggtagtgcttcttcatcccgatggggctgcagccgccgcggacatagcccgtcacgcccagcagctcttttaatggcagcatggtgatctttttatcgccgctgacccgggcggcttttttgaggtccaggttggcgtccacagggatgcagaagacctggatgccctgccgttcgccgcgggtgaccagcgtcttaaaaatctgcgccggtggcattcccagggcttcggcggcgtgcagaccgctgaggtcggcttcgtcgaaggggtaggtctgcaattcataggggaccttggcttggtccaaaagccgcatggcgtttgtttttgtcatgatagggaccttctttgcagtagctttgcggctattatagcaaaattttcggcgcttgcaagttgtatgacgaatcttgcgtggctgttggttgttttctgttgctgcgcgtgctacaatggggaaaaatggaagaggaggaatacacattgtcgatcacagcggtgcgggcgtatttggcgcccttttctttggcgcaggcggttttggaatttcccgtctccagtgcgacggtggagttggcggcccaggcgttggggacggccccggcgcggattgcaaaatccctctcgtttttgacaaaggaggggccggttctgctggtgacggcgggggatgccaaggtggataacaccaaatataaagcgctgtttcatgagaaggcccggatggtaccctttgacgaggtagaggtggtcatcggccacgcggcgggcggtgtctgcccctttgcggtgcggccagaggtgcgggtctatctggactgcgccctgcagcggtttgatacggtctaccccgcctgcggcagcgccaacagcgccatcgccctctccccggcgcgtcttgctgaggtgagccagaattttcaaggctgggtggatgtttgtaaagcttggcaacaagaataagcaaaatagcgtttcccatggggagacgctattttttgtgggggaaatttgcgagatttaacgtaaatttaacaaaaaattgtcttgcatttttacaaagagggggtatgctaaagaaaaagagaaatttgaggaaaaaccgcctggattgcggaaaaaggagcgcgtacgatggtttatttgctggaggatgacgacagcatccggaaattggtgatttatggcctgcagacccagggctatgaggccgaggggtttgcctgcccgtcggccttttggaagggcatgacaaagcagctgccggcgctgattttgcttgacattatgctgccggaggaggatgggctttccgtcctcaaaaagctgcggagcgcggcggcgacagagaagatccccgtgattatgctgacggcgaagaatacagagtatgaccgggtcgtcggtctggacaacggggcggacgattttatctgcaagcccttcggcatgatggagctggtcgcccgggtgcgggcggtgctgcggcggacccagccggtggccgggagcaagagctaccgggtgggggagctgtatgtcaacccgtcggagcatctggtccaggtcgaggggcaggatgtgctgctgacgtataaggaatttgaaattctttgcctgctgctggaaaaccagggcatggtcctgacccgcagcgccctgatggaccgggtctggggctgcgagctggagcgggagaaccgcacgctggacgtacatatccgcacgctgcgcgcgaagctcggcccgatgggcaagtgcatcgagaccgtacggggcatcggctataagatcagcggcggcgtatgaggaagatgcgcgtatgagaaagaagatttttggcaatagctttttgatttgcgtgatcgtcctggtcttgtgcgcggtgctgttcgtcggggcgatctaccggtattatgagacgcaggtctttgcggagctggcgtcggaggcgtcctatgcggggcacggcatcgagtgcagcggcgtagcgtatctgcagtcgctccaccccgaggcccgcatcacctgggtggacgcgaacggcgatgtgctctacgatacccaggccccggcggccgagatggagaaccacgccgggcgggaagaaattcgccaggccctggagacggggacgggaaaaagcgttcgggattccagcacgctgctgaccaacaccctttattacgccctgcggctggacgacgggacggtcctccgcgttgcctgccagcagcaggcggttttggagatgctgcagcggatgatccggccggtactgctgggtgttttgctggcgttgacgctctcggcggtcttttcctaccggctggcccggcgcatcaccggaccaatcaacgccatggacctggactatcccaacgccgccggaatttatccggagctgcagccgctgctgacgcgcctgcagcagcagaacgagaccatcggcagccagatgcaggccctgcggcgcagccagcaggagttcactgccatcacggagaatatgcgagagggctttttgctggtggacgcccagacgaacgtcctggcgggaaatcaccaggcgatgcagatcttcggcgcggcggatggcttggagaatctgcgccgctgcgactgcccccagctgcagcagactgtcgccgcggccctggccgggcagcacggcgagacgctactggtccgcgacggcgtcagctggcaggtgctggcgaacccagtgcggagcaacgggcagctggccggggcggtcatcattgtcgtcgatgtgacggagcgggagcagcgggagcagctgcggcgtgaattctccgccaatgtctcccatgaattgaaaacgccgctgacgtcgatctccggctttgcggagctgatgcgcagcggcatggtcccgatggacaaggtccaggagttttccggggatatttaccgggagtcccggcggctgatccggctggtggaggatattatccagctctcctctttggatgaggcggcggcgccgctggagcgggagacggtcgatctctatgacctggccgacgcctgcctggccaatctgcagccggttgcggcaaagcagcatgtaacgctgcagctatcggggacgcatgagacggtccgcggggtctggcaaattctcaatgagatggtctataacctctgtgacaacgccatcaaatacaacaagcccggcggcagcgtccgggtggacgtcgggcggcaggggagccatgtgcagctgcgggtggcggacacgggcatcggcatcccttatgcccaccagagccgcgtctttgagcgcttctaccgggtggacaagagtcactccaagcagatcggcgggacgggcctgggcctgtccatcgtcaagcacggggcgcagtaccacaacgcccgcctggcgctgcacagcacgccggggcaggggaccgagattacaatcgtattttaggagggcttatgatcacgtacgaacaagtcaagcaggaccccgccatccggacctatatccagaaggcggacgaatccctgcgggtgctgggcttcacggagcacagctttgcccatgtgggcatcgtcgcggccaatgccagctatattttaaggacgctggattatcccgcacgggagatcgaactggtgcagatcgccgcgcatctgcatgatatcggcaatctggtcaaccgggtcgaccactcccagtcgggggccgtcatggccttccggctgctggatcacctggggatggaaccggcggaaatttcagagatcgtcacggctatcggcaaccacgacgaggggacgggcaagcccgtcagccccatggcggcggcgctgatcttagcggataaatccgatgtccgccgcagccgcgtccggaaccaggatatcgccgcctttgatatccacgaccgggtgaattactccgttaaaaaggcggagctgaagatcaacgagacgaagacgctgattaagctcaagctggtcgtcgatacccgctatggctcggtgatggattattttgagatctttatgcagcggatgctcctgtgccgcaaggccgccgaagagctggggctgcactttaagtttatgatcaatgagcagcagctggtgtgagcgggtgtcaaaaagaatttttgacacccgctctcaaacgagacccgcttcgctgggctctcgtttgaggggattgcaccctgctgcgcgcataatttccacgccgttggcgcggaaattccacacttgcagggcgtaaagagtttttcccgacgtacacgccgccggaaaaaacagattgaacttattttgcgccgtacgcgtcgcaaactctgcgaggcttttttgtgggggcagcctgcaaaggtttgggttttgctgtgcctttgggggctgctagttttgtaagggcttgcaggggggcttttgcgctgatgttttggagccttttcaattgccggccaatagggcgcggagttgggtgagccattccaggagcttgaattcgggttgatagcgggggttttcttcggtcatgagggcgagctcgtcactggtcaggccggcgctggcggcgacggtgcggaggtcctcactttcggcagcggtgcagagggtcgggaagacgacgcaccaccagttgcgtccgacggcctcgcccagctcgacccggagggaggtccctgcggggagggagaacgtcgggtacagccgcgttgggaagcgctctttgcagaggcggacggcaacagaacaggtggcttggcccgcttgccggagcgcggcttcggctgcggcctggatgcttgcaagatcgccctgcagcgcggcggcagcttcttcctgggtggcgctggcgtctgtcaggggggcgatggccgccaggacggcgtcccggacctggagcttgacggcttggtccgatgccgtattggagttggcgacgacatgcagccggatcagcttccccgccagcgcctcctgccgctgcaccagtgccagcgccgcaaacagcgccagggtgatggcaagtaagtacaaaatgctgcgtaaggtcgtattttttcggtgaatcatgcgaactttcctttccgggtcgccgcgttttctgtggggactcccagcgctgcgggcctagtgttcttgctaggaggatacccagaaaatgaggggggcaaacggggcgggaaggaaatttttgttgggaaggccactgactacggtggccccaagctacctccgcactccgtaagctacagcgaagcggcaagcgggttgctcaccagcctacagggcacggatgcagttaaaaatctatctggaaccccgtacagtgtgcggctgtagtttcgacgtcgtaaacagggggagagatccaagggcggggggaccgcccccccgcctttggcggcgtctttcttccccgactctttcttcgctggtgaagaaagaatcgggcccccggagggcggtagctggtttgtctggtagatattggtttgaggaaatttgcaagtttgtttttaaagcctggcgtagtcgagtactgctttgcaaatttgcttttgctaagcatcaatccctcagtctcggctacgccgcgacagctcccctttcaggggagccttgggcttgtgcgctgcaccgggtgcacaatggcccttcggcgcttggtaccgaagggcgcagcgcgggtgcggtgcgggctgcggggtcagctttcgctgctgctgccgcgtttgcggaacagcaggctgatgcaccagaggccggcgaggccgacgagggtgtagaggatgcgggagacaacggcggtctggccgccgaaaatccaggcgatgaggtcgaatttgaaaatgccgaccaggccccaattcagggagccgatgatggaaaggatcagtgcgatggtatccatagcttgtgtaacctccaatttttttacgatgctcctagtatctccaattccgggggaattatccggcggcgcggggcgaatttctgcacagcgaaccacgcttcgcagctaaaaatttattagctttgacaaaattttttgcaaaaagcactttgcaaaggcgggaatttggtgtatactggaattggccatgacgcggccctgcgccgcagccagaaatcttgtgaagaaaggttgttttcacgatgaatgcatttttacccgctgatattctgttccctcaggtagaggacatctccaagtgggcggtgatcgcctgcgatcagttcacttctgacccggcttactgggaaagagtccgcaagaacgccgagggttctccctctaccattaacctgatcctgccggaggccgagctgggcacggagcaggaggccgcccatacggctgtcatcaacaagaccatggccgagtacctgaacaagaacattttcaagacgtatccccattccctggtttatgttgagcgtaccctggaaaacggcagcatccgcaagggcctggtcggcatggtcgacctggacgcgtatgactactccaccggctccacctccgccattcgtgcgacggagcggacggtcgtcgagcgcatcccgccccgccagcgggtccgccgggacgcccccatcgagctgccccatatcctgatgctctgcgacgatcataagaaagagctcatcgagcccatcggcgcgaagaaggattccctggtcaagctgtatgacttcgacctgatggaagatggcggccacatcgccggttggctagtcgacggcaagaatgccgacgaatttgaggccgttctggcaaactacaccgcccatgtcggcgagaagtacgtcggcctcaagggcacgccgatggtcttcgccgttggcgatggcaaccactccctggccacggccaagtcctgctatgaggagctcaaggcgcagaaccccggcgtcgatctgagcaaccatcccgcccgcttcgcgctggttgagctggagaatattcacgatgaggcccaggtctttgagcccatccaccgcgtcgtcgcgggcacggatcccaagaagctcctggctgagctgcaggcg

SEQ ID NO: 1175 - DNA, 15965 bp, Unknown
  16S sequences of unknown bacteria
ggactccaaggccttatcataggcttcctgccgtgttttaagctgttccttataagtttgcaaggtggccttatttgtgtctatctgctgttgtgcagatgtaaactgcatttcagccatacttttacttgtggaaagtttgatttcgttttggaaaatctccttttccccgtcatctaacttcttctctgcggcggcaatttggctttcaaattcttctttacctttttcgtattcccgatgggcatcatcatatttttcctgtgcccggcctaaaatttcccgtcgccttatatcgctgcgccgaactccaagttcttccaatttgtctgtcacaggctcaatataatcaaaatattcgcccttaaagctgttaaagtctttcgcaccgtcaactgtgacaaaagcctcggtgaatatgtcggaagcaaaatcttcttttgggatatacgcaaaaacagataccgagccgctgcctatactgcttgaccccttttgataggaaagataataagagcttttaaccttgcccacaatggtgtatttattctttttaaatgtgtctaaaatatcatcgccggtgccggaagaaattgtaatctcctgccccaccgataaagagtttgaaacaagcttgccctcttcaacaacaatttcaccgcttttttgcggcaatctgccctgggttactataaggtggttcatatattcatcgtcatcgtcacctaaatgatttaaatcaagtgagtggatgcgcataaccgtttgggttgtatcaatgcttacaaaaacatcagcctcgtaggccggcataacagcttttacaccgtctaccttttctattgcctttatatcctcatctgttatgccgaaatttgacataatgcggtagtccataaggttttcatcgtcaaaatatttgtctgcattaagacgcataacatcaccggcggcacacaccccggcaaaaaaagccgtgccgatggccactattgcaaatatagaaaaaaatctgcctttggtttttcgtatttctctgaaagtatctttaataagcgaattattcatattaccactcaatatcttctaccggcatagggttttcatttatttctattgattctatcctgccgctttttacatggattatcttatcccccataggacaaagagccaagttatgtgtaattaccacaaccgtcatgttgtgccggcggcaggtgtcctgtaaaagttttaaaattgctttgccggttttgtaatccaacgcaccggttggctcgtcgcacaaaagcaattttggatttttcgccaaagcccttgctatggcaacacgctgctgttcgccgccggaaagctgagccgggaaattatcctttctttctttaagacctaccgcctctattgtttcatctatatccaaagggtctttgcaaatttgaaccgccaattccacattttcctttgcggtaaggttttgtacaagattgtaaaactggaaaacaaaccctatatcatatctgcggtagtctgtaagttgcctcgaattcatcttacttacaagccgtccgtcaacggaaatatcgccgcttgtgcaagtgtccataccgccaagcaaatttaatatagtgctttttcccgcaccggaagcgccggcgattacaacaaattcgcctttttctattgtaaaatcaacccctgcaagagcaggtatttccacctcgcccattttatagatttttttaacatctctaaactctataaaactcatattaactccataaaatttatattataatctttttaaaaccgataattgagtatcaaaaatccggagattgtcccggtttaattgtcccagtttaacggtttttatttttccgtgatagtcgctgccgccgcttacaagcaaatcatattttttggcggtatcaagcaaaaacctgacttcattttctgtatagcgactgtaataacattccaatccctgaatacccatttccaaaaggtcggaaagttctttttgaaagcgttccgaagaaagacgcttctccccctcaccgcctaacgggtgcgcccaaattgcaactccgccggctttttgtatggcttttatagccggtgcaggggatggatccgtaacgtttgtttttattttattaagataattttcaaatgcatgggtcttattgtccgcaatccccttttgtaccataagccgagccaaatgaggtttaccccgtcggttcattttgtttaatccatcgagttcctcatcggtgaaaattatattgaaattatcctttaaaaatgcaattcttgcaaccattttttcacggtggctttccatttgccgccggcacatttgccgaatacagcttgattttatatcgtacccatatcccaaaatatggcataattttgatgaacggcaggaaaattccacaccttttataaacctaagccctgtcaaatcagctttcgacagtatttcctccacgccccggacagtgtcatggtcggtaagagcaaaagtttttattcctttttctcttatcttttccactatttcaacagggctgtcagttccgtcggatgccgtagagtgcaggtgcaaatctacatttgtaaaatccatatttcaccgccttttccgtttttactattataacaaaaataggagtaatgtgcaaacattactccttatataatctaaaatcagccgttatttttcttttcgttgatttttgctattgcatccttgcgtgaaaggttaattctgttctggtcatcaatttcggttaccataacaagaatttcgtcgcctacatttacaacatcttcaaccttggcaacacgtttgtcgtcaagttttgaaatgtgaacaaggccctctttacccggtgcgatttcaacaaatgcgccgaagttcataagtcttgttacaacgcccttgtagattgcgccaacttccggatcttcaacgatagttttaactatctgatatgccttttcgataccctcggaatcaagaccgctgataaatacattgccgtcatcgtcaatgtcaattgtaacattgcattcggcacaaatcttctggataaccttgccgcccttaccgataacgtccttaatcttatctgtgtcaataacaaggctcttcatcttaggagcatacttagaaagctctgctctcggctctgcgataacaggtttcataatatcatccaaaatgtgcaatcttgctttgcggcatttttcaaatgcctcggcaataatttcgtaagtcaatccgtcaaccttaatatcaacctgaattgctgtgatgccgttgcgtgtaccgccaaccttaaagtccatatcaccgaagaagtcttcgataccctgaatgtcaaccattgtcatccagcggtcgccctctgtgataagaccgcaggagatacctgcaacaggctctttaatcggaacacccgcatccataagagcaagtgttgagccgcagattgatgcctggcttgttgagccgtttgatgacaaaacctctgaaacaactcttattacataagggaattcttcctggcttgggagaacaggaaccaatgccctttctgcaagagcgccgtgaccgatttctcttctgcccgggcttctcaggcttcttgcctcgcctgttgaatacggaggcatattgtactggtggaagtatttcttttcatatatatcctgcaagccgtcaataagcatagcgtctttctgtgtgcccaatgtacagatagaaagcacctgtgtctgacctcttgtaaacatacctgaaccgtgaactctcggcaaaagacctacttctgcggaaagaggacgtatttcgttaataccacggccgtcaacacgcttaccctcgtctaaaagccaacgacgaacaacaaatttctgtaatttgtacatacattcgtcaatcatagctgtctgctccgggtaaagctcatcaaattttgcgtgaacttcttcgtagataggctgtaagcgattgtctctttcaaccttatcatctgtgtcaagggcagccttaaccttgtcaatggcaaattccttgattgactcgaacatatcgtggtcaacttcgatatgctggaagtcgtacttaggcttgcccacttcggcaacaatctggtcaacaaaatcaatgaacttcttgatttcctcgtgacctgtcttgatagcttgaagcattgtgtcctcaggaacttcctgtgcgccggcttcaatcataacaaccttttcctttgagcaaacaagggtaaggtcaagtttattttttttctgctgttcggcattaggcataagaacgatttcgccgtcaaccaagcctacggaaataccgccgatagggccgttaaacggaacatcggaagcgcaagttgcgatgatagcgccaagcatacctacaatctgcgggtcacaatccgggtcaacagacataacggtcataacgattgaaacatcgtttctcatatccttagggaacaaaggacgcataggtctgtcaacaactcttgatgacaaaatagcactctcgccgggacggccttctcttctgaggaatgaacccggtattctgcctactgaataaatcttttcttcaaaatcaactgaaagagggaagaaatcaatgccctctctcggtgcagcgctcatggtaacatttgcaagaacaactgtttcgccgtatcttacaaggcatgaaccgtttgaaagcacgcacattttgcccatttcaacagtgagttttctgccggcaaatgtggtttcaaatactctgtaactcattgtaaatctccttttaatgtattttggattgtctggcaagagagattatatttttagcaataagttcagcctttatcacacaaataaaagctcaataaaatgctaaatataatatcttctcttgcccggaaataattacatttttacagacggaaaggcagatgttaccacctgccttataatcatctgtaaattacttacgcaaaccaagttttgcaacgatagcacggtatctttcgatatctgttttctgcaagtaagcaagcaagtttctacgacgaccaaccatcttaaaaagaccgcggcgtgagtggttatcctgcttgtttgtcttgaggtgttcagtgaggtggttgattcttgctgtgagcaaagcaatctgaacctcaggtgaacctgtgtcgccttcgtgcatccggtaagatgcgataatttcctgtttgttaatcataattattttcacctttctgttatttgcccataactcagcaaaaggtcggtgaacgcccttgggctttctccttatgccgattcataggttactgtaagattatatcaccaaaatggcggtttgtaaagcagaatttatatattgatttccgccaagtattcttcggcagaggcggcggcatttcttatcattttgccaagctcgtccattgtgtcaaattttcttgcaccgaaaaggtatttaaaaaattccacctttatctctctgtcgtacaaatctccgtcatagccctttatataggtttcacaagtgaggtttgtgccgttaaatgtggggcgtgggccgaaaccggtggcagagggataataaaccccgtcaaccaaagttcttgttatatatacccccggcaaaggcgagcacatactttccggataaatttggtttattgtaggggtgcccatttttctgccgttttccttgccgtggacaacaacaaactcaacagaatatggcctgccaagcattttattggcaaactcgatgtcaccggccacgatggcgtttcttatggcggtactgcttactacggtatcgcctattttaaccgtatccgcctctacgaaatctatgccgtacttttggcaaagttctttcagaacctctacatttccccgtctgtttttgccgaagaaaaagttttcaccgcagaatacagcctttgcccccatggattttataagtacatcggttacgaattcttccggtgtaagccgtgagaacacggcaaaatccggtgagtaaaaaagctctacgccaagtttttccatacagtcaagtttttgattttgagtgtatatatccttgcctttatgacctaattttaccgtttttgtaaatgtaaaaattgccctttgcaaaccgtgtttgtcggcgtagtcgtccataagtttaataagatattggtgagctatatgaacgccgtcaaaataccccagagccacggcggaatttttttcgtttttccaacctatatcatatacttcaagcatctaaattttccttttctttttcagtaaacaatttaatcacttttaattttttatcggtgatatttgaaacggcaaaaaatctgtcgtgataataaactctgtaatctccgtcaggctttgatattctgctctcggctccgtttaaagttctcatggcaagttcttttgaaaggtctattcttggcaggtgcataaacacggtgtcggtgcttaaaacaaggctgtcgattgtgccttcctctctcgccttttgcagctgagaaatagtaaccgcctgttccgccgtgtatccgcaggccatggtgcggcaaagacttgtcatcacgccgccgcagccgagtttttcccctatgtcgtcaataagagttctgatatatgttccttcggtgcatttaacacgaattttatattcgttttccggcaaatttccatcgtcgagcatttctatttcttttatggttacacatctccgatttctgtcaacggtaatgccttttcttgcaagtttatataaaggctgtccatttacctttattgcagaaaacataggcggtatctgagaaatttctcctttaaatgacataacggcgctttttacctgctcatcggtaacatctaccggtttttcttcgatgacagtacccaaaatatccccggagtctgtcttaattccaagcttgaatgtggcaacatattctttatctttgataacctgcatatcgacggcctttgtggctctgcccataaaaaggggcaaaaccccggtagccatagggtccaatgtgccggagtgtcccacttttcttgtgcctaagatgcccctccgttttgcgaccacatcaaaactcgtccagttctgttctttatatagaattattattccgtttcggtcgattttctctattgacattgtttaccgatttcctttaacatatcactttttatatccgacaggttgccatttacaacgcaccccgccgcccttatgtgtccgccgccgccgaaggccgcagcaattttcgatgcattcatactttcgccggttctgacagagcatttaaaagtgttctcctctgtctgcttaaacataaccgaacactcaaccccctcaaagcctcttgccattgaaacaagaccgtctaaatccgtaggctccgggtttattttttgtaaatcctctgcggacaatgacaaaataacacatttaccgccgaaatagtattcataattgttgagggcgaatttttcaagttccacggttttggcacttttttccataaagaatttttcgtttaactttgcatgctccgcacccttttccataagttgtgccgccacaatatgagtataggccgatgtggacgaatacataaaacatcctgtgtcggttattattccggtataaagagcattggcaatgtctttggttatttccacgcccattgcctgcaaaatttcatatacaagctgtgccgccgcaggataatcgcctttaaggcaaatattttcactgtacagctgatttgagccatggtggtctatacaaagctctatattttctttatattgcgccggtatatccccaagcaagggcaaacttgccacatcgacggcgaccttgaattttatatcaaattctccggcgtaaacaggtaaattcagataatcatactttgcgggtattttatcggcacagacaacagcgcaggttttgcctgcctgtttaaggccgtaacgcaaagctgcggcactgcccaaggtatcaccgtccgggcttttatgacacataagcaatatattgtcattatcaagcagcatttgcgccgtctgttcaacggttatattatttgccattttccttgatttcccttaaaatatcgtctatcttctgtgcgtatgcggcgccttcgtcttttacaaatgtaaattccgggctgcgtcttatgtgcaaacgctttgaaagttcgcctctgataaatccctgagcctttgtaagggctttaattgcgttttcgcatgcctcatcgccgtccaaaacgctgatatgaactttggcgtttgtcaagtccgggcttgtttcaacacgcataattgtccaaaagcaatcaagacgcggatctttcatttgagatacaatagaaatcaactctttttttatatcttcgttaagtctttcaacttttgttgagttcattaaaaattacccctttcatttaaacaaagcggcagttatgccgccttgttgtgttatttatattattcttcacgatattcttcgatgatgaaggattcaaaaatatctccctctttaatatcctgatacttttcaagaccgatgccgcactcaaagttttgtggaacttcctttacatcgtctttgaaacgacgaagtgatgcgatttcatcctctgtgataacgataccgtcacgaaccaatctgatctttgcatttcttgcgaccttacctgattttacataacagccggctattgtgccaacggaagaaatcttgtagacacttcttacttctgcctggcccagttcaacttctctgaacttaggcgcaagcatacccttcatagcgtccttaacatcgttaatagcatcatagataacacgataaagacgaagttcaacattgttttgctcggcgtcccgctttgcggttgcatccgggcgaacattaaagccgatgataatagcattagatgcagaagcaagcataacatcgctcttgttgatagcgcctactgcggcgtgaattacctttacacgaacctcatcatttgatattttttcaagtgactgcttaactgcctcggcagaaccctgaacgtccgctttaacaataatcggcaattccttcatctcgccctgggcaatctggctgaacaagttgtccaaagtaaccttctgatagctgttaaatctttcttctttaatagctgttgctctcttttcggccagttctcttgcaagtttttcgtcctcgactgcatcaaacaaatctcccgctgccggaacttccgtaagacctgtgatttcaacaggtgttgacggacctgcctcttcaacacgctgtcccttatcgttcttcataactcttacacgacctacggctgtgcctgcaatgaggacatcacctttgtgaagtgtaccgttctgcaccaaaattgtggcaaccgggccgagacctttatcaagtcttgcctcgataaccgcaccttttgcacggcggttaggattggctttaagttcacttacttcgcttgtaaggtttaccatttcaagcaattcatcaatacccatacctgtgtgagccgaaataggcacgcagattgtatcgccgccccattcttccggtacaaggccgtattccgtaagaccctgctttactttttccgggttggctgttggtttatccattttgttgatagcaacgataatcgggatatttgccgccttggcatggttgattgattcgatagtctgtggcatgataccgtcgtctgcggcaacaaccaaaatagctatatcggtaatcatggcaccgcgctgacgcatagaagtaaatgcctcgtgacccggagtatccaagaaagtaatcttcttaccgcctgcaactacctggtaagcgccgatgtgctgtgtaatgccgccggcttcgccctgtgttacatgagtttttctgatagcgtccaaaagggaagttttgccgtggtcaacgtgacccataacaacaactaccggagggcgttcccgggtgttttcccgtgtgtcctcaacctcgtcaaaaagtctctcctcgatagttacaacaacttctttttcaacctttgcacccatttcctcggctacaacgctggccgtatcaaagtcgataacctggcttacagatgccattacacccaaagtcataagttttttaattacatcgctggctgttgctttaagccttgtggcaagttcgccgactgtgatttcgtcaggaatttgcactttaagctgagcgtgtcttgccttttcaagctgaagtctttcaaggcgctgtgcttcggtttcaactttctttttgccaaagttgttctgctgtctgttgttgtttttatttttaattttctgtttgccgccggactggttttttctctgtccgccgccgaaagattttgtctgtgcaagccgatcgtacttttcgtcaaacttgttcatatccacaaaacctgtctggcgtgtgtcaacagtgattgtaactctttcctgttttaccgtgttctgcttttcggcctttttctgtttatgagcgttctcaactattgtgccgtctgctctcttcaaaggctcgtttgaggacgctttatctgcctggggtttgctgttgccgttccgcttattgttgccggaattattgtttttaccgttttgaggtttattttcctttttaacctctttattttcagccggttttttattgtcctgtggtttagcggctttattttccttggcgtcctttttatttttattatctttgctgtcctttttgccgtcttttgggcgttcggatttttgtggctgttcttttttaacatcccgtgcaggtttttctgcctgtttttcctgctgctttttagccgcacttgacagatattcggcaacgttttctattttagccttatttgacaaggcctcgaaagctacattagcctgttcttccgtgaggacagtcgactttttaatttcagtgccaaggagttcgcttaaagttgtaagagctgttttggcattgaggttaaagtccgcaataagattgcttgctttgtattttataaccatctgttactctccttctgtttgtttgattgaaccggacaaaagaaccgccaaattttcatcattgacggaaatcaccccggtaagcctgccgcatacagttgataaatcgtactgtgttaagccgactgtatataacggcactttactgcctgtcaatctttttatgttttcgcctgtgcgccggctggtgtccgctgccagcacaacggcttttgctctgtttttttcgatccgttcttttaccatgtcaaaacccattgacaccttgccggattttctcgcaagagatattgcaaataatattttattcaacatttatctcccgtgcaagtttttcgtatatttcatcactgatttcggtttcaaaggctctttcaagttttttgcctttcttggcaagggcaagacagtttacatccttacaaatataagcccctctgccccgctttttacccgtgatatcaatggagatgtcgccgtctgcgcttcttactacacgcaacagctctcgcttgtcttttgactgcccgcagcctacgcatcttctttgaggaatttttcttattgccataaaaacacctcccgattattcgccgaagtaaccgctttcagggtgaatatcaatcttatagcctgtaagatgtgcggcaagtcttgcgttttgacctttgttgccgattgcaagtgaaagctgttcgtccggaacggtaactctgcaagctttgggctgctgtgaaatgatttcaacggaagttacccgtgacggtgaaagtgcggctttgataaattctgccggatcctcgctgtacttgataatatctatcttttcgccgttaagctggctcaaaacactttcgattctggctcttcttgaacctatgcaagcgccgatagggtcaacattttcatcttttgaccaaactgccatttttgttctccggccggcctcacggctgattgatttgatttctactgtaccgtcaaaaatttcaggtacttcaagttcaaaaagtcttgccacaaagtttgaatgagttcttgaaagcattatcttcgggcctctttcggtggaaaccacatcggcaacataaacttttacactgtcgcccacttcgataacctcaccgggaatttgttcttctttcggaagtacaaattcgtttgaaccgatttgaagaattgcggcgccgctcttttcgcttattctcagcacggtgcctgttacaagctcgtgaattttaccctgcatatcggcgaaaagctgttctttttctgcctccttgataccctggcggtttttagctgcgcctaccgcaatgtagccgaaatcttttgttttaagaggaattgcaagctctgtacctattgtggctcttgcgttgatttctcttgcctcttcaaggctgatttcgcaatccgggtcctcaacttcgtttacaacggttttaacgattgaaaccgtaaagtttttctttttctcgtctgcttcaactctcacattaccctcgataccaaggtcttttgaaacggcaacttccattgcctttgtgattttttcaagcaaaacttcttttttaatatttctctctttctcgattacatcgagagcgtcaaaaaattccttattcattttctgtctttctcctaaaataagtcttcgtcgtcacacagctttatatacgatgtttcctttgtgtcaataacaaactgtgcgccgtcgtctctttctatcgttacatagccgttgtcgtagtctttgagaacgcctttgatttcctttacaccgtcttttgcacggataaggcgaaccgaaacaacttctcccattttcttttcaaaatgaaacggccttgtaagttttctgcccagcccccgtgaagaaacttcaaaatagtaattttgttcaatcggatcagcctcatcaataagcgggtcaacagcccttgacagattttcacattcatcaatgtttattctgtcgttatccttatcaataaatactctcaaataccaatccgggccttctttttcaaatctgacatcccaaagaatgagccccatttcgtcacaaaccggttttacgatttcctcaacgatttccgttgcctttttgcccttagccaagcagattacctccttaaaaatttaaaaacaaaagagaaggttgcccttctctcctttactaaactgattactgaatgataataccacatttaaacaaaaattgcaatagttttttagcataaaatctaatgttttgcaaataaaattcgtttttttaccggcatcgtgttttacaccgcaaaattttattgacttttacacattattgttgtattatattaaggcagttgatttgccgctatggtgaaataggcagacacaagggacttaaaatccctcgatagaaatatcgtaccggttcaagtccggttagcggcaccaacttaaaggcgatacctttttcggtatcgtcttttttgttgtcattttaaaagcaacctgtttgtgcaggttgctttttcacatatactatggaattacttatgattaaaggaatttgtcaagttctgtttcaacttccggcatctttttaaccaccggattttccgtcaaaacgccgtgggacataaccatatccacatttctcaaagcctgaatgtcttcaatagggttgccggcggttacaatcaaatcggcgcacttgcctttttcaatgctgcctgtaatattgtctatgccggctatctgtgcatttataagtgttgcggtgtgcagtgcaaaagaatttgtaactccgcaatacttaacaaaatagttaagttcacgccacatatcgtaatgggtgatatatgggcaacctacatctgtacctaaaccaacgggaataccgttttcaaggcaggcctttgcacagtcgattacgccctcaaacacaatattgccgttgtactgtgccatttcactggcaccgcttatttctctgtcaaacaaagcaaaaggcaaagccggtgatattgtgcaaatatgtgcggcttttctgtctttaaacagttttatgatttcttcatccggttttgcgccgtgctctatggtgtcaacgccgttttcaagggcaactcttactccctccgggctttccacatgagcggcaactgccaaaccgtttttgtgtgccacatcacagcaggcttttacaatttcaggtgacattttaagttcaccaggttcgccttttgcctttgcgtcaagcactccgccggtaatcataagttttatcaaattcgggtgttcttttattattgtttcggtaaaatatttaccctcttcaacattgtgtgcctcgtaggcgagagagccggccatgtgtccccccggaacggaaaccgccatattacctgccaagattctcggccccggtgttttaccggcttcgattaaatctcttaccttcgtatcaaaatcggcaacgccgcctacggtccttatggttgtaacgccgctgtaaagttcggttttggcatagcctttgcacatatttatgccgatcttgcgcataaggccgttgcttgtaatcattttaacggttttctttgtgtccttcggtttcttttccggcttgcctgttgccggtaaatgcacgtgcatatttataagtcccggcattatatacttgccggccaagtctataactttgcaatcggaaacatcggcgccattgtctgcaatatctactattttatctccgtcggtgataataattttaccccgaacaggctgcatatcctttgtaccgtcaaggataatgccgtttgtaaaagcatatttcatagctacttccccttttactttttattacattataaagcctaacccgatattttttcaagcactatatttaatttttaaacacttttgattatatgtaaaaaagaggccgtaaaacgacctcttttaatttgcacaatattgaattaagcgttgaatttatcttcgtcaagcatattttcgctctttgcaacacagattgaagcaaccgcatcacctacaacgttaagtgatgtaacaagcatttcgataggtctgttgattgcaaggataagtgcgtatgctgccaaagcaggttcggttacaaggccgatgcctgaaagaattgtaaacaggataacgccgcctgcacccggtgccgccggtgtgcccacagaggcaaccagtgccaaaacagctattgtgataagctgtggaattgtaatctgcacgcctgcacaacctgctacaaacaatgtggcaataacctgcataatagctgtgccgtccatattgattgtcatacctaaaggaagaacaaatgaggctacttcttcgtttacgccgaaatcctcaacgtttgttgaaaggttcaacggcaaaactgccgcagatgaagatgttgagaaaccaaagatggcaacttttgaaattttcttaacgaattttgaagggttaagttttgcgataaccgcaaccaaaatcggataaacaataagcaaaaatgcgaacaaaagaattgttgtaacaaccatatatgtaacggccggcttgatatatgtgataccataagcggcaaatgctcttgtaagaagcataaagattgcggcaggaccgaatgttgtaacaacatagttaaggaaaacaacgataatatcgtttacttcctgcacaagctttttaatggctgtaactttttcgcctaaaatatttgatgaaacacctacaacaacagcaaggaaaacgattgaaagaaccgagctgtttgttgagaatacagc

SEQ ID NO: 1176 - DNA, 24500 bp, Unknown
  16S sequences of unknown bacteria
ttttatacggaactgccgcaacgtattcagcgccctcgtttttacaggaataataaatttcactgtttatgcttttgttaatcgtgctaagcagcttttcagaacagactgtctcatactgcgctatgtagtcagcatcctcgcagcctgctttttcaagagctttctctgctgctttctctgcactgaaatgcatatcaaacatcagaggaagtactgcaaggagtgcaataactatcgccgcattccttattgtcttttgcattctagtcagcttcatctattccctcctgctgtatgtaatctgtagccttggcataaagtgtattgcatatgtactttgctctttcctctgtaacagacatcttccctttatatttaacttccgatgacatcttgtgcctgtcctcaagatgcacagggttccagtcgctttcctgcggaaccagacttaatatctcctgcgtatctatattcataataatgctgcagccgcctttgtagtcatcgcaaaacccgtcggagaaatacgacacagagaatgaaattatctgctcatcattgagatttctgtaaacttctatatagcagtcattgtccagccattcccttgcaaactcagcatacaggctctccggatttctgacctccacacgcatacactctcttctgccggagatataatctgggctgctgtcgttttcgtcacgtttgacagatgctatctttatcctgtcagaaactttcacaatgtcaggagtttccgccttatacaccacaccgaaccaactgttgtacggcacggttatcatatacgagtcgccgtcaatatcagcctcataaaaccttttgcttatcgtatatctgttctttgcaaaagcaggctttgtcttaaattcgtgggatgctatatatttcgcatccgtaagacccgcttcctcaagcacctcctgcgccgcagcctccgaagtgaaatgcacattaaacagcataggaactgctgcaataaacacagccgctattacaatattccttattgtcttttgcgcccttgtcagcttaatccttttaaatctgttcatttcttcacccctgcagattatccagtctgcattcagaatgtctgccgaacatatcgtagacaacatctatatacttcgtgcctgtatcggcattcttaaatgcaacagtgacatttccgtcttctttctgataaaacatatatccgcctcctgcaagagccctgccgctgtcgtcaaaaaagccttcggttacaaaggcgctgttcatactgtactcgccctttataacctttatctgaagatacataatactgtccggttctgaatgcgcctcaccctcaattatagctatcctctcaaaacgcagaactgtatttcctatggttatggtctcgccgtttaacttcttttgactgttaagatttccgaaagcctcagcgtcctcataggtcataatatcgcttccgttgctctgatatatacagggctgtccgctgcctttaaaaaacacaaccgccgatattataactatgactgccataactgctaccgcaagccgtgaaagctgccagagccagcctaaaagcggcttgtgcacgcggttaagctccctgcctatatcagaaggctctcccatagccaaaacagcctttgcctccgcttcctcccgcgacattccctgcccgcaaaaccagtccgctctgtcctcaatatgagccgcaagctcctgactgatggatttatgatcaggcctgaacctgacttcctttaaaactctggtgataaattcccctctgtccatatcgcaccgcccttaccatatacaaccttgttgactgcattgctgaaagcctgccactgtctggcttcctctgcgaactgctcctgtccctttgctgtaattgaatagtatttacgttccttgccctgctgcgtcttttctttgtatgaggttacaaatcccttgttttccagcttgtgcagcaccggatacagtgtgccctccctgtactgaaatgtactgtcggaacgctcgtcaagcgcccttattatctcatagccgtacatatccttttcggtcagcaggcttaatacaagaagcattgagctgccgcctaccagtcccttatccatttatattcacctccaattaaatatacctagaacttctatgtatgcttattatacttagaagctctaggtatgtcaacccttgctttatttctttatcggctcggcctccagccgcttccccatcagaggcgtccactcaaagccgcagtcctcgcatctggtcctgtagcctgtcataaatccgtcattattgcagaccacctcggcaagcccctctgcaaccgcctcgcttatctccggcacaaccagcgcccctgcgggaacaagccttgtcagcctttcgctgccgcatctgtaacatttttttaccatatcaattctcccctgtcctgtattttgctatgcaaggcaatattatcatacgtccgcagccttttcaatcaaatattctcttgaatatggcggtgaataagggtaaactgtttgtagtacaaaattacaaatctcacggaggtgtattatgaataaaattcacactgataaggctcctgcagctgtaggcccttattcacaggcaattaaaataaatggaatggtatttacttcgggacagatagctcttgatcctgcaacaggagatatagtcggcacagacatcagaacacagacagagcaggttatgaaaaaccttatggaagttttaaaggcagcaggcaccaggcaggaaaacgccatcaagacaacctgctttttgagcaatatggacgattttgcagcctttaatgaagtttatgcgcagtacttcacagaagcacctgcaagatcctgcgtagccgtaaaaactctgcctaaaaacgttctgtgcgaggttgaggttatcgcagcagtggaggattaatatatgaaagagcttacacttaaaaattttgaagaggcagcgcagcttgtcaaaaatgttacgctccccacaaatcttgaatacagcgaaagcctgagcagcaaaacaggcggcaaaatctatctcaagcccgaaaatatgcagtacaccggagcctacaaggttcgcggcgcatattacaaaatcgcaacccttacagatgagcagcgcgccaaaggccttattacagcctcagccggaaaccacgcgcagggtgtagcctatgccgctaaaaaattcggctgcaaggcaaccatagtaatgcctacggtaactcctctgattaagataaacagaaccaaaagctacggcgccgaaatcgtactgcacggcgatgtgtatgacgatgcctgcgaaaaggcaatggagcttgcagaggagcacggatatacatttatccacccgtttgatgaccttgcggtagctacaggtcagggcagtattgccatggaaatagttcaggagctgcctacggttgactacataatcgtgcctatcggaggcggcggacttattacaggaatttcaacacttgcaaagatgctcaaccctaaaatcaaggtaatcggcgtggagcctgccgctgccgcaagtatgaccgcggcatttgaaaagggcgagcctgttaccctgccaagcgcaaacacaattgcagacggtacggcagtaaagagagtcggtgaaaccatattcccttactgcaaggaaaacattcacaagataattacagtcgatgacaatgagcttatcggcgcattccttgatatggttgaaaatcacaagatgattgtcgaaaattcgggacttctgcctgtagcggcactcagccaccttgatctcaaggacaaaaaagcggttgtcgtattaagcggcggcaatatggacgtaatcacaatgtcatcaatagttcagcacggacttattcaaaaggacagaatattctccgtatcagtgctgctgcctgacaaggccggagagcttgtaaaggttgcctccataattgcaaaggagaaaggcaatgtaatcaagcttgagcacaaccagtttgtcagcatcaacagaattaacgctgttgaactgcgcgtaactatggaagcctacggtacggagcacaagctctctatcctcaaggcccttgaagaagcgggatttgagcctaaggttgtagatacaaaattatattaataacagcaaatgctatgcaggacctttacaggtttcgcatagcatttttgtttaccatatatccgcaggggctaaacctctgtttcaaacattttgccgcacttcgggcatttaactctgatacgacctctgccctttggcgccctcatcttctgaccgcagccgggacagttaaaaaacatatactgactgccgctgctgtgtgtttcattattacagctgccgctgtcattctgttttttcttcggctttatgaagctgttttttatttcaagatatttttcgttttctctgtatctcttagggatattggttgaaaacattctgaaaaggccgtacacaatccctataatcacaatatagtagcacagcgcgctgtgaagccatatgtagagcgcaaggaatacaagcaccgctattcctatgaatttctcaaattcatcaatacctctcctgcccagcataaatctgtttatcctgcttttaaaatcgttcatcgtatattcctcctaacatatacaaggcacaaacatatatccgcctccgcctgtgcagcagctgcacagcgcaagtgtaaggcatatattatcacatgggttaaacgatactgttctcctgccgtactgtgtacctgtctggttgtaccagtcgctctgatattccagactgtaaaggtactgctgatagttcatatttcccggagccatagccgcggcagctctggcatccgctatagccgccgatctctgaccctttctcagatatatattggatcttaaaaaataccactcagcagttttgttttcaatgctgtttaacacattcataccctcatcgtatctgccgttttgtatgtaatttctggcagcattcaggtatatctcctcctgtgtgctgtcatgctgctgtcctgtgtaggaattccagaattcctgataattgccctgccccgacctctgcttcataataatgtcgtaggcctgctgaacctccttgaatttctcttcataggcttccttgttgggattgttcatattggcatcagggtggtattttttactgagctgtttgtatgcttttttgatttcatcatctgttgcattgctgtctactccaagcacctcatatggattcattaggctttctctccttttgctttttcgtatcttatccatactcccgaatagagtatgtttctcattatttcggcatcatctataatcggaagctgttcaaattccccggtacactccgctatattgacggtaagcacctgctcccactgtttctcaaaatcggcttctttgtatataggttttatcggattgtatctgtcctttttaatatcctcttcaatatcctcatacgcatccagcagatatatgaatttgcccagataaaatccgcagcggtaaagccggtctttccagaaatcatctctgtatgcaaaagcctcacccattatctctccaaatacgcctgacggctcttcaaagttctcctcgcctgctttttcaagttctgacagtctgtcgagaagctcgcttatcctctgcgctttttgcggctgtcttttgcaggcttttttcattttgcccttaagtaaaagcgacagcagaagctttgaaaacttcctctcatccttccagtcatcaagcacattgtagtatgccataattatattaatatcagccgcatattccgatacttcactcgtaatttcctcatgctttgatacagggtgcgcaatgcatctcctgcatacgcagcagctctcaggctcataaagccccgaaagcagcataactagaaaagtcatatcgtaattaagagtcagtctgcccaaaagtccgtattcttttttgagcgctctgcaaagcccgcagtaatatgctctgtatcggtcatattctctgattttaagttcagggcggtttgccataacatatccgaacatcttaatctcctatattgattatatatatttccggtgtgcataaggtaatgtaaaaatgtagtttatatgaaagccggccgcagatagtgggttctatctgttccagaaagcgcagggtgagcctgctacgcatttaccgcatacttcacttccattgctgccttcataggaattgtcctcaactctatatatctccgcatttttgcagagaatttcatagcacttgtgtctgtcgtagccatcctctgaaatagcctgtgtgggacagtttttcatacatatgccgcagcttccgtttgctttataaaggcataattccctttccataggcttatcggccgcaacatcaagattggtgattattgtgttgtatctgccgcagcagcctttgggtgtaataagcatattgtttattccgaaagttccgagtcccgcagcataggcaaaatgacgaaatgaccagtcacttataagtttgtcatgatcaaaggtgcctgctgccggatgcactgctcccctgtatccgtattcactcagtctgtctataatatatgaattcagtctgccaaacattgcatttgtctgctcataagcgtcagcccactgctgtgaggcgtattcgccgccgttgttgtttgactttgccagcgcccttgtaaaaggaacaaaatatgcgattacactggctgcatcctccattatatcctgcgggagcccgtgggagctgctgataagctctggcaggttctgtatatacggtgaataagcatcggcaaaaccgacaatgggctctccccactccgtactgatttcagaccgctttgaatactctgctataaattcacttatccacctgtttatccgttctttcatacccgctttcctcttgctatatctttgaatatgagaactgtccgtcgcacacaacagttccgtcggtatgcctaagctccaccgccgctatgcaggtgcgggagcctctgtgtcttatctttgcctctgcaatcagttctgtatcagacacttcagtgctctgataaaactgcaggctgcagttctgggttacatacatatcccctgttgctcttgcggcagctccgcctacggcgtctgcaagggaagcataggctccgcccgtaacatgtcccagcatatccgtaaattcgctgactgctttaaatttacctgttgcgccgttctcatcggcgcttatgatttcaactcccaaaaactctgaataaggatatttttcgttcataatataattacctttccgttaattgcaatacacactccgcatcacaggtcaagcttgtgataaatctctccgtccagagaatgccatgtaaattcactttcattcataagcatgtagctgtgcctgctttcggctttcggtattgaaacagaacccggatttaaatacaggttatcgtttccaaacggctcacatgccggaatatgggtgtgaccgtgaagcagtatatctccgctctgcatcggcggaagatgctccgtattaaagttatgtccgtgtgtgacatatacaagccggctgcctgccgtcaaaatacagtaatcggccataacaggaaattctaaaaccatctggtcaacctctgtatcacagttgccgcgaacacagaatatgctgtttttaagttcatttaacattttaattacttctttgggcgcatattccctcggaagatcatttcgaggtccgtgatatagtatatctcccagaagcagcagacggtctgctttttctctttcaaatgcttcaatcagcctgcggcagtagtatgccgaaccgtgaatatccgatgcaatcattaatttcatagttgtcactcctttcagtgctgctgttttcttgtgagcagcgctactgtctctatcgagcttgtccacgggaacatatcaacaggcgttgcctcttcaaatctgtagcctgcctcagtcagccttgctatatcccttgccattgtagccgaatcacaggatacatatactatcctcgcaggcgcagcctttgccagcgtctcaagcagtctttcatcacagcctgtcctcggcgggtcaagcacagccacatcggctttatccatatgtatctcctgttggcagaaccatttctgccatttctcaagggctgccttatcctctccgtagccaagcagcgcaggcattacctcctctgctctgcccgttatatatctggcatttacaataccgtttataaccgcatttcggttggcgtcaattacagcctctttaactgtttctatacctattatctgtcccgcctttcgggctgcaaatataccaatggtgcctactccgcagtaaaggtccagcactgtttcatttccgcttaaatccatatattcgactgccttgtcataaagccttatcatctgctcagggttaacctgataaaacgaggctggtgatatttcaaatttaagtcccgctgtttcctcaattatagttctgtttcccgcaagcagagtataatcgctgcccatcacgtttcttcccttgtcggtctttttctttttatttatataaacgctctcaagtgaatatatatcatcaagagcataaattgcatcatcaatagaagaaacaagctttgcagcgtctttaagcccactgccgtcagtcacaagtataaccattacctgccctgtaccaaaggctgttttcaccaccatatgtctgatacattcctcgcccgatactctgaccgcctgcgccgccgccatagcagcctctgactgtattatgcagtcgggtatatcgcagaccctgtggcttttagcctcaaaaaatcccacgcagccgcctcttacgggcatctccgccttgtttctgtatctgtaaggctcctccatctgtatcatatcttttacatcagggctttctaaacctgctattctttcaagcttgtccctgacctgctttgtcttgatttctccctgcttctcataatctaaagcagacagactgcagcctccgcataagtcgctgtacggacagtgtggctctgttctgaattccgatttctgtttaatctcaacagtatcggcaaaggcatatgtttttttaacttttgtaagctgcgccgttaccgtatcccctgcaacagcaccgtctgcaaataccgtcataccgtcacagtatccgatacccttgccctcatggctcatatcgtgtatatatatttcaactatctgtcctttttccatatcactctgtcaagctgtccgctatctcctctatttttttaaatctcttagaaagacctgatttgcctataggcggatccatcatttcaccgatttccggaagcggcgcctccgggtgcgccagtcttaaaagcgctatctcctgcagcctgtccggcaggaaatcaagtccctttactctctgtattttttctattgcatctatctgcctgcctgctgcccttactactttgtccacattggcaatctcgcagttgcttattctgttggtctcgtttttaacggctttcatcatcattacattgtcatatgcaaggtactgactgtgagctcccataattgcaagtatatcaagtatctgcctgccgtccttgacatatacgccctcgccttttttgcgctctacgattttgggataaagatctgtaaaggtcctgatcagtctgcgcacatccgatgccagcacgctgctgttgcagctgatttcaaaatgatggctcttttcgggattgctgattgttcccgcagccataaacattcctcttaagtaggctttgcggcagcatttggttctgattatcccgtcatatattccgtctgcaaaatagttcataccgcccttaatcataagtatgcctatctctcttaatatggcctctgagttctgcgccggccctatggtcagaatgtatgtcacgccttttttgatggtgttgctctgccccacctccagtggcgcatcgactccgaaatagtcctttatcatttttttgtagtgtcttgccgccgcagggttatctgtaggcataactattttaaatctgccaaaaccctcaagctccagacttccgcacattctgataaagcctgctatctccgcaagcttacagcagtccttttcaggttctatatgtgcaagttcgtttttggtatctgttgcaaacgacattttaacctccgtaggaaactctcggacaagtgtccacctactattatatgtatcattgctgcctgtgtctacacctttacaaacaaaaaaccatcttaatcacgatggttttttgtgaaaacttccttacagcagtcctgtactgaaatacctttccattctgtcgggaagcactgttgcaattatcttgtctttgccgtatttctccgccatctgcatacaagcccatatgtttgcgccggaagatgtgccgcacataagtccctgtttccttgcaagcattctggtagttccgatggcatcttcgtctgtaactgtcacaacctcatctatcagagatgtatcaagcaccgatggtatgaaaccgtcgcctataccctgtatctgatgaagtcccggttcatctccaagaagcgcagatacgtttttaggctctaccgcaacagatacgagatctggatttttttctttgagaaactctgttattccctgcagtgtaccaccgcttccaagtcccgaaacaaatatatcaaccttgccgtcaagctgactgtatatttcaggacctgttgtcagatagtgaattttcggattgtcagggttttcaaactgctgaggtacgaaatattcatctgactgcgaagctattctcatcacttcgtttacggcaccgtcaaggctttcctctgccggtgtaagtacaagctctgcgcccagcgctctgattattttcttgcgctcttcgctcatattttcaggcataacaattataacgttgtagcccattctcacgccgcacagcgcaaggcctattcctgtattgcccgatgtaggctcaactattgtcataccttttttgagtacgcctcttttttcggcctgttcaatcatattctttgcaacacggtctttgatgcttcctcccggatttaaaaactccgcctttgcgaatatcttcatgcctgttgaggtctcaaggcttactatcggggtactgcctatcagatcaagaatgttttctgttatcattttcatatttcctttcgttataagtcgcgatgtgcaagggttatcctgtagcccttttctctgaatatacgggcaagctcgtttgcagatgcaacggagcggtgatgccctccggtgcagccgcaggctatgttgaggtgatatttgccctcctgcatatatgcaggtattatctcttcaagcagcggtactattttttccataaattctacggtaacctgctgtctcagcacataatttttaactttcatactgtttccggtcagttcctttaatgacggcacatagtacggattagggataaatctcatatcaaacaccatatccgcatcaagaggcataccgtgcttgtagccgaatgactgtatattgattatgaaagtctgtttttcttctcctttcataactatgtctttaatgacctctttgagcttggctgttttcatatttgaggtgtctatgacatagtttgaaatgcttctggcctttgcaagaaacgctctttcctttcgtatgccgtctttgacgcttgaaacgttaagcgggtggtttcttctggtttcgttgaagcgtcttatgagagtttcgtctgatgcctcaagaaacattatcttatagtcagtatcgtgatatttgttaagctgctggtcaaatcctctgtagccctcaccgcttcttgagtctatacatattgcggccttgtctacattgagcttattggtctttgcaaggtcaataaagcttccgataagcgccggaggcatattgtctatgcagtagtagcccatgtcctcaagacagttgagagcattggatttgcctgcgccggaaagtcccgtaacaattatcagttccatcaggtttctccctcctctgttctttcaaggtttactatccttgctatatcaagacccgcagcctccgctcttgcaagtcctccctcaaagtcgcccactctgtatggctggtgggcgtcgcttgaaattatgaatttaacatcatatttcgctgcaatacggatttcctcaaccgtaaggtttttgtggtgagtgcttatctccataagcgtatccgttgcggcgcaggcctttgccagctcatccatatcaaacggtcccttatctccggggtgagtgagtatcctgatgttgttttcatacagagccttaaccgtcatatcagtgtttttaataatcaggttcttttttttgaagccgctgtgtctgtacacccagttatatgcgcagtagccgtgagtcactccgtagtgatacccggctattacaaaatcgtattcactgaattcctcaggagatatatcaagatggtttcttctgtttactatgtttgcctcaaccccaaggaatatatctatgtcgggatactcaagtttaagctcctctatctgccgtctcatttcgggaacggcttctcttttaattccgtaggtgagatgtcccggcccgtggtctgttatggcaatgcctttgagacctttgcttcttgccgcttccacattatcagctatagttcccttgccgtgtgaaaaaatcgtatgtgtgtgataatcaaatgtcattttgtatttcatcaggcatcttcccctataattcttacttccggctccatcataacgccgaatttatcataaaccgtattctgaacaagcctcatcaggcttaatatatcagaggctgtagctccccctgtgttgattacaaatcccgaatgctttgaggacactttagcccctcccacagacagaccctttagtcccgcttcctgtatcagcttgcctgcaaaatatccctcaggccgtttaaaaaagctgcctgcgctgggatactgaaccggctgtttttcgtttcttctggccgtgagtgttttcattttctctgcaatgtcgccgtagctaccctttttcaggttaagctttacctcaagaacaatatcgccgctctgctgcagcgcgctgtgcctgtaggaaagttcaagttctgaagccggtatctgtttaatactgcctgaggctttttcgaggacctttgcatattctatagcgtctgcaatctcaccgccgtaggctcccgcattcataaacacgccgccgcctatgctgccgggtatgcccgatgcaaattcaaagcctgcaagctctgcctcaagggcttttcgggctaccgatgacatcagcgcgccggctcccgcaattattgaggttccccgcacctgtatatccgaaaatccgtcatcaattctgattatgacgcctctgtagcctccgtctttaaccagtatgttggagccgttacccattatcatatacggcgttttctcggctttcaatatatctgtaatgtatacaaggtcatcgtaagaccccggcattaccagcagatcagccctgccgccagccttaaatgatgtgtactgcttcatatccgcatccgctataaggcgctctgccggtatttttttgtttaagatatcagttatcttcgctgttgtcatcagatttttcttctgcctttctttgttttttcctgaacctgctgaagattttaacctccctcagattatatatgtccttatccatataatcgtcaagctctgtagccagattgtatctgtcaagcttcatattcattctgtagcccacataggaccatataagagcgaatacaggcactgccagaatcattcccataaatccgaacagtcctccgcccactacgattgagaacattacccagaagctaggaagacctattgattcacccagtaccttaggctttatcacgttgccgtcaacctgctgaagaacaaccgtaaatattccaaagtatattccggtccatatgttgtcggtacacagcagcagcgcagacggtatgcctcctataaacggcccgaagaacggtatgaagttggtaacgcccactataacgcttacaagcaccgcatacggccagcccattatcgccataaatataaagcagagtatgccgattataagggagtccagcagattgccgcttacaaacttgccaaatgtatggttgacattatgcgctcctgttataactctgtctgcatgttcttttttcattgtcgcatagcacagcttgcggctctgggcagtgaaaacgtccttgcttcccagcatgtatatcattgaaacaaggcctatcagtatatttaaaaataccgatacaacgcttgcaactcctgccgtaatgctgtccaccatatccattgatgcagggagcaccttgtcggtcagccacgccattattttgtcattgctgttacttacggcgttttcaataggataccatatctgagggtaaacctgcgccttagtctgcatccagtctataaccttgtcaaaatagtcaggaagcaccaccacaagacctgctatactatccaccatctgcggaattacaagataaagcagtcccgctataatcgcaatcagaagcaggaaagtaacaacaagggaaacgccctttgcaatcctcataattctcctctgatctgtaagcttctttgacagcatgtgtcttaatcttctcacgcaggcattatacacaggacacatcagatatgccagtacaaatccgattataaacggtttgagcacatctacaactatcgctatgtatttggtaaggtcaccgacagtctgcgccgtaaaaaagaatactatcagcgcgcagcccgctataaatatagtaagccccagtttaaaataggtgcttttgcttctcagtttcatatttcaaccctttctttcgttaaatgtcagtttctaaaatcccatatataattatcatacaatattttcacttaaaataatatataaatgttaaataattaaaatttttttaccacaatttacactctcttgtgtataataatctaaagaggtgaatataatgactgattttcacaattttgtactcaacacaaatctgcacgaaataaacctgctctcaataacgctccggcttgttcttgctgtcatatgcggcggagtaatcggacttaacagagcgatgaacaaacgccccgcgggcttcagaactcacatactggtatgcctcggagctactcttgtaatgcttacaaatcagtatatggtggatattataggccttgcaacagaccctgcaagactcggtgcgcaggttgtcacaggtgtgggctttctcggcgcgggaacaatacttatgcgcggaggcggccgcaaggtagagggccttacaacagctgcgggtctttgggcatgcgcctgcatagggcttgctcttggcataggcttttattctgccgcaattatcacaactctgctggttttcctgtcgcttactatatttatgaaatttgcaacggatatatacaaaccgtttaacaaagaggccgccaaggcctacaaggaggagcacgaggaagcccagtctgcaaagactgacaaaagctcagaaacctgatatctctgtcaatgacaaaagacagcccctgcaaaggctgccttttgtccttttttatttatctgaagaaagttgccagtgtcgtaattaccgcatacacaccgtatctgctccgcatactatacaagaatataattatctacagtacacaaacacacaaatttactgcggagccggataagctttctgcaggatttctctatctgttacgcttcacagattgctctgattgcagcaatagttctgtcaatatccgattcaagaatgtatggtgccattcctattcttaccatgccgccgtaaggctgcagtttgagaacttcccatatagttgcgattgcatagaattcgccgtcccatacgaagatgccccgatccgcaagtttttttgcgatatcatttgaattcatcccctcgactgtaaatgatacggttgctgtctgaggcgttcccgtgcacgggccgtaaagcttaagccccttgatatccttaatgccgtttctaagcttgtctgcaagctgtgcctcgtatgtatccattgcaagcattccgcatacgatatcttttcttctgcctgtaagatctgcagtttcctcttcaaacatttctgcgtgtctttttccgatgtctgcaataaattcaactgcttccgctgcgccgctggcgttttccatacacatagttcctgtttccattctgaaaggcatttctgtattgtcatctgccattactcttgcagccttcagtgagtcgccgacttcttttttgcagtagaatgctccgcagtgaggtccgtagtatttgtaaggtgaagtctgtacgatatccgcgtctattgctttaacgtcgataattccgtgaggtgcatactgtacggcgtctactactgtaagcgctccgaccttgtgagcctcgtcaatgtatttttttacgtctgtaatagttccgcatgaatttgcagcccagttgatcgcaacaagctttgtcttatctgacagctttgacataaaatcatcaaaatcaagctcaattccgtcaggcttcagagcaacatttttgattacagctccgaagtcttcaagggttctccaaggtgaacggtttccttcgtggtcgatatctgtaatgattatttcatcgccttctttccatgtacgcgcaagcgccattgcaattttaaaattattagttgttgtattttctccaaagcatacttcattccattcgcaattaaagaaatctgcaaaagtttttcttgcatttacaataatcgcatcattttcgagagttgttctgaaaacgccgtgaatatttgaattatgcattgtcatatggtcaaccatttcatccattactctctttggaagctgagttcctccgggtccgtcaagataaactgccggatatccgtttactgtgtttctcattgcaggaaactgatttctgaaatagtcaatatcgaatttaaaattcttcatagttttactcctcctaattaattacgccttactttatatgactgtctgaaatttaattagcatatcctataactaattatatctgttttgcagtttattcctactgtctgagatacataatcgaactgggatatttgtaaaaattacaaatattctttttatggtctctgcttaatatacattaaaaaagagtattcctcagaacactccctgttaaatctgcattaattaaatatccctgcttttgcaatacacgcataagcagggtattatatattatctatttttgtatgcttcaagtccgcccgctataagctgcgcgcctcttaccatatcctcgcacttcaggacataagctattctgagttcgtccttaccaagaccctctgtgccgtaaaaaccctgagccggggcaaacataacagtttcgttattatctctgtactctttaagcaggaacatcaggaaatcttcaatatcctccaccggaagcttgactgtcatatagaaggcacctcccggttttctgcatacagcgccgggtattttcataatttcctcatagacagcatctcttctgctttcatattcgcttctcacctcgtcataatatgacctgtcaagtctgtacagcgcagcagctcccacctgatctacagttgatgcgcatagcctgccctgcgccagcttcataagcccgctgtacagctttttgttttttgtaacggcgcagcctattctcgctccgcaggccgaaaatctctttgatacagagtctactatgacaactctgtctgcgtattcctcaaacattccgaatgacgttatttttctgccgtcgtatgcaaattccctgtacacctcatctgcaataacccacaaatcgttttcctttgctatatcaagaataagctttatctcctcctctgtgagaattgtgcctgtagggtttcccgggttaacacatactatggcctttgtcttatcggtaattctcttttcaattttttctctgtcggcatagtgatagccctcctctgcaacggttgtcacaggcaccacctttcctcccgcagaggttataaatgtgtggtagtttgtataaaatggctccggcataagcacctcatctcctgcattgagaatggccgtaaaaatcatgttaagagcctctgatccgcctgtggttataattatattatctctgccgtaattcatatcatacatactgaaataagcaattacagcatcctgaagctctgaagttccctgcgactgtgcataagctataacactgctgtcgtaatttctgattgcctccataaagcattcaggtgtcttaatatccggctgccctatattaagcttatatacctttgctccctgttctgccgcttcatctgcataaacattgaagcgtctgataggtgaaaactgcattgactgcactctttctgatagctgcataataaatactccttttctttgctcatatctccaatattaaacccccataccgatgtgggggtctaatactccataatctcttttgtcagaagattaaccggatggttattcttttgatttaaactctgtttctgcatcagccggagcttttttaacagctgcagccttcatagcagtttcttcagtatatccctctaccgcaccctgaagaaccgcatcattaagctttatgttctttttaaggtgtacatcaggctctgacggaatagcaaatttaggtataaatctatcccagcctgttaatgtaagtattagaagtgatgctattgcaatccatgcgaagaagttaaactttataagatctcccgcagtaaataccataagcggataaactgcgctgcacaaacctacataatagatattgcatacgtgccaaggaataagctcgcctgcaagtactcctatggcgtcgccgtacatcgcattacggcatcttaaatcatacatatcctcttcacttccctcaacactttcttcaagtatatccttagtgataggacccattgtagccatctgtgcctggtcatctgacagtagcatatttcctaaaatacacagcatcgcattccagaacataaggtgacgaaccttctttgatgctctgatacagaacatagccataggtctgaaagcgtccatttcacgcataatacctccaaaggctattatccacataaccataacaactatccagtttcctgcatccgcaaaagaatcatatatatgtccgaggaattcactgaatgaattcatagttccgatgcatgcacccattattgctgagcttataattcctgcaccaagacaaatcatagtaggaacctttaatattgcaagaccgattacaattactataggaatcatcatccaaagaggtatatttccgtctgatacctgattgagcaactcaattgccgcaggtctttctgcttcaagagcagtccacgcatcctgaggaatatttgtaattgcattggatacatcggcagctcctgtaggaagattcataatacagcttgccacaaagaaacatattgatgccgctataacacagaatattgaccagaaaccctgctttcgaaatctgtctattacctcgacctcctgtataccacaggtcattattgttgtatctgaaatcagggcaacattatcaccaaatgccgcaccaccggcgcaggcgcacattgtaagcacaggatctccgcctacaatatgacttgtccatatgaagataggaattgtcgcggcatatgttccccacgatgtaccggtacccattgaaagtatacaggtaactataaaagcaactactgcaatacttcttccgcttacgcctattttcagcgctgccatgattatgctggcgcctacaccggttgtcataaacagtgtcgcaacagcatatgccatcataaatatgaagaatattataatagcgttttttacgttagtcattgcactttcgataatatccattacctttctcctggtaacggcccagcataccagtaccgcataaaacagtgacagcggcgctgcaaccagtgtatcaaagcctgacataacgagagcgcagagcagagcaatcggcgatagcttaaatatcattataagtgcgtttttcattttaatctccttttctctcttaaatataacttatatggtttctatattaatgtacctgctgttagtcagatacatcagtgacggataacttacattaaactctataatatcctcaagctttatcttttcttcgcagtcctctatatcaagtattgcgtgatcgctgcttgctcctataagctctatgcctttcatcttaggaaagattttgtcgttaagcgcatagtcaagcttgccggttgcaagaagagctctttttcttattcccctgtcctcgtattcaggcattcgtccaaagccgtctataaagatttcacctacagggtgtgtcggcttgttcttaacctctatgacctctgccttgaaggtgaatacctcctgcgacagtctgctcatatcaagtccccatatttcctgaaggtcataggctaatattatgccctctcccattctcagatggtttatctttgcaggcattaccttgtccagtaccagaggatatgaactggtcgctcctcccgatactatttcaagctccctacctatcctttcttcaattctgcaggcaatgtcagcaagctcgttcatcttgtctacggtaggcttgatcgagccgtaacagccaaggtttgttcccacccccataagctttacatttttaagttcgttttcaatatatactgcagtctccacaagctcatccttgtcccaatagccttctcttaagtcaccaaggtctgccataagaattatgccgtgtgttctgtcgaatttctcacaggctctgtcgatagctctgatcacttcgatttcactgttaagactcatatcggcatatgccgcaacttcttctgcctccgacagcattggaattcttacaagcataaattctgcgtctattcccttttctctggcatctataatctgctccattctggaagtggcaagctggctgcagccggcctttacaaactgaagagcagcttcgtatatgccgttaaagccttttataactccggcaatacttattccctgcgagctgcagtcgtctgcaacagtctttatattgttataaagctttctggtatcgactgtaagcttgggatattgtgtccttctaacattattcatcttgtacctcctattatttctagaattatgctaaatatttttcagtcactggcgtatttttttcttaaataaatgatatacagaatactcttcacaaacaattgtctgacatttcaaaaagaacagcttcatattgtaacttttacaaaacacaggttcttatttttacccgtttaatgcgtatttttccccgaaaacaaatcaaaaacggatatttttcctgtcattttgtacagtttctccgtcatatttcatcacgctgaagcaatacgaaagtgtagtgttttgtctttttttgtgatatactttacagactggtgtataaattacaagattggagaactcaaaattggactggaattcaatacttttacttgtgctgtatctttctatggccgccatcggatatgcaatcggagcaaggcgcaggaaaaagggcgcttctttaaaaaggctctcgaagatacagtcagttgcaattatcgtacttgtttttgcaatgggctgcaggataggtatgaacaaagacgtaatcagatctcttgacaccataggaattaccgcatttatatttacaatactggttatggcaggtagtgtatttgctgtttttgctgtaagaaagcttatgggaataaacaggaaaggacttaaagcagatgactaaaaacatattgatatcagtcatactcggtatgaccttcagttatttttttatacctgagaatataaatgttaatgaactttcaatagatacaggctcacttctgggtaatataatcgtagcaggcctctgcctgcttctgctgtttgttggtatagacataggatatgagggaacagtaataaagaacctcaaaaaagtaggcgcaagagtgctggtatttccctttgcatcaattgcaggaagtcttttaatggcattcgtcgcctcattcatacttccgatgagctggaacgagtctctggctgtaggcgcggggcttggctggtacacactggcgccggcaatcataatgaaccactcgccgtttgtcggaaccgtatcgtttatacataaccttatgcgtgagcttttaggcatcattctgatgccactggtggcaaaaaaactgggttatcttgaagctatgtcgcttcccggctcggcgtcaatggatgtctgcctgcctatagtcgaaaaagttacaagcggggatattgttgtatactcatttattacaggagctgttatgagtatggccgtacctgtactggtgcccttattcatagccatttaagtttaggaggtgtttttttgataacagtttctgatttgcttttgcatcctctgttttcggaatttgaacttgtttctgataataccggactttccaatgttatatccggtacgggaatattcgaatgggaaactccggaaatcataaatgagacatttgatcccggtgaatttgtaataaccacccttgccaatatgcaggatcacccggaggcctccattgcaggaatcaacgcactcatagaaaaagatgtggctgctattgcagtaaagaagatacacaccaatatgcttgatgcggatatcatagagtatgcaaacagtcatcatatcgccatatttacattctcaggcactttctttgacgatataatttttactatcaaaagtctgctggcaacaggagatttaaatgatctgctcagagataaggtcaaagcgcttcttaacgaagcagaccctgaaatacagcagataatgatcaaacagcttaatccgtcctttgcagacaattgcatatgctgctgctgtattccaaaggcaaaaaaatccgcagcggctttagagaaattctggctgtcacacattaaatactacaaggagcagccttccgtccgcgtcatcagatgcaacaattgcatacttgttatctacacctcatcaaatacagtaactgatttaaacagcgggctttcgggctttctttctgagatatctctttcccctgaaagtttcagaagcggaataagcgagaccctgcccataaaaaatcttgcggctctgattgaggagtctgttcaggcagcctacagctctgtaatctgcaatgaggataaaaccgctttctctgaaataggtattatgcagataataatacctaatatgcacaccagatgggtttctaatttctataagacaataaataaaaaactcactgtatatgacaaaaatcacaatacaaatctgcacgagactttaataacctatatatacagtgagggagatgtgaagcttaccgcaaagcaactttatcagcacggcaacaccatcagatacaggctcgaaaaaatcaagactgttctgggcttaagcgacagctccgatatctatatacagctgtttgcctatgcaaagcttcacaagctttattcaatttttgacggtgaaaatctgatatagtatcatagcttcaccgggtattttctgtaaagtatccagcttatagctgcagtaataacttctgccgctatgaatgcataccagattccgtccattcccattatttttgaaagtatccacatgaacggaagcagcagtccaagctgtcttaatacatttatcagcaggctgaagcctactctcttggttgactgcatcagagatgccaccatagttgctatcgaggcaaacacatagcttatacaaatgattcgaagtgccggcacaccaaatgacatcattgcaggcgatgcgttgaatatggtaagcacctgtgactgaaacagccacagcactgctatactgacgcctgtaagtataatgcctatgatatt

SEQ ID NO: 1177 - DNA, 6864 bp, Unknown
  16S sequences of unknown bacteria
ccatagacaatacagtttcatcgcggaatgagcggtaattggtgaatttgaattcgataagcatattcattcctcctaaaggcttaaccgaagtacagcgtcgcagatgcttattattaagcccgtatatagtataccctcattttgcggtgaattcaattgaaattatgttaattttttattttttgaattggattctttggaatttatgtattccacgcagcaaacggaatttacacactctattaacttgcatttacttgtacgtcactaagttgcatatagtcagtccactttcagcgaatatgtttgacaaatctttttcaaatttattatctgagcgttgatctgataatttgattatgactactttctcttttgctcttgttactgcgacatagtgattatatattcctgattgttcaagaagttgatagtcacctgcaaaaataattacttgatcaaactccagacatttcgatgaatgaaacgttattgctatattctgataactatccgtatcaaatgcagcaacgtattttctatcactaactgttgaaaaaagtttttgcaaatgttcaggtcgagtttgatagccgagatagtcacaaagatcaattactgtcttacaaaaatcctcatacgattcaacttttgcaattgattcaagcctttttttgatctcaacaatactgctcttgttttcaacactttcagcagggatttccgaaatcaaatcatatactgagtatccttgcaaaatcctatactttgcaatatcagaatataaccaagccgtttctgttgttatatcggcgattggaatctgtggaatatacgtaaaagcactccccgttaagcttaattctgatgctccgcgttcggcatcagtttttttataacgatgcaatgccgtccgcttcttaggatcaatatatttgagtgcttcattgacccactcacgataagtagtgtttatccagataatattatcaagactttcggtcgaagagtaaagtccacgtgtctcatcgcaaagtaaattatctgacagtacaaatatctcgcgaatgagataaatgagcgcagactcccgctgaagaactcctattttataaacatggacgaatatcttgacgatttcaactgaccgatcccgaaggacgatccgctgagcttccacggaatcatggatcgtgtgctctacagccagatcgatcccgaactcaacatgcccgaatcgcagcggctcttccccgaaccgaagcgcgaggatgagctcgacgccctcatcgactcgttcggaaaggtcgactgctgcctgaccagcgtttgaatcaacggtcacctcgcgttcaacgagccgccgatccccgaggactggataaacgacaaggagttcggcgagatcggcacgcgccgcctcttcatctcgcgcgagaccatagtcaataacggcgctgacaagctccgcggcgcgctggacatcttcccctgccgctgcatcacgctcggaatgcggcagctgatgagagccgaggtcgtcaaggtctacctctactgtagctggcagtggggcatcatgcgcaagtgcctgctgaccaaaacgacccgcttcgcgcctgtgacctacctccagaaccacaaaaacgccgaggtcgccgtcacgcccgagctcttcaatttcatgctctgaccctgtttttttacatcatccgcttgaacttttccggaatccatgctataatttaggaaacgctgatttaagattgttttcacgctgaaaataaccttaaccggaaaggagaagcctatgctccgctcgatctacgcgatgaatctcgcctcggtcgcgctcgtcatgttcactctgcaaataatctggagctgcgccggcgcgaaatgccacagactgtggaaaaccgtaaacgcgctgctcgcggtttttgcggtcgcggcgatactctacacaacggtattcacacgctcgcccggagagcatgaggtcaagctgcgcccattcgccgcgctcatcgccgctaagaagcagcctgagctctaccgcgcgatgttcatgaatatctttctgttctttccgttcggactgagtttttcgtcggcgctgcccggaaagcgggtcggggcgcgggtgatcgtcacggcgctcgccggatttctgctcagcgcggcgatcgagtacgcgcagttcaggtacgggctcggagtcgccgaagccgacgatgtaatctgcaacacactcggcgcgctcgtcggaagtctatcgctgatcggcgcaaaacggcttgagtgagatgaaaaagttcaggacaaaaattttgaagatcgactcgcccggcgggaaaatgagactgctcgtgctgagcccggactatgctgacgtctcgcccagtcccggcgtactctggattcacggcggcgggtacttcaccggaatgcccggaatggcgtacttttcaagggtgcgcgacctcgtcgaaaagcacggcgcggtcgtcgtctcgctcgactaccggctggcgttcagagcgccttaccctgcggcgctttacgactgccacacgacgctcgtctggctgagagaccactcaaaggagctcggaatcaggtcggatcagctgattgtcggcggagagagcgctggcggagggctcgccgcggcgctctgcatgtatgaaaaggataccggcggagttaaagtcgccttccagctgccactctattcgatgctcgacaatgaggagaccgagtcgtcgcgcgacaaccacgcgccggtctggaacacaaggcggaatcatttcggttggaaggtctaccttcgcgggctgcgcggcgaagttccatgctacgccgcggcggcgagacggaaggactattcggacctcccgcctacacattcgtttcgacaaatgagccgttctattcagagacggtgacgtttatagagaatctgcgcaaagccgaagtcccggcggagatcgacgtctacccagggctattccatgcgttcgatatgctgaagccgtcgctcgaagtgagcaaggacgcggcgtggagattcaatgaatgggtgggagcggcgcttgagaggtatttcgcgaagcaggaataaacaaaggggagactcataaaagtctcccctttttcagataacaacagtcaccgcgttgacgagtgcttcaactgccagccgcacgcggttgatttattatccaaccgaaatatcaacgcgaccgtttatatcctcaagcccctcaagccgcattctgctgactcctgcgggaagtcttggcgagtaggaaagcgctccgccctcccagcggcagccgaacagaccgtagactataagcgcgagaaacgccgacgccgtccaggactgcctcctgcacgacttccattcgcgtatcctgccgtccggcgcgtcctcctgcaatccgccgtaaacctcgccggtctcaccgtgccagatctcgtagaactgcccgtcgcggcaggcttttttcgccataagcatcagattctcgtcgaacgcggcacactttttgtatttgtcgagcgcaagtccccagaagccctggatgaagccccagaccgtgccgctgtgccgtccgattccgccgagcttcgtgtagcgctcaaacgacggatagacgcaggcgatgccgttcggcgtcagcttcgcgttcgagatgaccctctccgcgcggtcgccggcgatgcccgagaacaacgcgaaggagattccaagcccctcctgataattgcactcgtgcgcgagatagtcatagctcgcttttgattcgttccagaaatggcggttgattgcctccttgagtctgtcggctctgtcgccgtaaagcggttcaccgtaaagcggttcgccgcaaagcccacaagcggcgcggtacgccatatagaacatgcagttggtcgaaagcgagtacatgacctccttgcagccgtttattcccgagtttcctgtgcggaatctgtcgggataagccgctatgccgtcaccgtaaaccgccggacctctgaacagtccggtcttatcgtcgaactcggtcttttcataaaaatcgagcgtattcctcgcgacctcgcgcgcgagcgggagaaaactcagatcattcgtcgttttcaggtactggtaagcgccgagtatccagatcgccgcgtcccagtcctgtccccagccggatactaccgccgcgccgtttctttcgacgcagagcgacatcagcgaattcctcgcgacctccgggcagagccacgctgaggtaaagcaggtgtttatcgccgtatcgcgcgtccagggggtcgggtagtcgagtccggcgcagagacatggcataggcttttcgagcagcccagccttgtaaagcctgatgtttccgacaagatcgccgacagctatccgccaggcgagattaagctccttcgagtcggattcgaagagcggaagttttatctccataaagtgctccttaaataaattccgttaatattataccaccgcgccgccctgatgtcaattgctcttatcggtcgaaaaattccacttttcagtcgcgctattgacaaacagccttcattatgatataatggtttcaggaaggagagatgtcatggaggaaaagaatttcatgagctggtacagacccgacggcgtcgccatagatttcgccgtctatgaaaaaaagcccgggtacagtagttccgtgccgctccactgccacgattacttcgagatcgagttcgtaataagcggcgtcatgaaaaacacggtcaacggctctaaacagcgcatggagcgcggcgatctgttcattctttcggtcgccgactcgcacaaaatcgacattgagagcgggaattgcctcatctacaagctcaatttccgcccggacgccttcccgcccgatatgcgcgggctgctcgcgtcaacgcctctcccgcttgtccagcactataacggctcggaattcgacgcgatgctgtctgattttgaaaggttctcgcgcgctgacgccgactccgacaatgggactttgtcaaatgtagcactgagaatcgccgccgaggcgatcctctgccgagcgctcagccgggttccggcgtccgagaccctcccgcgtcttcccgaggcggtgcgcgaggaaatcagatacatccgcgagaatctctccgagccgttcagcctctctgacctcgccgcgaaggtctgtctctcgcccgatcatttcagccatcttttccggaagtacacgtcgatctcgccgagagccttccttcgcgagtgccggatgcagtcggcgcatgagctgctcacaagcaccgagctcccggtcgccgagattgccgcgagggtcggctacatctcgccgtcgctcttctaccggcacataagcgagacctacgcgaaaaaaccgctcgacatccgccacgcccggaactgaaattctccccgccggaatcccgacagggagatttttttgcaaactaccaactttacccgatattctccatgagcgtgtcgatcgcggtcagcgcggaatccttcagagacgcgtacttcgacgcgtaggtgttctcgcccgacttcgcctgctcgattatcgccgagtaaagcccgccccagttgaagaactgcccgatgtcataggtcagcgacgacatgattatgtcaggcattccgatcgactcctcatcgcggctctgcttgcgtttcatcgagacgtcgacgaacgccggggtcagcgtgttcttcgactcagccgcgagcgcctcgaggacgaacgccgagtcgtccggcgacttcgcgcacttggggacggcgaccgccgacgagaagttgaagttcaccggcgtgtagtacttatactgcgactcgtcgagcttcgggagcggcaggatgccgtaatttgcctccatgtcacggtaagagccggtgatgtagttcagatagcttattatcatcgcgcttccgttcgacttgaacttgtttatcaggaactcgacccagtagttgtcgacgtgcgagtaatcctcgacggtcaggacattgtgcttgtcgttgaagagcgtcagagctttgtcgagcccgtccgaaatccgttcgctgtaggcggtgagctttatcccaccattctcatcgtgcccggctatcttctcgccgaagcccgcgatcagattgtaggaacagctgtactcggtgatcagcccgaaacggtcgttttcgtccatcacgccgtcgccgttcaggtcggctgacatatcctgcgcgattctgtacatcgcgtcaatcgtccatttgccctcgtcgaccagcttgtatggatacccgatcttcgcgtcgtcgaagagctccttgttgaagtaaactatccaggactgcgagtcgtcaaggattattatgtctccggtgcagaagaagagcttgccgtctatcgtcaggctgtcgaccgcgccatcgtcccaccaggtttttgaggtgtctatgtacttaagcgagttcaggtcgtggagatagcccgacgtcgccgctccggcgagctcaacgcgctttggcggcgcggcgatgaaatcatacgtgtcgtcgcccgcgattatcgccttggcgatctcctcggagggcttcagcgaaccgtactcggcgatttccagcttgtatttctcctcgacatagcggttgcggtgatagaccgtgtcgtttatcgggtcgccggtctcgccctcggcgaagatgtcgtagttgcagttcatcacataacgctcatcgggggtctggtagtcgacaaacgtaaagttcgtccgccgaaatccatgtcgggaagctcgggcgtg

SEQ ID NO: 1178 - DNA, 1509 bp, Unknown
  16S sequences of unknown bacteria
atgttatagagggaattgaccagcatggataacaccataggcagggacatggataaaatcagcggtaataccggcttttctttcatgaaagtatcgttcatcatttttcttccctggaacacgttatgagatatttttgcggcgatgccatgccattatcacaagagcaacgagcaaagtggcagtttcagcaaccggaaatgcaagccagatcccgttcagatggaacaatttgtccagacaccatagggatggaacaaggaaaaacatctgtctgcataattggattgccatgctggagccaactttttctgtggcctgaaaataggtggaaatcatggtagagaggccgcagaacagatagcttgccgccataatccgcatagcggagattccaaaggagcgcatggcttccgacgccgtgaacaatcccaaaatctgcgccggaaagaggatgacagccaacgttcccagtatcatcatgccagtgaccaaagcggttccgtaccggaaagcggaatgcagcctttcgcggttccccgcaccgtagttaaaccgcataactggtaaacaaccctggatcaagccgtttaccgtcataacgatcagctgctgcaccttaaaatatgcaccgaagaaagcgatcgccgtatcggaatacgccaccagaaacagattgacgaaggtcaccataaacgaactgagggcgttcataataaaagatggcaggccaaaggcaaaaatacggcggatcatctgcttttgcaaatgaaagcctttgatttttacctgcactttctgctttttgcccagcagtaaagcaaatgccaaaatcatggacagcagatagcccgcaacggtagctaccgcagcgccgcggattcccatagccgggaaaatgccaataccaaaaatcaggattgggtcgaacacaaaattaacggccacgcccgcgatctggaaccacatgggagcaaccatgttcccggtggcttgtatcatcttctggatggcgatatgcaccatattgggaatttgcatgaacgaacatacgcccatataggcgatgctcagctgataaatttcttcattattggtaaacgtccgaaaatagggtttcataatcagcaaggacagaaggttgagcaaagcacctattccaaaggccagtaacaatccgtgtgtgacggtggtatttgcttcatcctgctttttctgtccaagataccccgcaatcaacacattcacgccgacaccaatccagatagacgccgcattcatcagtgttgtaatcgggaatgacagagaaacagccgtcagcgcattctcactcagccgcgctacaaaagcactatctatcaggttataggaatattgcagaaacatggaaatcagcggcggtatcgacatttgccaaatgagctttccaacgggcgcaactgccattttattactggtctgcatactttccctcctctccacaaagcgtccggcgcaaaaaattgcgcc

SEQ ID NO: 1179 - DNA, 6131 bp, Unknown
  16S sequences of unknown bacteria
actggttaccgatcagaattgggcctatctgaaagaaaacatggacttttccgaggagttcgtccgcgagtatcagccggggattgtgaatttcctgctccggggcggcagctcgatggtccgcccgctgtataacgaattgcagtataggaacgaaagcgaaaaaaactgcgaggcgctccggcgtattgtacaggcagagctgatgggccagttctataaactgaaatactttgctggtgatttgaagcaggaaatccattacccaattcaagaggcgcgggaagatgtctggaaacagaatctctctttgaccagaccgggccttatggcgaaagaggtggatgatttttaccacacaatccgcatgggcgagcttccgcactttacctgcttatcctgctaccggggcagccagagggactgccttttggccgcattcgatagcaacaaaaaaatcattctggtttacaaagacgagagcgtagtagcacgggcgtgtctccggctgacgaaaggctctttccagcagccatcaacgctcaattttgaatttgctgatctgtccaaagaagatgttcccacaggcagtcacgcatacagtgagaagctggtgctgtttctggaacacatttatacctctggattgaaggaaagtaaagagacggcggcaaaagaaatggtagtggcactggcaacgcagaaagcggaagaactcgacgcggttgcggtgctgtcaaatcagtatcgcggatgctatcccagtgggcggtatgtcagcgccccaatctatatctacatctcaaagtccaaaaatgggcgccaatatcttgactctctgggaggcgctgcagtgactttggcagaggaacagtataagcaagaatcgtttttggtagaacgggccgcactggaccgagcccatgcggcatgataggaggtttctttatgatgtttgacagcgttttggtaaaagtatcctgtagtgaagaactgctgtatctccacaccatatcccggaggcataaatccccgtaccgctttgcaatcctgcgtgatacgctggagcagttggagcgggagccggggcgtcagatcatcgtggctgactgcggctgctatgccgcccttcggctcacacgggcgctggacggcgagatgctggtgatccgcttttcctggctgcaaagcgccggtgcggacagcctgcgcggctatgaggagtgggtgcggctgccctaccgccgcttccacgagtgtgtggaggccgggacggatatggccggatggaactggagccagctctccgtgccggagaaggtgacccgccgctttgaatttcacagcaggcagaatctccatcaaatcgcccagcggccgctcctgcggcacaaactggggaaaactctggaacaccatttccagtggcgggatgcggagaaaatcctcatttatgatgacggtgcgccgtacagcttcttctttgaagaggtcacgccccggggcacgggaatctgcggcggcatcatcctgcatggcgcggataacctgcagaaagcccagtacagcgtccacacctaattataacagggaggtacataccatgacgatcattaaaataaatggcggcttctggggatgggagccaatagagacgctggagcggctttatctgctgtttgagcagtacacattggacccgatctatgagtggtatggaaatttcgtaaatcggaagccggagtggcagcggtcagaagagcgtcaggcgtatcagggctgcacggtaatttcggggcggtttctgcattatgggaactttttctatatcgtcaccgatgaggaagaactgatccagcgttttgagcgcctggtggcggacaacaaggccacacaggcataccaggacgagaggaaagtctgcttcccgtgcagcgagtgcaaccagtggtcggctgccagcgggctctgcggactgactggccgttatagacaaccccagtgggagtgctttgcgcgatatgttctgccgaaggggaaagtcgaaggtgacggcgcaaatatgcgcattgaacttccgatcccggaaaaggcaggaaagaaagcggtgcttatcggccgcggccaatgggaggcttaacaatggattggagcaaagtccacaggaaactcgctggccgcttcaggcttctggagcgtcgaaatgaggatggagattgtgtgatccactgtttcggctctttgggccaaacgggagtgaataacgatgatgttcgctatatatgcggcttctatggtcttccctatagagaggactggcgcagagaagaagcccgcgatgccggcgacagtttttatctcctgatgaagacggatgactgaaaaagtgctttgtctgcccttatcaaaagcatagggcagaatccgtgtaaattcataacagggccgggcggaggaattttcctccgcccggcccttctttttggcagacatggcctgtgtcaaatcaagcggaatcattttacggtattttataatcggacggccgtatgcccttttggtctcaattttctattatacttcgacctcatcttcttgtgttttgatatgctgtgtggtactcttttaccatacgcacatcttatttatgcacaaaggaaaggtgatcttaaaatggcagaagccgagaacaagcgtcagcgccgtaccccgcaagagagagcgaatgaactggatgaaaaaatcacgaaaataaatcagtccatcaatgagctggaggagaaaaagaaaactgttgtagaagagtacgatgcgaagatcaccgcagcaaaggaacgcatcaaatctctggaggcaaaaaagcaggagatccttgctcccaaggctccccgaaagccccgtaagacgaaaaagcagaaaattcaagagattgtgaagctggcaatgaaaaacgggatgtccgtagaggaaatcgcaggacaactccatatagaggtcgaaaactaataaagtaacgccgtcataaagttaatttgtggcggcgttgctttattacttgttgtttacagatgcaaaatcaatgccgtgcttcttccatgcacataccacaccgctatagtcacttccctttttctttacaaagggaacaataccatattgaagtatgaaaaagtgttttaaaagttgtatcgttggtttcttttgatttagtaagccttcatagaaattttttgtttcttttgagatatattcttgtaatcttctgctttctaaaggattatgagaaaaagaattttttataaccaatgagcctgtaataactgcaccagaatatgataaaaacttgtttagtattttagaagcatctttgcctccataattttcatatgtaacaacactcattgcatattttttataaagtgattgctccattacaaaatgcccacgatcaataatcgtttttaattgccctgaaatattacttgcataggtaggtgaaccaataataattccgtcagcattttctatcttatgagatagattttctatatcatcagtaaaaatacattttcctgtcttatagcatttacagcatccaagacaatattgcaaattcaaatccgcagtctggacaatttcggtctctaaattttgtttttctaacattgcagaaatatattttaagattgatgatgttgcaccattttttctgggacttccgtttattaaaatgaccatatcgctccccctaaaagtctttacattataattatataggtatatagtattattgaaaagtaagcacttttttgtgtgatactcaccaaaaggatagtaaagggaaagatgaaaaaagacagttgttaccttcaaaaatttgggtatgaacgatttgaacatgctgtggaaatgataggcggcaaatggaaattgcgaatcgtttatatgcttgcaatgcatgatgtgttacgatatggggaattgaagaaactgctgactccaatcacccataaagtgttgacaactcaacttaaagaattggaaaaggatggactaatcaaccgcaaggagtatcagcaaataccactcagagttgagtattctttaactgatatgggaaaagacttggagccgttggtacaaaaaatgtaccagtggatactcaaatataatctttaacagcaaaaggaggtgcagccgtaacggtttgaaaaattattgagcagagtccgccaagtgggaaaattgtatagtgatatgatcattacagtttatagatatggacactgatttgaaagcacaggaagggcatggctccaaaaaatattttggagccatgcccttcctttttgttctggcaagagatatgtttgtgaatttgagagccgctttgttgaaaaaggcgtcatccaggcgtaaaggatatgtataaagcaaaaaaggaggcaattatctatgttaattggtgtcgatcatggcaacaaacaaatcaaaaccgttcataacgagccttttgtgtctggactgcagcagagcctgacccggccgttcggccagagcctgcaatactgtggtacttattacacactgtctaatgagcgtattccgttccacaaggataagacggaggatgaccgattttttgtccttacactgattgctattgcagaagagataaccgcccggggaattggtgaaaaagaacagcagcacatccagttggctgttggtctgcccccggcacattttggctctcaagcagagaaattcaccgcctattttcaaggccgcgggcttgttgagtttatgtatggagacaaacactacaccatcagcattgaggatgtggcctgctatccccaggcatacgcagctgcggccacaatgctgcacgccctgctggatgacccaaaggcagtcgtattggatattggaggctttacagcggattatctgttgctgaaaaacggaaaagccgacctcgcttcctgcgattcgctggaaaacggcgttatcctgttatacaataagatcaggtccagaggaaatgcagagttggatttgctgttggatgagggcgatgtggatgccatcctcatgggcagacggacacagtatccggccgaggctatacagcttgtggagcgactggcgcaggagtttgtcaacgacttgttcagcactttacgagagcggatgttggatttgcgctattgcaaagtggtgtttgtgggcggcggcgctattctgctgcgccggcagatcgaggattccggcaaggtggggacgcctctgttcgtcacgaacatcaacgccaatgcagctggatttgaatacctgtaccggcttgaaacagtgggcaggtgacaatcatgacggccaaaaaagaaagggggcgcttctccctgcggttcaatatcggtgacccagtgcagcgggccgcagttgaactgctggaactacaaccgccccacagtaaagcccagtatattgcaaatgcgcttgtgtactataacactcatttttctgacgatccgcagccgttaaaagtgccagccattgaccgtgcggccattgaagcgatagtgcgagaaattatgcgtcaggatgagcaggcttcggataaggcagtttcgaccggggaatcctctcctccaaagaaaaataaaatagccccgccgccgcaggaacagacggcagagccatcagagatcttaacaacggatggagcatccgaagttgatgatatgactcgcaatctgatcgccagcaccatggcggctttccgtaggaatggctaaaaaagaggtatgggagcgaagctgtgccgactctcatacctcttccttttcctgtatggcagcaataaagttgtcgataatctgttccaagtggcggtattggctgggtgtcaatgtggaaatcttctgctggagcaacgaagtatctgcttcaagaattttaccacgcagtaaatagtctgcgctgatgccaagtgcctcacagatctttagcatagtttccgggcgcatcgctttttgacccatttctgcatacgagatggtctgcgatgtaagatgcgtcaaatttgccaaagcctcctgctgtctcttatacacatctccgagccg

SEQ ID NO: 1180 - DNA, 7093 bp, Unknown
  16S sequences of unknown bacteria
cagtttcatcagcacaagttataacaaaagccgaataaaaacaagcgttccagccttcaacaggaagattatttttatccggcttttccaccagaaagtttttcttttttatatgaaatagtgttatttactgccagcagatccaccgcatttatttttattcagcaggtgcaaaatctgccgggccgtttgctgaacattcaagttcgaagtttcgattttcaccgttttcatcttctcatataatggcagacgctgcacacttcgatcaatcacatccgcctgccgcaggcccgctgtcacatccctctctaggcgttgacgaagcgcccgttctgataccatcagtgtaaaacgttccacttggacattccgcaggtctaaacggtgcaaaatctcctctgcaatggaatcttgctacattacccaacaaaaaagcactgtttcataggcactgcatcgcagaaactgtcccaacacaaaactgatattttccaataccattcgtttggtctcatccgttacctgaaacggatgcatctcccagcaccaatccccatttaaaaaggcgcagggagccagctctctttccaattcctggcagaccgcggttttacccgcccccattgtcccatttatcaaaatcaagcgtttcaaaaaaatcctcccatttctatatatcgcacaatccaaaaaagctttgccaaataaagcagagcctttcgccatccccaaaaatatctgcacaaattccatgttcttccccttggattaatatcgccccgtctgtgcccggacggtatactgtctaaacaattcctgaacccgctgctcatccaattctgtgattggaactggaggatggggatgtgctggaaacggggcaatctgcttttgaaaccattgcacgtcgtgccattctcccagcttatatcctgctttttcccagaatgcagccgaagaaaatcccattgcttgatgcaaggcttcgctaccgggattgggatgggtcacgataccgactgcccggcaatatccctgcatcgttaaaagatccagcaaacagccatataataagcggccaatcccttttcctctggcctcttcatacagataaatcgccaaatccgcattccattggtaagcctccctggtattttgcggagacccataagcataacctatcaccgttttcccaatctgcgccacaatccacgggaatgcgggcgtatagcattccatacgtcgggcaaattctgcctcttccggcggtatatactcaaaggttatactggttttttccacatacggacgataaatctcggcacaggatgctgcatcctccaatacagcatgacgaaaatatagcgacataaatatatcctcctttttggctattgcacaacaaaaggcgccgcggtatttccgcggcgcctttgctaatctaatgaaaagtatagcatttttttaatgtttgtcaagccattagccaccacaccaaaatgcttttcactcttcgtttttaccaataatgctcctgttgtctatcttctgcgacatccatatgcccgattaacatttcgatcagtaccacacatctagcggcagttcaccacaaaaactctgacaaatgcctctctttcatcaatcttcttttccatcagcttttttccataccatttgatactctgcttcgccagtatccggatccatttcttctttgattatcgaaaatccttcccgttgataaaacagaaaagcccgccggttcttgcagtaaacctgcagcgtgagggatggaaagcgccgttttgcctcttgcaatatggctgttccaatccccttggagcggaactgcgtgctgacaaaaataccttcaatatttcttccctcaatgccggcaaaaccctgaacctccccgtcctgctcccagacaagcacttgggactgtggcagcaaacagcgaacaaaatcataatttttctcccaataggaacggtcaataaaatcgtgagcctgcaaattggactgcaaccaaattttcaatatgtgttccagatctgaaggttgataatcccgtaccatttgcctttcctttcttgtctgttttccattttatcaaaaagggcaccggtaaaccggtaccctttcaatctttcgatctgccttagatggcacgggtgtattctttcagccactcccgttcttcatccgtcaaataatcgaacaacttcccgtacaccatcgcatgataatcattcagggtctggcgttctttttcggtcatatatttcggatccacaccgtccagatcaattggcgcataagtgaccggttcaaaatacataaactgcccatcaccgttctttatacctttgcggcagatcagctcgttctcagtgcgaataccgtggcttccttcaatataaatacctggttcatcggtggtaaccattccctcttcgaatacagcgctatcccgcctttccgccacaatcttccagcggaaaccattgggagcctcgtgcacgttgagcagatatccgatgccgtggccggtaccgcatttataatccagatgcaaatcccaaatgggaccgcgagccaaaatatccagattcattccgatacagccatacagaaactgtgcattcgccagattcagattgctgcgcagaacagtagtaaaatgcagcttctgctcttccgtaatcggtcccagcaccatggtgcgggtaatatcagtagtgccctcataatactgaccgccagaatccaccaaaagcatcccctccggttttagcgccgcattggattcctccgtggcagaataatgcatcatcgccgcattggctttataggcggaaatcgtgccaaagctgggttcgataaagccctcctgctcagcccggcgggccagcagataatctgacgcactaatctctgtcatgggaatcttccccacgttagtcttcagccagtacatgaattttgtgaaagcaacgccgtctttaatatgagcacggcggatgttttccagttccaccggatttttgattgctttggataactgggtagggtttgctttctccactttttttccgcagatagaagaagcaatctcataattaaccttctccggatccaaaagcaccacatcatcggcagacagatttttcacaaaggaaatcatttcgtcatagccatggatttcaactccatcggcggacaatttttcccggatttcatcgttcaagcaggcagggttgacaaaaaagtgtgcctgatccagcccgatcaccgcataggataaaacgaccggattgcattccacgtcattgccgcggatattaaacaaccaagcaatgtcatccagggtagtaataatatgaaccgtgcagccattttccttcatttgattccgcaaatcagtcagcttttgcagcgtggattttcccgtatacttttcatccaataaaaatgccggttcagcggacaaggccgggcgatcctcccagatcattcccaccagatcttcaccggtagagagaaccgcttttttatccgccagcctttcggtcaatgcacggcctaacgccgcggtcatcaccctaccgtcaaaccccagctttcccttcgcaggaacaacgttatacaagtaatcctcaatcgccggagtaccttcctcccccattttcatcagcgtaactgttgtatcttttagctgattcgcggcctgaatgaaataacggccgtcagtccacaggcaagcttctttcgcagtaaccaccaacgtaccggcagaaccggtgaatccggacatgtattttcttgctttaaaataatcacccacatactctgattcatgaaaatcagaggtcggaacaatataagcatctataccgcgctgtgccatcaagccacgcagtttttccaatctttggggtatcatcaaaatcctccttgtccttctttttgattttatcatagcacaaccacattttaaataccagcagattttagaaatattttgtatttcccccttttgtctaacagcttttccctgcggtgagaatcacccccaaaagcacaatgcctggatatccgactcattcaaaacgactggctggatatttctatataaaagcaaagtcaaattgcttttcccgttttttgtaccatactctgtcataacaaaaggtcaatcaaaatcaccacatggttttctgtataaaagatttgaggcaggcattttgcctgtctcaaatctttaaaatggccgtttaaaaccaatctttgcacaaatttcagccgtcgtttaggccagtccgtgttttctggaaagattgattgctttttttaactccggcaccaaaatagccgcagaaataattttcactgcatcgccgggtaaaaacggaatcacgcaggtactcaacgctgcagccaatcctttgccagtaagcaggacaaaccagattgtcccaaacaaataacacaaagccaaaccaccggtcataccaatcgccatcttccaaaacgcatctccccaataggtcgacaccataccgactaccagtgccgcaaaaaggtatcctaaaatatatccgccggtgggacctgccaaaacggacaatccaccacggaaattagagaacaccggaagccccactgcccccatcatcacataaacaaccatgctgactgcgcctttatagctgcccagcaatccaccggccaaatacaccgaaaacaaagccaagttaattggaatttcgccaatgggaatgccgatttgggaaagaataccagtcatcgcagccaacagcgcacacagtaccatgtctttcaccgtgaattttttcgtcatgtccgcaatactccaatctgttttgaattccccggtttttatagtttaaaaaaaaccggaatcaaaacaattatatcaatactactttagaaatgcaattcttttccgatttttttgcggttgactttccttttcatccgggataacataatcataaagaaacattcgtttcttaccctcttcacgatctatcctagaaaaaagattttctcactgcaaaaggagattttgccatggcgaccctgtctacgaatatccaatacctgaagggcgttggggaaaaacgtgcgcggctttatgcgcggcttggcattgctacaatcggggatctgctggagcattacccgcgggattatattgacttttcccaccccagttccatcatcagcgctccttatgatgaaccttgcgccattcgggcccgggtcgcagccaagtcagcagagcagcgcattcggaaagggctttccttgttcaaggtattagttaccgatgggcgaaacgatctgatgattactttttttaacgccaaatacgcggtagcatcgctcaaagaagaagagacctatttgttctacggccgtgtttccggacggatcggcagacgggaaatggcctcccctctggtattcccagatgatcccgcactagctctttcccccgtttatccactaaccgaagggctttcctccaaaatgatcgccgccaatgtccggcaggcgctggtattggctgaagatctcgatcaggatctgctccccgctaccgtccgggaagaaaacaatctttgcaggcggcgggaagcgttagaagccatccattttcccccgaatgaaaaggcattggccagagctcggcggcggttgatgtttgaagagctttttcatttaaatctggctttggggcaggtcaaacgcgcttctcaaaaagaagcggcagccccaatggaatcggttgacatgggcggttttttttcgcttttcccatttgatctcaccggtgcccagcagcgagccatcgacgactgcctaaaagatctgtgccgaaccgttcccatgaaccgcctgcttcaaggagatgttggctcgggcaaaacgatggtagctgctgcctgtgcttatttcgctgccagaaacggttatcagaccgcaatgatggcccctactgaaattctggcagttcagcactatcagacctggtcaaaactttttgcgggaactggaatttctgtcgggttgctgacctcctctatgggggcaaacgcgaaaaggcagatcaaagagcagttggccggcggccagctctccatcgtagttggtacccacgcccttttgcaagacagcgtggccttttcccggctggggctggcaattaccgatgaacaacaccgattcggcgtatcgcagcggatggctctggcccaaaaggcagaaaaagggcgatatccccatgttctggttatgtccgctacgcccattccccgaacactggctttcattatttatggcgatttggatctatccattctggatgaaatgcccaaaggccgcctgccagtcaaaacttacctgatcgatcctccaaaacgggaacgggcctatggctttattcgcaagcatctggacgcaggcgaacaggcatatgttgtctgtccgctggtagaacaaggagaaaattctcctgaggggctggaatcagcggtggaagaatcagaacgcctggcccgagactttttttccggatataaggtggggatgctccacggtcgaatgaaagcagcagaaaaagaacagattatgaaggatttccaaagcggggaactgcagcttttggtgtccactaccgttattgaggtaggagtggatgtacccaacgccaccgtaatgctcattcaaaacgcggagcggttcggcctttcccaactgcatcagctgcgcggacgggtgggacgaggcggcacagaatccttctgcattctggtttctgcccaaatggattctcctcgcctgcgcgccatctgtcaaacaaatgatggctttcggatagcggaagaagatttaaagctgagaggccccggagactttttcggtctgaggcaacatggcctgccgatgatgaaaatcgccggacttttggaaaatatgacactggtggatcaaacgcgtgcagccgcattgtcaattttaaaaacagacccggatcttcttttgccggaacatgctg

SEQ ID NO: 1181 - DNA, 4487 bp, Unknown
  16S sequences of unknown bacteria
ccgcaacccgctttttccgcgaccgttacttttacagtaaaatccgtacctttgtaggtgattttgacgctttgttcgcccgctgtcttggcgtcgtatccgctgatcgtaaactcggtggtcgccgcagttacagcctcgtcggctttgccgctcgcaaactttttgacgactttgatactcgaaagatcaaattcttcgccataggcatattctgtcttttcgacgctcaaatccaaagtttctttatcgagtacttcaacttcaaaactcgtttgtatctgctggttcaaaactgctttggaaacagttaccgtctgctttccgaccgtgttcttatcaaagccggatacggtcagatccgcaagcgtcaaagtctcgctcgtgccgtccatataattgagtttgaaactgccgcccgccaattcattgccgtattccacgtctgtcggcgcagtttccattgttatgcccgtcgcgtatttggctagctgagcccctttaatataatatttcattccgctgataaccgtttcgccatttgaacgatccccgaaagaaaagacaggggtgtaactctcaggcaacaactcttgatctgtacattccgcagcaatttccccgttcacgagtacttgcatactcacttttttaccggtatattcgatttttaccgtataggaaccacccgattcaatcgtcttgatctcgccattgaaaggaaactcccccagcactgtttccgcgtaattcccgacttcatccgcacgttgaaaaaaatacgtagtcgtactgccgcctacaaagtttgcgcgtacatgatattcgtatgtatcgattccgtttttggcaaataccaaataaggaaccgtccaaactcctaacactgccggcgctatggtcgcttccatgacaaacgtcagttcgttcatgttcttttccgtaccgtccgccaacttgatctttccgtcggtaatataatccataaaggtagatgcatacactcgggaatcatcgccgtaaagcatcacttctccggtatcagcatcgtaaaaatttttaccgaaatcggttcctgcaaaatcgagcagattttgcggtgcggcttcgctttcttccgctacagcgggaaacgccgcaaagcaggcggcggacaaagccaaggtcaacataagaatcagtattttttcatcttttcttcctcctataaatttagatgaatttattccagatcgtaagcgctgcgaatgccgcgagacagagcacaaaagtcaaaaccgcagagcgtttgaaacgaaaagtgcctttcgcgggctgaaagcgcaccgatcggaacagccaataaagtaccgccgcgaaaatgagcgccgcggctgcgctgaaaagtccgtacagtacagatgtttctatggatacagccgcatacgtcgaaagcggcagtatccaataggatggaacgatcgtctgtaagccttcgaaaacaaaggcgaagataaagcaaaatcgcattcttttcgtgccgcaaaaaatcgcagcactaccgacgccgagtataaacaggcgaattgcaataagcaaatcgtaactgacgaacgcagacaagagcgatgcaaatgcaattccccatatcgtgcgaccgtatgcctttcttcccaaatagcgaaatgcgtattcgcgaaggccggcggcaaacacagcgtttacaacgagcgacaaaaacaactgccacagtgagggacgcgggggtatatacagcgaaagtccgcccgtcgccgccgctcggaaaccttctgccgcataaattgaatacgtataaaacagccaggcagtaagcgctgtcagcgccaccaacacaatatcacgttttcgtgcctttggaggcgtataggcagaacgggcgaatgcttgcgaatatttcttttcatgtagtttcagaaacaacacaggtacgccgaacaccaaaaacggctgaaacaaatagagcaaaacgatagataccattgaggatgcaaaccgtgaaataagcaatgaatcaaaaaatccgacaagaatcatgtaaaagaccgctatattgaacgcaggtctgcgcacgcgcaagtttatgtcaaacagtcgttccactcgataagcccctcaaataatttttaatttccgcacgtcccaaagcggcaaaataggtcgctttattatttacggaaacgcgcatctcttctctccccgtgcgaaaaaccacgagcggtttaaattcgctgaacggtattgaccgaaaggcatcgtttccctcaaacgtacagtgtaaaattacggaatcccctttggcaagccgcacgccgtctccaatttggaaatagcgattttcattgtcataataaccgaattccgcacgaatgccttccaacgaaaaatcaagcccggtaacagtcacactgccgtctcccgcattcgttacttttacattgtaactttgcagttcctcggcgctcgccgtagcacccgcaaacgtcaaagcactattacaatctccaatggatacggtaactcttcctatcgggaaaatattgttcttctctgttccccgcataacggcgtaagtaaacacagtctcgtctttcggcaaattatttctgtccagcacgcacacgagacgataactcgtaaagtacacatccgaaaaaataacttgaatacttgcatcctttaatgaataatctttaccgttttcgtccctcaaaagaatatcctcgtattcaaggaatctttctccccccttgacttcgtagacctgcaaagtaaaatatggattataagcactgtccgtccacgcagtataatgttcatgccgcgcaaaatacacgcccgcaggcggaaaagagttcttttccgccgcaaacacgcatatcccgctcgtcacgaatatgactgcagccaaaatcaaagcgcccgtgacaagaatgttttttttcatatcgcactaccgcatttttaaaacgttctccgcattttcttcggactttagtccgtatagaaacacttcgctcaatttcgtacgcgcgttgaccgactcaaaggtaaacgccccgcctcgcacgacgctatcggtatattcgagtgcagccgtaccggaaactgtcgcttcatttcccgcaaatactcgtatatctttatcctgcacgacaatcgtaagcaccatgcttccgatttcaagagaatccgtcagtttccgtgtaacgactttttcacctccgatcgaaacgaacagttcttttgcgagtgtcattccgagcactaaagcattgtcgctgtcttctccttttccgaccgtacctcccagtataaatgcaaaatagacatcatccgcaggtttactgcgctggaattgcgttaatttgaaagaaagtataaagtcggtaatcccttcggaaaccaggctcatggctgcgttaggattgtatatttcaccattgccggcgcttatgtttccgaagataggataattatctgaatatgcctgacattgataactgccgatctggaacgccgctttactgcctatccatttcaaatttccgcccgacgccgcaaaatctgtcacggaaaattcaactttcgcttgaacaccgctcatcacggtgagcacgttcgcgtcggaatagacaatgaacaacctggttgccgctgtcttatcgaaattttgcagcatcacttctctgacggctatcccgccttgctggagagcgagttttccgttcggatacagcctgacggaacagttttccgaagcggcgccgaacaggaactctacgtatgccgcgtctgaattgactaattggaattttaccgtaaaatcggcacggaaatattgcaacgactgattggtagaatattctgccttttcgatatctgcgttcttctgcgtgactccgccgtttccgatctcccaagtgccgcttaccgccttataggaaaccagcccgtaattaccgaaatttacagcatcgaaagcaagttcgccgtatcctgcatgagcggacaaactctgtccatcgttgacagcatcaccgaaacaaaaatattcaaaggatgcttccgacgttccgtcattgactacacccgcgtacatatccgaataattcgcaatcaaatgcgtgccgatagggataaattcttccccgccgatcgccttgtagcgagccgcccaattcacacccgtgcgttcaagctgaaaaataagttcgccggcaacgtcatctttactgccctgtacttgaatggttccctcgtggacatgcccgaatacgatctttacagttcctccgagattggctctgccggcaaacagataatccgttgcgttttgccagacaacaacgcccatatgatcaccgtcttttttcggtgagccgctcatctgcgtcttgactgtaatatcgcgcatcggtgcatgcgtcaaacggtatactccgctttccgcactctttaacgtcaac

SEQ ID NO: 1182 - DNA, 2316 bp, Unknown
  16S sequences of unknown bacteria
ccacactggtggcataaatgtccagcactttgcgccagaacaccttttcagaggatcggatatcgcggatacgatccatcagttcatcaaaatagttgccgccgccagcttgcttcagcagctcatcgttcatggcaaagcccttaatgaggtattctttaagtatggagttggcccaaatacggaattgagtgccacggagcgatttcacacgatagcccacggagatgataacatctaagctgtagtacgcaactggcttatctgaatttgcaatgtgaatatttttcacattgcttttttcatccacctcaccctcggcaaatacatttttgatatgtttcgtaatgccgctgcgctctcgttggaacagctccgccatctgtgcctgtgtcagccaaacggtttcgttttccatacgaacatcgatttttgtcaggccatcctccgtctgatacataatgatctccgtctgttcagggtggatgtcgtttccgctggtcaaccaattactcatgtgccgattcctcccattcgttgccgcaaatgtttcctgcgcgtacagcagtgtctgctttagaccgagtacatctattttcattatatcacctcacctcttacggtgcaatgaaaatccctcatctctccagttgtgcccgcttatccgccccctctcgctccggtctgcgttccggctcggccagtttcgccatggcggcatcgaccacgcaggaatggctgtccaccgcatagactcccacatggccgcccatttgctcttgcagcgccgtgaaccggcctgccgcctgctgtgccgggagtccaaaccgctcgtccccaatgcgctgcgccatcctttcgtacagcttgattttcaattcttcttttgtcatattcacctgtttgttcacctcacccttcccgtccgcattcgatgggcatagttctgcacgctataccggcgcatatggtcattttccgtgggcacggcgctgtccagatcgatgccctccaaccgaacatcccccggttccagcacctcctctaccgggatcacgcggattctcgcccgacagtgcagcgtatcgccgaacacgccgcctacactgtgaaagcctctgtcaccgcacacccacagcacctttgaccctgcaggcacatccccgaagggctgcttgagtatcaccacagagcacggctctgcgccggccactctatagtacccggcgctttccgcccgctcgtatgcgcggatcagcttatcaaattttcgctgcggctccatataaaaccagctctcctgataccccatatcgacctacctttccaaatccgttgtttttcttgccggcggctgctcacaagcctccggtgcttctgcatccgccacgatctccggctcacgcttgtcgatgttcagcaatgcgtttagctcctccaatcgcagcagctttgccttcaattcttcctctcgggggaagggcttcagcacctccgcttttgccgtttccagttgggcgtgcagctcgctcagcttttctcggcaagcctgctcctttaccggcagactttccagcagattgtccatgcgttggatattgccgaatacatccgtgcccagcgtcaccacatggcgcagctgtccgatcatggccagccggtactcctgtgaaaagctgtcaaaggacagctccagcgtcaggccgcggtaaaggccgatctgcatcggctccggcgtcagcatattctggcagagtgtcagcagctccgtgcctgctgcctttttctcggcatagaccttacccgccagcgtcatgggagaaaaaccgtccgcattgggcgcagtatgctccctgaccgtggtaatatctgcgccgtatccggcaagcctttcctgtgtttccgcgatggacttgggaaaggttttgctgatggcgtcctccagcgcataccgctggctgagatgattgcctttcagcagtttcagcttagatacctcaatgtccagatccatcttttccttgatgagcggattaccactggccagtgctttgatctccgcataggagagtgcctgctcatccacatcctcggcggaacgcactgggctcttgctggtcatgatctgcgcgatgaatttctgttttcgctctaccaactgatagagataggcgtcaaacgtaccctcggtgacgtagctgtaaatgtccacctcagcattttcgttgccctgccggatgatgcgtccctcccgctgttggagatcagtcggtcattttttgcggacagttcatacatgctatccttttctgttct

SEQ ID NO: 1183 - DNA, 3674 bp, Unknown
  16S sequences of unknown bacteria
tgcggaagccgtcgaagaagttgatgaacggcatgcggcccttgatggcggccagatgcgcgacggcggaaaggtccatgacctcctgcacgttgccctcggcgagcatcgcaaagccggtctgacgacaggccattacgtctgagtggtcgccgaagatgttgagcgattgggtcgcgacggtgcgggcgctcacgtggaagacggccggcagctgctcggcggcgatcttgtacatgttggggatcatcagcagcagaccctgggacgcagtgtaggtggtggtcagagcgccggtggtcagtgagccgtgcacggtgccggcagcgccgccctcggactccatctcgcagaccttgacggtggtcccgaagatgttcttcttgccttgcgccgcccactggtcgacgtagtcggccatggggctcgagggggtgatcgggtagatgcccgcgacctcggtgaatgcgtagctcacgtacgcggcggcgttgttgccgtccatggacttgaatttcttgctcatcggacctctctcttctcgtgtgcagaatcgatatgactgcgttgctgaaaagtcgattgccgccaacacccagaagtttataggtgccgacggcgagcgatacaggggttgaactcgctccattatgcaagttctgcacgcgggcatgtggcggcgttgccgccgcgcgattcaagtgcgccggataacggcgcgaacggcgccatgcgggcggcgtctgaacacgaaacacctccgcgtgtttcgtgtcttgacacatgggcggcgcatgtccgtgcagcgctctgcagtcgcgcgtgctatattgcgccatatcgcagattccgcgaagcgcgccgcgtgcgcgcttttgcaagaggagatgagagacatcatggaactcaggcagattgccagctttgccgtcgatcacaccaagctcgatccgggcatgtacacctcgcgcgtggacggcgacgtcgtcacgtacgacgtgcgcatgaaaaagcccaacgccggagattatttcacgacgggagcgggccattccatggagcacctgttcgccacgtacgtgcgctcgggcgcctggtccgaccatgtcgtctacgttggtccgatggggtgccgcacgggcttctacatcctcgtgcgcgacatgagcgaggaacaggcgatcaagctcgtccaggactccatggacttcatcgccgcatatgacggtcccatccccggcgcgaccgagaaggaatgcggtaactaccgcgatcaggacctcgagggtgcgcgcaagcttgcctccgacatggccaaggtgctcgtcggctggacgccggagcgcctcgtctacaacgagtaggaagccggcatgcagggaggcggcacgcatggcgtgcaggagcctgccgcgggcgggcacgtcaggcccgcgacgctttgcgatgcgccacgcatcctccagatctacgcgtactacgtcgagcgcacggccatcacgttcgagtacacggtgccgacgctcgaggagtttacggagcgcatgcgcgcaacgctcgcgacgtacccgtacctcgtcgtcgagagaggcggacgcgtcgagggctacgcgtatgcggggccgcttcacgcgcgcgcggcatacgactggtcgtgcgagctttccatctatctcgaccgcgaggcgcgcggacatgggctcgggcgcacgctgtacgcggcgctttccgaggcgctcgcgcagatgggcatcttgaatctgtacgcgtgcattgccgtgccgcaggtcgaagacgagcatctcacgctggcgagcgtgcgcttccacgagcgtctcgggttcactgtggcgggcacgttccggcagtgcggctacaagttcgacacctggtacgacgtcgtgtggatggaaaagagcatcggcgcgcacacgagcgcacagcccgcggtgcgtccgtacccctcgcttgcgggcgggcagagcgtctgagggaaatggtcctccgatgcgcccgtgtggcgtgctaggatgagagccgtcatacaagcagcgggggtacgctcgcgcgatgagcgcggacgggcgttgagagggcacaggtgcccaacccttggaacctgtcagttaacactggtgtagggagcgtgccatacgcagacgagaggcgtcgctcaagcagttgggcggcgcctcttttttgaggagggatttcatggacaaacacgagctcgagcaagccgtggcacgtgcggtcgagcagacgaaggcgacgacgccgctcgcggggtcgatcacgaacgcggtgacgatgaacctggtcgccaacgcgcagatcgccgtcggcgggtcggcggcgatggtctacctcgaggacgaggcggtcggcctttccgaggtggcgggcgcgttctacgtgaacgccggcacgctgctgccgccccatgagctcagcatcccggcggtcgcgcagcacgtgcagcagctcggtaagtcgctcgtgctcgaccccgtcggcatcgggctcggctccctgcgtacgcgggtgctcgtcgcgctcaagccctacaagcccgccatcgtgcgcggcaacgcgtccgagatcatcgcgctcgccaacctgtgggacctcgcgggcgtcgaggcggcgggcggtccgcgcggcgtcgatgcggtcgatgcggtggacgacgcgcttgccatcgcgcgcttcacgaaaggcgccgtcgccatctcgggagagaccgacgtggtcaccgacggcaccctcgtcgcgcgctcgcacggcggctcggtcatgatgaccaatatcaccggcgcgggctgctcgcaaggcggcgtcatcgccatctacgcggcggtggccgacccgtttgcggcggcgcttgcgggcgtacaggtctacaacctcgcggggtcgcgcgccgcggcggcaacggatgcgccggcgagcttccaggtggccttcctcgacgagctgttccgcgctacgccgcaagacgtggccggcaatccgttcgagctcgcggaggtgggcgcatgaacacgcttgtggcagtggcaatctcgccggtaggaacgggagacgagctttccgccgacgtcgccgaggtcatccgcgtcatccgcgagtcgggccttcccaaccgcaccaattccatgtcgaccgagatagaaggcgagtgggacgaggtgatgaacgtcgtcaagcgggcgaccttcgtcctcgccgagaagggcatccgcaccgagctcgtcttgaaggccgacatccgccccggtttcaccgacaccatgcacgcgaaggtagacaaggtcgagagcatcttgggggacaggtcatgagcattcgggacaatctggacatttccgcgtatctggtcattggacccgagaacacctgcgggcgccccgtcaagcaggtggtggcgtcagcgctcgccggtggcttcacgtgcgtgcaggtgcgttcgaaagtggcgtctgcacgcgagctcatcgcgtacacgcgcgaggcggctgaggcaatcgccgaagcgggaaagagcgacgaggtcgcgctgctcgtcgacgaccggctcgacgtcgtgctggccgcccgtgcgcagggcatcaaggtcgacggcgtccacgtcgggcagaaggacatccccgtcgacgtctgccgcgcctatg

SEQ ID NO: 1184 - DNA, 32759 bp, Unknown
  16S sequences of unknown bacteria
ggtcggtttaccgaccccggcgatgttttgcaaagcaaaactcgcaaaaggaaaccgaaggtttccgactgataccggtagatttatctaccggtatcagggttatccttaccgccgtcggtggtgctggaagagttgtcctcagttacggtcttgtcggtcagctctacatccgatacaacatagctggtcagcttgcgggtcttgaatacccaagcctcgtagtcctcatcgtatacagcgtcgatctccttggcaccgtcctcagttgcctcgtagatgaaggtatccttgtcagcgtataccatcatggtaccggtcttgttgaaagcaggagtgccttcgaagttgaagaagtgcaggttggcgtaatcgtacatggcaccgaattccttgtcaaaatcggtgttccaggccagattcagcttgccctgaccgtctacatctacggtgaaggtagcaatatcgtcgaagtcgatgtcgatctcgccggcttccttatcaaaggttacgataccggtagaacctgtgggcaggttgccgccgtcaaagttgggggtgttggtcagggtagcatccgagaagaaggatacttccagatcaaaagccgggcccttcttggcagcagaagaggtgcggcctacacggatggtaccagccaggtcttctaccttggtggtctcgttctcaggcagagtgatgataacgctcatgatctgggaatcgctggtgcccaggttgcccagcttgctgtaatttacccagtcaacatcaacctcagcgcccagatccttgccaaccttccagtcagcacgaacggttacattgcggtcatagtccgaggtgtaggtcaggtagcccaggccttcaccagcagtatactcgccatccttgtcggtatcctcatatacggatacggggattaccagcttgtcgccgccctcatactcgtcatctgcctcagcagccttggctctgttgtcagaacccagtacatagtagtcgtcagcgggatcaatataaacgccttcatttgcagcgaaagcgactgttgtagtacccgcagccatcagagcagccagggtaagagcaaacagcttcttcattttgtttttcctcctcattgggtttcattgagacgggcccttcccccgtccggcaggggttcccctgcgtactgctatccattcagactgcttatctgccggtgtccggaatcggcttgttgccgttgttattgccggagttaccgctctcggaagaggactcatcgccatccagggtgcgggaagtatccagctcggtatcggaaattgcataagcacccagctttctggtgcggatgtgccatgcgccttccttctcatcgtactcagcgttggggatttcctttacgccattgtcagttacttcgtacagataggtatcctcatctgctacgatgtacaggtcaccagtgcggttggtggcaggcttggaggtgaaggtcaggaagtcgatgttggcctccgggaacagatcagcgatctccttgttgaagtcaaaggtgaactccaggttcagagcagactgaccacgggcatcgaattcgaaccaggcagcctcgttctcgccgaagtagagaactacgtcctcagcatcgtcgctgaactttacaacagaacggctgtcaggagcgaaggtccactcgtcctcaacggttacataagcgccgctgtcgtatacacggttgtccagagaggtatccagctggaaggcattggtagcgtcctcagccttgttcttggtggaaccgatgcgcagtacaccggccaggtcgagaaccttggtggtgtcgtcttccttggtcttgatctctacccagtaggtgtaggcagtatcatagttgaagcctgcatcagcagccgcagcctgagcagcagccacaacagcctcatgttctgctacatcgtcaatggtggcagaaatatctgtaccattctcatcaatgtacttgccgtaaacaagcgtagcatagcctgcggcatccacatcagccatggttgcactcttcttcatgaagtcatagaagttgccgttattgtgctttaccagatattccgaaggatcagctacttcattcttccaggtatttccttcgtcatagaagaggccctgaccggtaactgcatctacatctgcgtcagccacatagagtttttccggctcggtaaagccttcaccagcgccgaaatcctctaccgatgtgtagatggtaccgccagctgcctggaggccagactctacataatgggttgccttctgggcagcaatctcatcagccaggaaattgggatccttggcaatctgctcattgattgcatctacaatcagatctgtcagggctctcttatccttggcctcaatggtgaaggtacggccgccaacctctacagtgtagctcacaataccatttacagaggcttcgcccttcttgtaaacgatgtcgatggactccacagcgtccttgccaaccttccagtcagcataaacattcatgtcgtccttctcgtcctcgatcttcttgtcgccgttggcattcaactcatccagacggatgtacagagtgtcgccgggacggaagtcggtgctgggagtcagaacgccgtcctcattttcatagatggtctcatcattgaaagtaaggggacgcttgtcatccagatcgccacctctgttgacaacatcgctgtcagcaaatgcagtggcagtggtgccggcagccatcagagcagccagaaccagagcagtgatcttcttagtcttcattgcattttcctccatttaatgtttttcaactcctgctttccgaggccggaaagcccttgttgtaatgcaattataccccccccggcaccttgtcaacccctttttgatgcatttttgtaattcttctgtaattttatctccgctttttggaaaaacgcagtatatgatgcattttggcgtctgtttgggtcggaaagcgccgttttttgccagattcggaagtgccaaattcatttttctgggaaaatttgcggctgatttttacacattgtggaaaattcactgtgaaaagccccttttctgccccagaaacgcaggatactccctgggctttccgggaaatatttcaggacaaatggctttttccattttcgcccccggggttttgtgatacaataaataagaactgaaccggcggctggattttttctcgcagccgtcacaaacccgtcaatccaacccgaaaggagattaccacggtggtttattccaaggaagtagagaatatgtgtgtggtagcccagggccccaatcatggtccggctcccattcccgaagaaggcaaatgggtgcgtccctatcagatcggtgatatctcgggactttcccatggtgtgggctggtgtgctccccagcagggcgcctgcaaactcaccctcaatgtcaaggatggcattatccaggaggctctggtggaaacactgggctgttcgggtatgacccattccgctgccatggctggtgaaattctccccggcaaaactctgctggaagcactcaataccgacctggtatgtgatgccatcaatgttgccatgcgggagatcttcctgcagctggtctatggccgcagtcagactgccttctccgaaggcggacttcccatcggtgcttcgctggaagatctgggcaagggcctgcgcagtcagaccggtaccattttcggcacctcagccaagggtgtacggtatctggaaatgagtgaaggatacattacccgtctggctctggacgaccatgatgaaaccatcggttatgaatttgtacggctgggcaagatgatggaggatatccgccatggagttccggcagaggaagcgctgcggaagaatactgctacttatggccggtttgaccaggcagcccgcatcattgacccgagagaggaataacaggacggaggacgacgaacaatgatacagtttgaaggaatggaacgccggatggccggaatcgaagcctgcctccgggaaaacggcctggattcgctcgaagcggcagaggcactctgcaaggaacatggcattgatgtggctgccattgtcaagggtgtacagcccattgcctttgaaaacgcagtctgggcttacacactgggtaccgccattgccctgaaaaagggcgcccgtaccgctgccgatgccgctgaggccatcggtctgggtctgcaggccttctgtgtgcccggctcggttgcggatcagcgcaaggtgggtctgggtcacggcaacctgggcgccatgctgctccgggaggagaccaagtgcttctgcttcctagcaggacatgagtcctttgcggcggcggaaggcgccatcggcattgcccgctccgccaacaaggtgcgcaaggaacccctgcgtgtaatcctcaacggtctgggcaaggatgctgcttacatcatctcccggatcaacggcttcacctatgtttccaccgactttgactttgccaccggcaccctgaaggtcaccggcgagcggaagttctcggatggcgaacgggctgctgtcaagtgctacggcgccaacgatgttctggaaggcgtggagatcatgaagcatgagggtgtggatgtgtccatcaccggcaactccaccaaccccacccggttccagcatctggtagccggtacctataagaagtgggctgtggaaaacggacggaactacttctcggtggcttcgggcggcggtaccggacgcaccctgcatccggacaatgtggcagctggtccggcttcctatggcctgaccgactccatgggccgtatgcacagcgatgcccagtttgccggttcctcgtcggtaccggctcatgtggagatgatggggctcatcggcatgggcaacaaccccatggtcggcgcaaccgtagcctgtgccgtagcagtggaacaggcctcccgataaaattcggcattcgttataaaattggcaatgtattttgtcgaaaatagacagtttttctcttgcagtctgcggagctatcccgtataataagggaaagaagctattttgaaataaggataaaggagcgtttttcccctatgaatatctggcatgatatgaatcccagccgcatttccccggaagatttcaccgctgtcatcgagatcagcaagggcagcaagaagaagtatgagctggacaagtataccggcatgatcattctggaccggattctgcacacctccacccactatcccgccagctacggttttattccccgtacctacggcgatgacaaggacccgctggatgtgctggtgctctgctcggaggagatcgatccgctggtgctggtacggtgctatcccatcggtgtgatcggcatggtggacaacggtgaggacgatgagaagatcatcgctgttcccttcaacgaccccatgtacaacacctacaaggatatttccgagctgccggagcacatcttcaatgagatgaagcacttcttctcggtgtacaagcagctggagccgggcaagttcacagagatcaagagtattgccggtgcagaagctgcccggaatgtgatccgtcactgcatggacaactacaatgccaagtatgtagaggaataagattccccatgaatcacaaaaagcccgcccggcagctgccggacgggcttttttgcgcagtcattcagatggcgcagtaaaaaaggagaggggcatcccctctccttttctcatactcccgggaatgtccgcagccagtcatctgcttcagcccggctgtggaaaacatgcacttcccgcccttcgccatgctgctccagcaggcggcggatctccgggagctggtcccggctgaaatcctcgatccactggcggaactcgggatcgaactcctcctccacccagggcaggtcctcccgctttgtaccgatgcgggcacgcgccccctccaggcagaccccggtggggtagtccagcagaaagacggtatccgctgcccgcagccggagctccagggtgcgcaggtagttgccgtcgatgatccacgcatcaccccggagcagcccggtcagctgggcatcaaactccgcccggctgacggtggtgcggtcagggcggtgccagatctgatccaggtaccagagcggcagaccggtccggtcccggagggcccgggcaaaggtgctctttcccgctcccgggcagccgatcaccagaatacgcttcatctcatcttcctcccgtcaaaaaaccggatggcctatatcccagaccacccggttttatccttgctgcaatcagaatcagcccatgggaacggcaatggctgtaccgccgccgctgatcatcacaccgccgcccacagatacggaggtgccggcgtttccggtggaatccgaagctgccgcgctggattcctcttcggtttccccggtggtttcttcctcagtggactcctcatcggtggtctcaccgtcggtggattcatcctccgggatctccccatcggtgccttccataccatccataccgtccatcgacacattttcgccggtgggaagggcatcatcgccggtatccggcgccggggtataggtcagggcaaagatggtcagggcaatggctgcaatggcgccgcccagcaccatgaacttctgcttcttgctcaggatgctctgcttatccgggtcgggatagaggatcgagccaatgatcttaccgccgatccagcccaccagcatggctgccaggatcaccagcaccgcaatcatcaggatcgctgcccattccggcaggaagctcagcttggtcttgagcgaatcaatcagccccgttccggctgtactgccgcccatcattcccatatctccatagccacccatggccatcaacatcaatctgtccactgtgaaaactctccttcatacagtcggcttctttccatgaaaaatgccgggtttcggtcgtacccgatgcagaatcaggttccttaccatcatatcatgtttcaccggcggcgtaaagtgccggtatctattttttcagtgtcggttttccgttgttttcctgcattgtccccggagaaatttttaggttcgtttaaggataaaatttacggttttctttccagctgctcacaattttgtagtataataataaattagaatcaaatttctcatcacaggaggtttttcttatggcttcattcaaaggtgacatcaaatcccgggcactgaatatggacattgccctcaatgtcattctcccctatgaccacccccatgactattccaaaaatccctgcaaaaccctctggctgctgcatggtcagggcagttccgcttcctcctggatgcgctggacttccattgaacgctatgccatgcagcatggcttcgctgtcatcatgcccgaagtacagcgcagcttttaccgcaatactgcctatggcatggattacttcacctttgtggcggaagaactcccccgtctttgccgggagatgttccgtctgagcgacaagcgggaagacaactatattgccggtctttccatgggcggatatggcgctctcaaggtgggactgactcacccggaacagtatggcaccattgccagcttctcgggcgctgtggatctgggcaggatgttccagtccatgggcgattcgctggaccccaaatccctggcagaatatcagggaattttcgggactgaaatgcagctgctgccggaagatgatattctccatctgacccgggaacatgcccgtctgcccaaggaacagcagtgccggttctttatcagctgcggcaccgaggacaatatccccaccctgtatgagagcaatgtggaatatgtaaagctcctcaaggaactgggtctggactgcgtctggtttgaacagaagggcatccatgaatggggcgtctgggacgaggctgtccgggaggctctgaaccggtttgatggggaacgcatctactatgtataattttccggagaggactgtgaaaaaccatggcatcacctcttgccgataaactgcgtccccggacgctggaagatgtggtgggacagtcccatctgctggccccgggacaggtgctgcgcagcatcattgaaggcggcaccattcccaatatgatcttctatgggccatcaggtgtgggaaagaccaccgttgccaatatcattgccaataaggccggcaaaaagctctaccggctcaacggtaccacagcttccacggcagacatcaaggagatcgtcagccagctggatacctttgaaggacgcaatggtgttgtgctctatctggacgagatccagtacctcaataaaaaacagcagcagaacctgctggaattcattgagaacggcagcatcaccctcattgcctccaccaccgaaaacccctatttctatgtctacaatgcggtgctcagccggtgtaccgtctttgagttcaagccggtggaaccgccggaagtccagcgggctgtggaacgggcctttcgggtctgtgccgaggaatatcccggcctgacagtcgaggacggcgtggcggagcatatttccttctcctgcggcggcgatgtgcgcaaagccctcaatgcggtggaaatgctggtgctgtccgctgtgagctccagcgaagtaccggtggcaaccctccaggctgccaaagaggtatcccagcgctcctccaaccggtacgaccgggacggcgatgtccactatgacctgctctcggccctgcagaaatccatccggggttccgatgaaaatgccgccctgcactatctggcacggctgctggattccggcgacctcatctctccctgccggcgcattctggtctgcgccagtgaggacatcggcctggcctatcccatggcagtggtggtggtgaaaacctgcatcgatgctgccatgcagctgggtctgcccgaggcacggattcccctggctgaggctgtgatcctgctctgcaccgcgcccaaatccaactccgccaatgttgccattgacgcggcgctggcagatgtgcgcaagggcaaatacggcgatgtgccgccccacctcaaggacgggcattacggcggcgccaacaagctgggccgggccatcgggtacaagtacccccatgacttcggcggctgggtggaacagcagtacctgccggacgagctccgggaccgggtctactaccacttcggacagaataagaccgaacaggctgccctggcctaccgccatcagcagcgggctcccaagccggaacagaaataacagcgccccctccatggagccagtcggctcatgtggagggggctttatttttgcataaacggcggcaatattcaacaaactgtaatactgtatgttttctatacaggatttgtgcctgattggagccggatctgaccgtcccgccgacatactggcgggcacaggcgctaaccgggcagaaccggacagcagctgacctgcgcaccggcagcagtaaacataatgccgtttcgctgtactgccgacgccccacaccggaaagcggacaggtgcccggcctgtgcactggcagcgagagtggcagtgctgtttactgtgctgcctcagccgatgccctacctggaaaccggatagcactcagcttgtgtactggcagagaaagtcgcaatacggtttcactgtgctgattcagctgacaccccatcggaaaaccggacggcgtccagcccgtaccccagcagcaagaacctcagcacagttctctgcgctgtttcagcctacggcccgtcacaaaaccagatagtgcccggcttatgcccccggcagcgagcggcacagtacagctttactatgccgcttttccccgacgccttgcctgttttcagcctgccgggcaccgcaatccatcaacaatctgtaatatatggcatattctatacagaattgcggttcagccgggctggatgctggtcaatatgggcatgaaaaaagccgatccgcaattttgccggaccggcttttctggtattctgtttgaaggaaactcagcgattgtaaacggtgccgatgtatcctgccgggtccttccgaactccattgacacgcacttcgaagtgacaatggtttccgtaagcattaccggtggcgccgactgccgcaatcagctgaccctgttctacccattcgccaacctggacataaacctggctgttgtgtgcgtaaagggtctgaactccgccgccatggtcaataattacatatcggccataggcgccgttggtgtagttgaaggccgctacaacggtacccgatgccgaagcacgcaccgctgtgcccatcttggctgcaatgtccataccgccatggttataatagccatagaagccgcaggacaggtatccgccgtctaccggccagatgaagtaactgtcggtggtcatagccgaagcgggcagctgtgtgagcggctgcttaccgcctacgatcatcacttcatttaccggctccttgaggacagtggtgctcagaatggtacgggactgctcaacgccgtccacataaaccacttccgcagtgacctcattgatgcccttttcaccgatctgggtcaccttggtgtaaccctgctggagattggggtcctgttcatgctcaatggagaagggaacttcctcattgtaaacctcagtgcgcttgacctgcacacccagggtgggaactgccttttcgatcaggacttcctgaccaaccagcagcgacttttccacatcgggattgagtgccttgaagtcagcatacagcatatcaaacttctgggcaatgacagtgggagcatcgccttcctgtacggtataggtctgctcttccgattcattttccttgagcttctcttccagagcagcaatattcacaatggaggtcttgggatacaggccctccttgatggttacaggatcggtgaattctaccacttcatcggggtcaccggtgcggtattcgtccttgatggtttccagcagactttcgatctcctcgtcatcataggaagcgcctacaaacttgtccgctacatacaggccgtatgcttcggtgagttcgctgcccgaggaggcgatcagattgtcggtgagttcttcttcggtattgaccgaagaacgggatacgatggtcagtgtgtacttggggacggcatcttcgggatactcgtactcctcaaacacaatacgctctcgcatcttctgattggcggcgatgaactcggactcatcggtcacataaccgacaaactgtccgttgtactctaccgacagggcaaaggtaagattgctgtaaactgcgatggtgagcagcagtacggcaataccgcctaccggtgccgcatagttgaatgcacgggaagtggtatcactgcagagctttacaccactgcggagggtttcgccgagcagtttgcggtgatcgccggtttccttggctttccgcagctgttcagcaaattccagcgaccagttgaagccttccgcaaagggttctctggcacgttccagagaggccttggcacgggccagaatgcgtctgtgccgcgggctgagatgaatctgcggacgatgggatctgacaaaccgcagagtccgccgacgaatccgcttggccttgcgcaccagcgcaataccggtcacataaaaatatcgatagagctgtgtctcttcaaatcgttcgtaaagattcgatgtccatttgatgaaactgttcttccccgccttgatgtcttcacaagatgaggagctttcagtcacgatctcctcgcttgtgtcagaactgttgcgagccaaacgcatcatctcctttccaatatcttagcgatattataccgcaaaaatggcttcaagtcaaaggtttcgggctaaaatagagctttttaacgaaagcactctccctgatttgtgaaaatttgttgcggtttttggtcctgacggaattttttggggttcagttaaggttgactaccctccccccatttgcagcaaaacaggggctgtccctctccataaggagagttccagtccctgtctttgatcggattctgtttacttggcgtaatccactgcacgggtttcccggatcaggttgaccttgatctgacccggatactccatctcgtcctcgatcttcctgacgatctcccgggcggctaccaccaggttgtcatcgctgatgacatccggcttgatcataatgcggatctcacggcctgcctggatggcatagcaggaatccacaccgtcaaagctcttggcaatctcctccagcttttccagacgcttgatgtagttctccacattctcacgccgcgcgccgggacgggcagcggaaatggcatcggctgcctgcaccagggctgccaccacggtacggggctccacatcgttgtggtgagcctcgatggcatggatgacatcggcgctctctttgtacttgcgggccacatccgcaccgatctgcacatggctgccttcgatctcatgggtgagggccttgccgatatcatgcagcaggcctgcacgccgggcagtcttgacatcggcgcccagctcggcagccatcatgccggcgaggtgggatacctccagcgagtgctccagcacgttctgaccatagctggaacgatagcgcatccggcccagcaggcgtaccagctcgggatggatgttgtgaatgccagcttcgttgacggcacgttcgccgtcctgcttgatcttgttgtccacttcccgcttggccttctccaccatttcctcgatgcgggcagggtggatgcgtccatcctggatcagccgctccagggcgatccgggccacttcccggcgcaccgggtcatggctggacagggtgatggcctcgggggtatcgtcgatgatgagatccacaccggtgaggttctccagggcacggatattgcggccttcccgaccgatgatgcggcccttcatctcatcattgggcagcggcactaccgatacggtcacttcggatacatagtccgaagcgcagcgctggatcgcgcccgagatgatctcccgggccttctggtcggcctcgtccttcagacgggcttccatctggctgatgcgtactgccttttcatgggtcagttcattttcaaggttctggagcaggtattccttggcctggtcggcggtataaccggagatcttttccagcagctcaaactgctgcttcttgacctcctccgcttctgccagacggttttccgcttcccggagctttccggcaagctgctcctcttttttctccatattctcggactttttgtccaggctttcctcccgctgctgcaggcggcgctcctgacgggtcacctcattgcggcggtccttgatctcccggtccgcatcgctgcgcagcttgaagatctcgtccttggcctccaccagagcttccttcttcttgctctcggcggtcttgatggcgtcgctcaggacccgcttggcctcttcctcggcagaacccagttcggcttccgccacttttctgcggtatgcaataccggcgggaaatgcaatgacaagtcccaccagcagagtgatcagagggatcagaatgtccttcatagatcctgtcagacctcctttcagatcttttttcagttttgaaaatgtgcatggaatttttttgatagataatattcccggaaccaagactgtacagccaattcagccgcactaaaataaaggctcgcccaaaagcgtcccgattttttactgtctgtatccgtctatataaccgaggggagagaaaatcgaccgtccctcacccgaacaatcagggttataaaaaaatattatatcattcttattttatagaactggtgcacatctgtcaagatgaaacccttccggctcaggatatttttaccggccgcaggtctgtgtgacccggtcacgaaagttgttctcccactattgacaactgtcccgccccgtgctaatatgggggcatagcaaaatcccaaacagtgaaattgttgatgaggaaccctgctgcgtccccatttttcttccagagagaactgccatcggctgaaagcagttcagaaaaatcagcggctgtggtaccgcctcggaatgcgtgtccaaggaaccctgttcccaaaacgcgccgcctggaacgcgttatccttcctgcgagtggcgggccttctgcgtccgcaattcgggtggaaccgtggagttttatagcttcaccccgtatttttggggtggagcttttctttattttatcggaaaaggagaagacacactatgattcatgtaacactcaaagacggatcggtcaaggaatttgaaaatggcatctctgtgatggagatcgtcaagagtctgggcgctggcctgtacaaggctgcctgcgcctgcaaggtaaacggcgaactgtgcgacctgcgcactgttctcaatgaggactgcgccctggaagtgctcaccttcgacagtgaagagggccgccgtgccttcaaccacactgcttcccatatcctggctcaggctgtgaagcgcctctatcctaatgccaagctggcaatcggccccgccattgcggacggcttctactatgacatcgatgtagagcccgctttcggccccgaggagctggaaaagatcgaggctgagatgcacaagatcgtcaaggaagcctatgacatcgagcggttcgagctggaccgtgccggtgcggatgccctgatggctgacgagccctacaagctggaactcatcgctgagcactccgcaaacggcgagccggtatccttctacaagcagggcgagttcactgacctgtgcgctggtcctcacctgcccgacaccggccgtgtcaaggctgtgaagctgatccagaccaccggcgcctactggagaggcgatgcccagaacaagatgctgtgccgtgtctatggcgtagccttccccaagcagagcgagctggatgctcatctgaagatgctggaagaggccaagaagcgtgaccaccgcaagctgggcaaggaactggagctcttcgatatctttgatgagggccccggcttccccgctttcctccccaatggtatggtagtccgcaacgagctggagaagttctggcgtgaaatccaccagaaggccggctatgtggaagtgcgtactcctcagatcatgtcccgtaccctgtgggagaactcgggtcactgggatcactacaaggacaacatgtacaccaccatcatcgacgatatggattactgcatcaagccgatgaactgccccggcggtattctggtttacaagcgcaagccccactcctatcgtgacctgcccatccgcatgggtgagctgggtattgtacaccgtcatgagctcagcggtgccctgcatggcctgatgcgtgtccgctgcttcactcaggacgatgcccacatcttctgcactcccgatcagctgatggatgagatcttcggcgttatcaacctcatcgacagcgtttacaaggtattcggcttcgaatacgacctggaactgtccacccgtcccgaggactccatgggcagtgatgaggactgggaggctgcaaccagcgctctgcgtcaggctctggacagcctggatcgtccctacaagatcaacgagggcgacggtgccttctatggcccgaagatcgacttccacctgcatgactgcatcggccgtacctggcagtgcggtactatccaggtagacttccagatgcccgagcgcttcgacatcacctacatgggtgctgacggcgaaaagcatcgtcccatcatgctgcaccgtgttgccttcggcagcatcgagcggttcatcggtatcctgatcgagcagttcgccggtgccttcccgctgtggctggctccggtacaggtagaggtgatccccgtttccgagcgtcatctcgagtatgccgccaaggtacgcgatcagatgcgtgctgccggcctgcgctgcgaactggatacccgcaatgagaagatgggctacaagatccgtgaagcccagatgatgaagatcccctacatgctggttgtaggcgacaaggagatcgagaacaacaccgtagccgttcgctccagagctggcggcgacctgggcgtaatggagcccgatgccttcctggcaaaggccaaggaagagatcgacaccaaggccctggagtcggtattctaaaaaacaaaaccgctgcctgacccggcagtgatctgaaatgaaaaaccacccctgtgctccagatggcacaggggtggttttttatgcaataaaaaaagcgggcagaactgcccgctggatatatcctttttgtttgatggtccggtccgtgggagatcactctgccacacggacggtgcttaccatgtccagacgcccgtctgcgtcggcggtaaagaacttgatccccgggaagcggttccacagggtatagaggacggaatcctcgtccccgggctgaccggtgatgacattgacggtattggtggattcgagggtttcggtaatggcgcccataaaatcgctgttataggcgatttccagcacggacccgttctcctttgccgaattgtagaggtactgcagggcagcgggatcgctggtgcggccttcggcacagatatggaacacccgcagctgggtatgggtaatgcctgcaatggctcgaccggctttgataatgcgttcgcactggaactgatcggtgaccagtaccagggtctgccggcgaggaggctgggcgctcattgctgtgtaatccataattaaatgctcctttcttccctgttctgccagggaggtcttgcatctcttctgattctcattataccggtcatatatgaataaacaagccgaaaaaaataaacgctttggaaaaagaaaactgtcccctgcaaaaatatgcagagaacagcttttttctgaatattgaccggaggatattattcctgttcctcctccagggctgcggcacgataggaaagggtcatcaggctgtccgcgatgtagacattttccactgccacattggagaattcgatatcaatatcatagtgggagaagttgaggaacgaccgcacacccagctccaccagctgcggtaccagcagttcggcaccctcctgggggatacacaggatcgctgcctcggggtgatgctcatggcagaaatcctccagcttatcggtggagatgaccgggtattcccggatctcgctgccgaccacccactcattggtatcaaagatcgccatcaggtcaaagcccgagccttcaaaatccaggctgcccacaatggccttgcccaggttgccggcgcccagcaggatcatcttcttgcgtccgtccaggcccaggatacgggcaatctcttccttcagagccgatacactgtacccatatccctgctgaccaaatccgccaaagcagttgagatcctgacggatctgggacgcagtcagatccatgatccgggccagttcccgggaggagatctttaccgtaccctgttcctccagccggagcaggcagcggtaatagcggggcagacgccggatcaccgcacccgaaacctcgcttcgtttattattcattggttgaacacttccttttccggcagaatccggggattcgctgtccgtatatttatcagaaaaagatatggacctcttttatggttttcattttatatcaaactgactatgatgtcaatctcaccccggaaaatccgaaaaaaagaggaaccggatctggaagccggttcctctttcggtcagaataagggaattgctggattagcccgcaatggtggaggtggcatgctgtgccggctccttgacatcggtgttgcgggttaccttggcagaggtggggatctcctcaccgggacggagcagtctggcctgtacaacaaaccgcaggtcacgcttctcaacgctgtcggtgtacttgtaagcacaggtggacagggtcaggatacggtcagaggtgttgacatccacatcgtagtccagacgggaacgatccttggcctcctggatcatagccgagaaggtggcatcgtccgggttctccagatggtactggaagcccaggtcggtgaagtaagcggcatagattacccataccatctcatcatcggtggtggagaagtagattaccggatgctcctcagcaaaggagaagtcattggcgcttgccacatcatcgccaaagatagtgccgtcgttgttgaagtctacaaacttgaacagggcaccgaacttcagggtatccttggggccagtggtaacattgtgcatgttatggccgtagataatggtgttccgggacaggtcgttgcggttgccgaaggtgttgcctgcatcggcaaagtagcagccatagaagtcataatccggcacgccgtcaccgtctgcatccttgcggtcccaggacagacgctcatactcagtattggtatcgccctgtacaacctgctcgtcgatctcagtgccgggtacagtcagccagcccacaacatcattgttgacagcaaaggctgcgttgatgttgtccagaacggtctgctccggctctaccggatcaccgctggtgggttcagtgatggggttggaaatgctggaatcctcactgctgccccggtcaccggtgcaggaagtcagggaaaacaccataacgccgcacatagccagcgcaatggccttacgaatgaatgagttctttgtttccattactcttctcctttaagttcgccattgtttcgggaggccgcattatataccaggccctgggatgcgtccactcccaccgagatcccgccccgcaggatcttggtggcatctgtggctcccacgattaccggaatggcacgggtgatctcctccgtgtcaaaatccagctcctcggcttcggtaatcagtccggaggccttgccaagtaggtccagaagcggtttcccgattgcaggtattactaatatatcattttgtttgaatttctgcaatgcctcttccgcattttttgcaacacaaagattgccaaccgttttatggctgttaagccctctgccgcgcaccaggctgtatcccgctaccgccaccttgagcaggttggtggtgccgggaatgcccagcggcacaccggctgtgagcacaaccagatccccatcccggcagagcccttccttcatggcagctgctactgccgcgtcaaagagctcatcggtgctggacttcatctgcatgatgatgggagtcacgccccaggccaggctgagctgacggaacacttccttggaagtggtgcaggcgatgatcggcacacccggacggaaccggctgcacatccgggcagtccgacccgactgggtcacactgatgatcgccgccgcattcagatcgtatgctgtagtacaggtggcatgggaaatggcattggtcacatcatccggatggtagtcatggctgtaaaaccgccggcggtaatcaatatcctgttcggtgcgccgggcaatggttgccatggtcgccaccgcttccaccggatatttgcctgccgcgctctcacccgagagcataatggcactggtgccgtcatagatggcattggcaacatcattggcctccgcccgggtgggacgggggttattgctcatcgactcgagcatctgggtggcagtgatcacatgcttgcctgccatgtacgccttcttgatcagcgacttctgatggatcggcacatcttccagcgggatctccacgcccatatcgccccgggctaccatgacaccgtccgaaacccgcaggatctcgtcgatattttccacgccctcggcattctcgatcttggagatgatcttgatgcggcgcccgccatgctcctccaggaaccggcgcatctcgcccacatcttcggcagtgcgcacaaaggacgctgccacaaaatcaaagccggtttcaatgccgaagagcagatcctgcttgtccgcttcactgaggaagggcagggtcagatgcacacccggtacattgacacccttgcggttggaaactctgccgccgctcttgactgtggtgtggatctcccccttgtcggtgatataatccaccgtcagctcgatcagaccatcgtcgatcagcacccggctgcccggacgcagatcccggcccagtccgccataggtgatgtaggagcgttcctctgtacccggcacctgttccggtgtcaggataaagtgcgcgcccggctgcagcatgactgcaccgttttcaaacacacccagccggatctccgggcccttggtgtccagcatggtaccgatggggaggccgagttcctcccgcaggcgatccacagtgcggaacttttccagatgttcctcatgggtgccatgggagaaattgaaccgggccacatccatacccgcttccatcatacgccggagagttgcctcatcggaactggatggccccagcgtacagataatctttgtcttgcgcatcaaaccattcaccacacctttctctacgccgctgttgcagttctgttttcattgtatcgcagcagcctggaaaatgcaacggaaaatgcgcctgggctgcaaaacccgcagtccttttatagagtgccgttccctgcccattttactgcatctttttcgtttcctttttggtccccgggggtttttgaccccctcccccttgacaaacgctcccggctgtattatgcttactgtattagctatattagtacactaagtacagatgccggtacagtccttctattattataggggaagcggtccggcactgtcccgcaagcgaggtgagcagatgtatcagcttgatttacacagccgtgcgcccatttatcagcagctcaaggagaagatcctgcggctgattatggcaggcgccatcggtccgggtgatccgctgccgtcggtgcgggtgatggccagggaactgggcatcaatcccaatacggtagccaaagcctatcaggacctggaaaaagcggtctgatctattccgtagccggcaagggcagttttatcagcggggaggaaaccctggaccggcaggttgcagtttcagtgctggatcatcttcgggaagcgatccgggaagcccgcagttcgggggtagaccgtcagaccgccctgatcctgatcgatgaagtatataaggaggggaacgcacagtgatcatcacacggaatctgaccaaactctttgaccgctatgaagcggtaagcaatctttcgctggagatccagcccggctgtatctatggactggtgggaaccaacggtgcaggcaaatccacgctgctgcggactcttgccggcatttaccgtcccagttcgggagaagccctgctggacgaccatcccattttcgaccatgtccctgccaaatcccggatcgtactggtccccgatgacctgtggttctttgcgggagccaccctttcggagatggcagccttttaccgggcctgttaccccggctggaatgaggaaaaataccaccgtctgctgactgcctttccgctgctgccggataagaagctctcgggattttccaagggtatgcggcggcaggcagccctgatcctggcactctgccgggaaccggattacctgctgctggacgaggcctttgacggtctggacccggtgatccgtctggcagcccggaagctcattgccgatgaggtatccggacggggcatgaccgccctcatcagttcccacaacctgcgggaactggaggacctgtgcgaccatgtggcgatcctccatgagggacgcctgctcatgacccgggagatggataatctgcgcaccagctactgcaaggtacagactgccttcaaaccggctgtggaaaccctggatctgcccggactttccattctgcgcaccgaacgggtgggcagtgtatggacccttctggtccggggcagcgaggaggaagtctttcaggcgctgcgtcccctgaatccggtgatcctggactgcatctcccttaccctggaggaagtatttatcagtgaaatggaggctgtgggctatgactacaatcacatcatcttctaaatacgccggcctgacagccatgctccggcatgatctgcgccgcacccgtctgatgagcgccctgttcttcctgctggaattcatcgccctgcccctgcagctggcgctcctgctcttcagccgtccggaacggggattcaccctgcgcacagccacctatgcacagatctacggcaacctctcggctgtgctgttccccatggtgatcatgctgtcggcagctgtcatcgccatgcagctcatgaactataacttcggacgccgctcggtggatgtctactatgccctgccctttacccgccggcagatgattctttcccatctcatcgccggtaccctggcaatttcggtgcccattgtcctcaacctggctattaccgccggtctggctctggtcatcaatccggctgtgggactgggctggctcgccaaggacctcctgctgtggattctcgtgggctactgcgtgtttatcagcattatgctcaccgccactctcatgggcaatgccgtggatacgtcctctatgccggtatgctcaacctggaaccggtgctgctcttcctggcagtgctggctaccctgggcagctttgtgatcggcttcgatccctcctcgctgctcaatcgcaatatcctctacttccaccccattcccatgctcatcacccagatcttcagtgacacctgggttcccctgagcggctgggctgtgggaatctggacagtgctgattatcggcggcaccctgctcaccgtctggttctactcccatcgggacgcggaactggcggaaaatgttgcccgggacaactggttccggctgattctcaagatcacctcttccttcctgctggcgactgtctttgcctatatgatcttcgctgtcatcaccaccggcggcatctaccgctccccctcggaggaaatggccttcgtactgggcagcgctgccggcgccgtcatcggctatctggtgctggaagtcatcttcggacgcggcttcaagactgtccgcggcaactggtggatctgcctggcagacatcgtgctggcagcaggaattgccctgatggcggtcaccggcctgttcggctacgaaactgctgtgccctctgtcgcttcggtggaatatgctgaggtggacggctatctcagccgctattaccggtctcactccggcctggatattcagaataccgttcattttaccgatgagaaggccattgagtcgctgacccagctgcatcagagcgccattgccgccgcccagtaccaggctgcggaaggctatcccgaatccagcaccagtgcccgcctgcgggtagtttaccacctctacaacggcagcactgtgacccgcagctactatggcctggccctgcccgaggacggagctgaacagttccgtgacctgtacagcaccgccgaggctctggaacagaagaaccccgtcatgcagatcggcaaggacgaggtccgcctgggcgacatcaccgtgatgaacctttccggcgcggaaactctggtcagcgattcccagaccgagcgtctgctggaagcagtgcggcaggacatcttcgataccgccgctgaaaagatcaaccagtcgggcgagccgctgatctatctgaacatcggctatcactatcctatgatggattactattacgatgctgcactgggaaagagtgtggagcgtcccgccggcgagggcagcgattccatccagctcccggtatatgagagctttgataccaccctgtccctgctgggtgaactgggtattgagggtaaagcctttgatcccactgattatattgctgtttacggcgtctatgaccactatgatctgtggatggattccgccaccttccgtgccaattccggcctggcctactactgggtcggcgactatcaggttatgggcgagacctattccggcctggcagacgacccctccaccatggaactggtggatgtggaatggtctgacaccccgtcccagcccgcaggcaaactcaccgccgaggagatccagatgctctatgatctctcctccccctgcggcgacggagaagatgagtacagcaactgcctgctgctcttcgataccggcatcaccgacagtgacggacgcaatcatctgatgctgatccgctttatccaggaggagaccctccgctcgctggacactgatctgctggagcgcctgaccctctcggttgaatacgacggctcaggctactacatctcccagaacaacgccctgtatctggacagctggccccaggccaaccaggactaagccccccaatccctttccctctgtgagggagaaatcccaatacaaaaaccggcagcccctgcttcccgctatgggtcaggggctgtcggtttttttgctctctgccgggccggggagtatatcacatactgcggcgcgctccggctgaatgtccccgcacgggacagagcggcaccccagaacaagcgccccggcctccctcccgtccgtagggaaaagccgggcgctggattcggctgaggcggcacacaggtgatatggggtgttcataacccgccatgccgggctgtctgcccctcgcaccgctggaaaccggcggcgtcaaaaaacgccccggccttcctcccgtccggagggaaaagccggggcgctaaattcagttggagcagagaatcacatgagcggcgccatcagacgcagcagcttggtgaaagcccggtgatagagcggggcacggttcagctcgtccagttccaccggctggcacaccttcagggtccggagaatatcgtcccgcaccttggcagccatggtggactgatagaaggaaacaccgcattcaaagtggagatagaagctgcggtaatccatattggcggtgcccacaatcgccacctgatcgtccgatacgaacatcttggagtggataaatccgggggtgtactcatagattttgacgccgccccggatcagctgggcataataggaacgggtcaccatgtggacataccatttatccgccacatggggtgtgatgatgcgcacatcgattccgctctgggcggcgttgatgagcgaagtgaccatctcgttgtccaggatcagatagggcgtcgtgatatagacatagtcatgggcccggttgatgatctgcatataggccgtttccgacacattgaggttgtccagggggctgtcgccgaagggctgcacaaagccgtcgctgggcaggttcatggtgggacggtaccggtcaaagtccgcctccactgtggtggtgaactgccacatcatcaggaacatcagcgtgaggttccacaccgcctgtccccggagcatcacggcggtatccttccagtgtccgtgcttctcataggcgttgatgtactcgtccgccagattgagtccgccgcagtagccgatgttgccgtcaatgacggtgatcttccggtgatcccggtagttcatcgccatattgagatggggacggaaggggttgaagatagctgtgcggatgcccgccttttccagggtggaacggtagttggtgggcagggtctggagggtgcccacatcatcgtagagcagccggacttccacaccggaagccgccttcttcttgagaatctccaggatggggtcccacatctggccctcccgaatgatgaaatactccatgaagataaacttctgcgccttctggagctcctctttcagcgattcaaagaacgcctcaccaatggggaaatactcaccctgggtgccgtcccataccgggaagccggatacattttcaatataggccgcttcggtggcaagatcccggcccaccttggagagatcctcccagcagcggaaattgggatggacccgctggatggtggcgtcatagaactgctggatgcgggctttcagatcgtccggggtgcgctggttgccgaacatcagatagaacagcccgccgaataccggcacagccgaaatcagcagcacccagctgagtttataggcagggttggcctcgccggtgaccacccagacggatacacccacgctgagtacctgcagaaccgggtaggcatagaccagatgtccttccagtgtgaccagcagcgccaccaggaatgccagctgcaggaagatgagcacgcccacaatgaccatccggctgaacaggaagcgcaggatcttgcgcagggatattttctgacgcagggtgcgtcggtcatgcttctgtttactgcgcctgctcatggggaacactccttttcctgaaatcgtcatacgggaatacaatttttcatacaatttcagaataccacccctgtttgacaaaatcaatccattccctgtaaatattcccaggggtttcggttttatgtgaactctaagtaacagttttttgaatggactgggcagggaagggatttattgttataatagggctgggaaagaaaaccgcagcttctgtaccggcactgaaaaactgccggggatttgagtataacagaccaccaatcagaaaggagaaacgacaatttggagaatataacatttgaacgcatcaagaacgatgaaattatccgggaatacatccgccgggccgaccggaacctggcagccatgggctataccaagcattccttcgggcatgtgaccaaggtagccgaaggcgccgccgagatcctcaccgccctgggctatgacgaacgcacggtggaactggcccggatcgccggcttcctgcacgacatcggcaatgtggtgaaccgggcggatcatgcccagtcgggcgccattatggccttccagctgctcaccggtatgggtatgcccgccaaggagatcggctatgtggtatcggcaatcggtcaccacgatgagggcaccgccttcccggtgaatgccattgccgctgccgtgatcctggcagacaagagcgatgtgcgccgcagccgggtgcgcaacaaggagaacaccacctttgatattcacgaccgggttaactacgccgtggaaaagtcctcgctgatcctcaaccgcagtgcccgcaccatctcgctgatcctctccatcgacaccagcatctgtgccgttatggactactttgagatcttcctcacccgcatgatgctctccaagcgtgcggcggaatatctggatctctccttcaagctggagatcaacggcacccagttcctttgatcccctgcgccccatcgcaaaaaagctcccctggcgatgccgggggatttttctttgcccggcatgattgcccgctgtgcgccggaccgcatcggggcctacccgatttcaccgtatacccgcactccccggctcctgctcccgcttctccctatataataaaaaggtatggccctcgcagggcatacctttttctgttctattccgactgttcccgggatttgcgccggaacagtcccactgcccggctgtggttctgctgccgccgccggagggtttcctcccggtcgatctgccagctgccatccacgcagaccagacagtccccttcccgcactccggcgggaagtccggcaaggggcagttccctgcgcccgtcctccgtttcacagacagcaatgccgccttcgatccggtcaatcaccagcatggttccttcccccttacaggagctgttccggctccccgttgtcgctctccacccacagggaaaccccatcggtggtgatgcggatctcgcccagcaggtcggtgcggtaaaccgggccatattcattcaggcgctccagcgttgccgctgtgggatgcccataggaattgccctcgcccaccgagatcaccgagcagaccgggtccacttccgccaggaagtctgctgtactggaggtggaggcgccatggtgtcccaccttgagcacatctgccgagagatccgctccggcggcgatgaggtcattttccgccttcttctccatatccccggtaaagaggaaggagcgatcaccggcgtccacccggcataccaccgaggtgaggttgaggtcgtcatagtccgccaccgggccgagaatggtgagcgtcaccccgtcgcccagggagtagcggtccccgggctgtgccgggatcacttcggtttccggactctgttccagtgctgtgagcaggttctcatagacccggctggtgggagtaagctcctccggcagctcggtcatgatgaaggtctttgccggaacagattccagcacctctgccatgccgcccatgtggtcggaatgcatgtgggtggcaatcaccagatccagttgctccaccccatactccttcagagcgcccaccaccgtatcggcatattctgcctcaccggtgtcaatgagcaccgtctgttcctgggtgcgcagcaggaagctgtccccctgccccacatccagggcgatcatctcaaacagcccgtccaccggctctgccggggtctggctcagatccgataccgcatcactcacttcacccagggcatcagataccgccgggaggtcgatctgtccgccccgcagcagggttgccgccgccataaacagacagatcagcgctgccgccagtccgcctttattcttctttcgttttgccattgtgcctcgccttattctgatttctgcagtttcatctcataccagcgttccttgctgatgagtacctgccggggtttggagccttcaaacgggcctacaatgcccatctcctccatctcgtccaccagacggcccgcccgggcatagcccaccttgagccgccgctggatcatggaggtggaggcctgtccggcttccacaacgcattcgatggcatccatcaggagctcatcgtggtcgtcaaagccgccgccatcctcaccggaagaggactttgcgcccttctccgccgggatattcttttcaatctcttccatgacctgattgtcatagctgtgggtctggccttccttgatgaagtccactacccgttccacttccttattggatacaaaacagccctggacacgcaccggcttgggtgaacccaccggcgcatagagcatatcgccgcgtcccagcagcttttcggcgccgccggcatcgaggatggtccgggagtccacctgggaggataccgcaaaggcgatccgggaggggacattggccttgatgataccggtgatgacatccaccgacggacgctgggtggcaatcaccagatgcatacccgccgcacgggccatctgagccagacggcagatggagtcctccacatccttgggggcagccatcatcaggtcggacagctcatcgatgataatgacaatctggggcatggtgggcagtgtttcatggctgcgggccatctcattgtagctctccaggtcccggacattgttttccgcaaaggtcttgtaccggcggagcatctcacccactgcccagttgagggcgccggctgccttcttcggatcggtgaccaccggcaccagcagatggggaataccgttgtaaatacccagctccaccaccttggggtcgatcatcagcagcttgacctcctgatcggtggccttatagagaatgctcatgatgatcgagttgatgcacaccgacttacccgaaccggtggcaccggcaatgagcacatggggcatctttgccagatccgccagcatgatgttgccggcaatatcccgtcccagcgccaccgagagcttgctcctggcctccacaaaggcgcccgagtcgatgacctcccgcagggtgacggtggcaatatccttgttgggcacctcgatgcccacagcgggcttgccggggatgggtgcctcgatgcgcacgcccgacgccgccagattcagggcgatgtcgtctgccaggttggtgatcttgctgatcttcacgccggcagagggctgaagctcataccgggtaactgccggaccccggctgatgtcgatgatccgggtctggacgccgaagctctgaagggtatccaccagacgctgggcgttctgcttgagctgctcgccgtccagcgccgtattccggggctggggctcattgagcagcgtaatggacgggaacacatagctgcgctcgggctgggccgctgccggtgccgcaggctccaggctctcctggggcgcggcaggctctgccgccggctgggataccactgccgccgctgccggacgggctgcttccgccttctcccgggctgcggcctgcttctgggccatgcgccggataatctcgtcgatgtattcgtgatccggctctgccggcacttccagttccttttctccgggctccggctccacggcctggggctcgggcgcggggacttctgcttctgctgcctctgccgcctccggaacttccggctctgcggaaattgcctcctcagcaggctcctcccggctgccgtccccgaaggcttccgctgtggcggagacctcccggcgggcaggctggggcgccgctgtatccggcgagaagaaccgccgtgccgcctcggtcagggcattgcgcgcgccggactgctccggctccggttcctcctcgtcctcttcctccgccagcgggtcaaccggcggtttggtgggcatgggtacatcaatgttgaacttgggacgccggggctctgcctctgccatgcgctggctcagggtatccacagcgccgctgtacgcctcgctcaccttccgggcaggcttttccaccatgccggagtagagtcccaccagggtggaaccggtgaggaacatcaggcagatgaagatgcccagtcccagaatcaccagagcgcccaccctgccgcaggcgttcaccagcggaacgcccagcagcgaaccgatgagtccgccgcccttcatggcagcgccctgggcatagagctcagcgaccatctcagtgaacttctcactttcggggacagtgccgccgcccgcctgtaccgctgccgcaatcagcaccgccagcagagtgagcaggatcgcctgcaccttgaagcgggtataccggctgtccgaggagagcacggccgccagatagaccgggatcagtgccgcaccccaggccacgattcccaacaggccgaacatggctttgtgcgcggtattccagatgccttcgccgggcaggaacaccagcgcgcagaacagcagacccactgccatcaggataatggcgcgcatctgccgctgggcacgcagccgggcttcccgggctttggcgctctcccggcggcgcccggtggattttttggttgtggatttttttgtgccagttgccatgaacggacgggcctcctcttttattaccagaccggaaaacgatcaaatctatccttatcagtataacacaaatccggagtcgaaccaagggtgaaacaaaaaaggcggacagtcccagagaggactgcccgtcagaaaaacagggaaacgtcacgccagcatgccggtgatagcctgctggatcacatgaccggagaacagctcgatgatgcccagaatcaccacaatggcgccggcgatgagggtataataggcgaagtaacggaacttgtcgctgaccaccagccggttgaccagggcgattgccagcaggccgaacaccagcgaggtgacaaagccgatgatgacaatatgcagcggcagggcgaggccattttccaccacttcggggatctccaggatcacagcgcccagcacagcgggaatgcccatgataaaggagaaggtgacggcgaacttcttgccaaggcccatcatcatgcccaccgccacggtggagcctgaccgggagatgcccggcatgggggcaatggcctgggccagaccgatggcaagggcatcggaatacttcataccggcggcattcttgccggcatcggggcactggcaggccagagtgagcaggataccggtgacaatcaggcagaggccttccacaatgatgccgtcatcggtggagaagctctcatagaagtccttgaggaataccacaaacaccagcggcagcagggaaacgatgagcaggaagatcatcttgcgcctgggggaaacccggcggaaggtaaaccggccccggaaaatatccccgagcatggcaaaggcctcacagatcagtctccagatggtggggaagaaggcgaggatcaccgcgaacagggttcccagatgcaggacaatggagaaaaaggcgccgctttcaccggaaagaccggtgaaatactggaagatggagagatgtcccgagctggacaccggcagaaattcggtgagcccctggatcattccctgcagaattgcttgccatacagacataagatgcctccttatgtaaaacttgccggcagggtcagagccgctgccggactgagcggtcatcaggtccggaaccgggtcccgggcctgtgccttttttatgattgatcggcctgttccggcagggtacagccgggctgccagtccgcccggagatagtctgccgggcagg

SEQ ID NO: 1185 - DNA, 2069 bp, Unknown
  16S sequences of unknown bacteria
gctgctgatagacaatcaggccactgtgtcagttaacgatgacggaaaacatgttataataatgataaaagctgctatgcagcatggaaagagggatgactatcgatgaaatacgcagtattgtttgattcccgcaccggcaacacggcattgatcgccgaggagatccgcagcacgctgaaacaggagcgctgcgtgggcttcgggagcggcagatgtcgtgttcctgggaagctggtgcgacagaggcggcttcagcgaggagatgcggaaggtcatcagcggcatccatcatcagaaggtggctttgttcgccacctgcggctatggcatggaccgggcatacttccagcgcatcgaggagcggatgaaggagcaggcaggcgcggacaacgacgtgctggccgcctttgtctgccagggaaagatgccggtgagcgtccgccacagatatgaagaactgctcaaagacgagaagatgaaggacgctgcccgtgcgatgatcgccaatttcgatcatgcgctgagccatccggatgaaacggatctgaaacaggcggaagccttcgctctgcgcgtggccgcgatgatcgatgcggtttgagttttgcgcatggaactgatatactgaaacaaatatgatgaggagtgatcggatggaaaagaaaacagcgctgctttgtgattccagcgcggatgtaacggaagaagaggcgaaggagctggggatccatgtgctccggatgccggtgatcatcgatggcaaagaatacctggagggcgtcagcgtgttcgacagcgatatcctcgaggcgctgcgcgcgcagaagaagatcaccaccacccagccaagcgccggcgagatcatgcgcaagtgggaagaactgctgcaggatcatgacgaggtcttctaccttccgctgtccagggcgctcagcggcacgtgcgccaatgcgatccgcctggctaaggaacgctatgagggacgggtgaccgtcgtggattccacctttgtctgttatccggtgatctatatgctgaaggcggcgcgggaaatgctggaaaaaggctatacgtgcgcgcagatcaaggaaaagatcgaaaacgagggcgagctgttcgctatcctgatcccggaaaatctcaacgcgctgaaaaacggcggacggatctctccggcagcggccgcgctggccggcatgctgaagatccacccgctgctgaaggtggagaacggcgggatcgatgtgcaggacaaggtgcgcaccgcggccaaggcttaccgcgtaggcatcgactgcgtgctgaaggacgtcgatcctgaggattacgactggatgatcatccatgcggacaatccgaaggtctgcgatcagctgcagagccagctggaggaagcgtgcggccggccggtcgaccgcagggtgttccgcgcggggatcaaggcccacgccggagaagggcccatcggattcggacggatccgcaagctgaagtattgatcgaaggctgcctgcaggcggccttttttagtgcgcgcacatgcgcgggcgtatgggaagatcgggaatgaacagcgctgcatgcgcatacagtgaggtgaggaggagagaagatggcaaaccgcaggctcatcatcacctttgcactggcattctccctggtgttctccctgttttattacgtgctgttcaccacggtggatttcggcgggggccagcagcagacccgcaccctttacctgaatcaggtcgggatctacgcagagagcgaaaacgcgcagaagatctgcgaacagctgaaggaaaaggggctgacgccgtatcaggtggaagaggatggcagacagatcgtgatgaccagcgtgtatgaagaagaggacaagacagaagaggagggaaagaaactggaggaaatggaacttgcgtacatcacaaagaagatcaccgtggaaggagaggagatgagcacggccgtggatgaacaagattatcagaaagtgctgcaggcgatgaagtgtgaataaaaatgcgcaaaaagggccgacttaaaaacaagtagtaaaaaat

SEQ ID NO: 1186 - DNA, 13569 bp, Unknown
  16S sequences of unknown bacteria
gccagccgcagcgaacgcgaggcgctgatgcagcgcgcaaacgcgtatgatctgctgatcacgtcttatgattatctcaagcgcgacccggatctgtatcagcatctgtattttgacaccgtggtgctggatgaagcgcaatacatcagcaatccgcgcacgaagaacgcgcagtgtgtcaagcagctgaactgtcgtcagcgctttgccctgagcggcacgccgatcgaaaatacgctgaccgagctgtggtcgatctatgatttcctgcttccgggctatctgtatacgcatggcacattcagcgacttgttcgagaagccgatcgtgaaagagaaggatgagcgggccacgcagcggctgcagcggctcgtccggccgtttctgctgcggcgcaccaagcaggaggtgctgcaggagctgccggacaaagaagagcatgtgctgcagttccacttcgatcaaaaggagagagagctgtatctggccaatgcggccggcatccgtcaggagatcgaaaacggtctggacacgagccgggacagcatcgccatcctcgccctgatcaccaggctcagacagctctgccaggatgcgcggctcgtctatgagaatgcggactggatctccagcaagctgcaaggatgcatggagctggtgcgcagctgcatacaggccggacataagatcctgctgttctcttcgtttacttccatgctggacctgatccgggaggagatggagaaagagggcatttcctgttatgtgctcaccggatcgctgccgaaagagaagcgccgggagtatgtggaggcattccagcacgacgacacgccggtgttcatgatctccctgaaggccggcgggaccggcctgaacctgaccgcggccgatgtcgtcatccatttcgatccctggtggaatctctctgcgcaaaaccaggcgacggaccgtgcgcaccggatcggtcagcataacaatgtccaggtatacagcctgatcatgaaagggaccatcgaggaaaagatccaggagctgcagcagaagaaaagcgatcttgcgcagctgttcgtgaatacgcagaacaccaatctgctgcgtgacatgagccgggaagagctgcttgatctgttttcagcggatgtatagcgggcggatgcatcatctccgcccctttttcatatactgagagcggtgaagcgatgaagaagatgaaatggggcgcactactggtctgcctgctggcagtgatgatgagcatccaagtgttcagcgcgcagagcgtcatgccgctggctgggaagaccatcctggtggacagcggacatggcgggaaggatgacggcgcccagcgcggagaagtgaaggaagacgcgatcaatctggccattgccatggaagtgcggaagcagctgatcgagcagggcgccaatgtgctgatgacccgggaagacgaccgcgatctggctgaggaagacagcgagaaccgaaagcgcgatgacatgaaaaagcgggtggaattcatcgaatgcgggttctgcgacatgttcgtctccattcatctcaacgcctaccccgacagcagcgtccggggcgctcaggtcttttaccagccagacagcatgcagagcgagcggatggcgcagctcatgcaggaggagctgtcttcctgcagcggtcagcagcgaaaacagaagccgggcgattactacattctgacgcgcaccaccgtgccgggcatactggcagagtgcggctttttgtccaatgcggaagagcgatcgatgctgcagagcgcggactatcagaaaaagatcgcgacggccatcgtgcaggggctggtccgctatgtcaaagaaacgtgacctggctgacgaaaaaaggggaattttctgttgacacatgaaggatgaaatggtatcatgaatgagcaattcaaaggaacgggcctgtagctcagttggttagagcgcacccctgataagggtgaggtcgctggttcaaatccattcaggcccaccattgaatttaaatgtggggtgttagctcagctgggagagcacctgttttgcacgcagggggtcaggagttcgatcctcctacgctccaccatttaacggatgacggatcttcggatccgtttttttcgtgtttcgacatcgttttcggcccttagcggataagatgatgcgggagggaaaatatggaaaggcaggaagcagtcctgtattatatcggcgtccgagatgatgcgcaggaggaagggcatctgttcatcaatgcgccgatcaacagcgtatatctgcaggagatcgtcgaacagctgttgcagacgcatggatatcgccgcgtcgtcatccgcaatctcatctatctgtgatgcctgtccgcatgccgtgaatagtgctataatagtggctgaacgggaaagggtggtcagacatgacaaaggtaacgatcatttccgggttcctcggagccgggaagacgacgctgattcaacagctgctcaaggaagcgtggcagggcgaacaggtcgtgctgatcgaaaatgaatttggcgagatcgggatcgacggcggattcttgaaagaggccggagtggagatcacggagatgaacagcgggtgcatctgctgctccttatccggcgatttcaagaccgcgctgcagaaagtggtggatgattatcatccggacaggatcgtcatcgaaccaagcggcgtgggcaagctctccgatgtgcagaaagctgtggcggccgtcaacgatgagctgcagctcgtcagcagctgcaccgtggtcgatgtgaacaagtgcgagatgtatcagaaaaacttcggcgagttctttaataatcagatcgaatatgcggacacattgatcctcagccgcacacagggcaaatcggcggatgaggtcgaggcgtgcatgcagctgcttcatggcctgaatcctgaggcatccctggtcagcacgccatgggatcagctggatgggaagacgatcgttgaagcgatggaacatcatggcggactgcgccgcgcgctcatggaagaagaggagatctgcgcggtctgcggtcatcatcacggccatgaccatgcgcatgaccacgagcacgatcatgaacatcatcaccatgatcatgcgcatcatcatgaggatgaatgcggctgtgcgcaccaccatcatcatgctgatgaagtgttcaccagctggggcgcggaaactgcgcaggtctacaccagagatgagctgctgagcatcgtaaaggccctttccgctgacgccgccttaggacaagtgctgcgcgccaagggcatgctgcagggcgaagacacctggtattatttcgatgtcacgccgggagagtatgcgctgcgagaaggcgcgccggattacaccggacgatattgtgtcatcggcgcaaagctgaatgagcccgcgctgagcaagctgttcgaaaaggaaagcggacaggcggcagatccagactggacgatcgaggtggaatgagatgcaggaatgtctcgtttacttgtttaccggctttctggagagcgggaagacgacgctgatccaggagaccttgaacgatcccggcttcaatacaggggaagagaaaacgctcatcctgctgtgtgaagaaggcggcgtgcgctataccaaagatctggcgcagcgtgttcatgcggatatcgtatccgtgaacgcgccggaaaagctgaccgccgcatttatggaaaagtgcgagcagctctttcatccggaccgtgtgatgatcgaattcaacggcatgtggagcgtggatcagttcctcgacgtggagatgccgctgcgctggatcctcgtgcagatcctgtccacggtagatgcctcgacctttgcgttgtatctggccaatatgcgcagcatcctctatgagcagctgcgccacagcgagaccatcatcttcaaccgctgtgacgaaagcacccggatgcgttatctgcgcaacaacatcaaggcgatgaacaagcgcgcacagctgatctatgagcataaggacgggagcatcctgtcttccggagatgaacagctcccctttgacgagcaggccgacccgctcgtgctggaagattatgattatggcatctggtacatggacgcccttgagcatccccgcaaatatgaggggagacaggtcaccgttgaggtgaaggtgtatccggtcaatgaagagcgggcgcatgcttatgtggccggacgggaagcgatggtgtgctgcagcgatgatacctcgctgatcggcatgtgggtatatacggctgatcagaagccgaggccgctttcctgggtgcggctgaccggcaggatccgtgtggaatatgacgaggatttcggcggtgaggtctgcgcgctggaggagatcggccgcgaagtgctggaacaccatgatgacgaatacgtctacttcacataggccgctgatcatcggctcactgacgatggatgtgctgcttcaggtgccacatctccctgcccgccagcaagacatcaacatcgctgcgcagcagatgaagagcggcggctgtgcctataatgtctatgaagtgctgcggcggacagccgtattttgccggcgtggtcggcaagggcgcattcgcagacgctgtgcgcaaggaggtcggccatgatccgcacatgatcttgtttgacagcgatgaggaaaacggctgttgttattgcctggtcgaacctgatggcgaacgcacatttctctgtgtgcatggtgcggaatatcgattccgcgcgcagtggctgtcacagctcgaccccgcttcttatgactggctgtatctgtgcggcatcgatctggaagaagcgcagaatgcgtgcctgatccagtttgccatacacagcggattgcggctgatgcttgcgccgggcccgcggctgacgagcattcaggaacagctgagcctgttgatgccgctgcatccggccttgcacctcaacgaacaggaagcgcagatcatgagcgggcagcaggatgcggtccaggcggctttggccttgcgcgcacaaggcgcggacaacgtgatcatcacgcttggcagcagcggaagcatcgcctgcggcccaaacggcacggtcagccatgctgcacgaaaagtggaagtgacagatacgatcggcgcgggagacgcccatgccggcgcctgtttatacgcgttgagccaggggatgacgctgaacgagatgctggagctggcagacgccacagcagaacgcgccctgcgctgtgcaggcgcatggagacaggagtgatggcattcctgtcttttcgcacatgcctggatcgagcattgcgcaagacgcaaaacaggcaagcgttggaggatcgatgatggaaaagaaaaaagtagcgtttatctgcgtgcataattcctgccgcagtcagatcgccgaagcgctgggaaagcagttggcaaaggatcggtttgatttctattctgccgggacacagaccaagccgcagatcaaccaggacgctgtgcggctgatgaaacagcgatatgggatagatatggaacaaagccagtacagcaagacgatcgatcagatccctgtgccggatatagcgatttccatggggtgtgatgtcagctgcccttatatcggcagagcatttgatgagaactggggacttcctgatccgacaggctgcagcgatgaatgcttcatcgaggtcatcgaggaaattgcgcagaaaatcaacgcgctgtgcgtgaagcgataaaaaaagctgcaagatggacttctttcttgcagcaatcgatggatcgaaaaccaagcgctgttcgataggtcgttacaggtagtcgctgcgatccccgatctcttcctgagccagggattcgcgcagggcctccagcgcctcataggcgtcggccggatcggcgtagatgctgtttttgctcagcatgcggatatcgctctgatcatcgaaggcccagtattcgcggccgtcttccatctcgatgagatagacgtcggtctcgtcatttaccgggtctgtcggtgtgatcgccgcgatgtccagcccagggaacatctgttccatcagctcttcgatctgtcgctgtactctgatcgttgtcatttgaaaaacccccttgcgtgagaagacaggcagtggatattccacagctgtgagatggcatcatagatcagcatgatgccgatgaagcggacggcaaaggccgccgcggtaaatggattgaagatcagcaggatacctgccgcggacatgatgagcgccagtgtcaggttgacctgccatccggaatagccggcatccttcagagacagcgcgcatgtggtctcccggatgccgcaaaacaggaagaagatccccatcagaaaggggatgatggacacgacggtccggtaccgaaagaggacgaaggcgcccaagacgatcagcgtgagcgatgccgccaggcgggcagcgctgcgataaggatcactgagatactgatgcatggtgatgccgccatagacgagcagcaaagcgcccagcacataacagaccagcgcggtcgccgcggtgggataaaacaataggatggcgcccaggacgagcacgatcagcgcattcaggaccatatctttcttgatgcgggaaaaaaggaatttcatcatgcacctgctttctttccatattatagtatggctgaagaaaaaagcaaataaactactgttccgagatgcgggattgttcccggcggatcagcaggcgcatgcctcttcctgcggcaaagccgatgaacgagatcagcgcatagacgatgatcatgccataagcgtccatggtgaaataaagggggatggacggcatgaacaagaggacggagagaaaaggaaacagccaggagaatcttccgcagccgcaggcaaagcagacggccagcgtcagccctggcatcaggagcagcaggatgatcatcgcggaatcagaatcctgcacagacagcggcatgagataataatttgccgccagcaggagcagcgcgggcaggatgtgtttagctcgcttcatgcgatcttccttccttgcgcatgagcagcttctctcgtccgtcctgcctgatcatgacataccctcgtttttcataaaaagccaatgccgccgcattgtcattcaatacggaagtggaagtgatgccgaaacgcttttccgcctcattcagcaaggctgagccgattccttttccctgttcgtccgcatccacgaacagcatattgacgaaatcgccgcatacgccgatgaatccgacatttttttcgttttcccgggcaatgagcaagtgggaaaaggcgtcgatgtgcgcggggagcgtcggcttcaatgcgtcgatatcagcattgtcgaaccaatggtgcgtggagcggacgctgcgttcccatagtccgcacagcatggtgtgatatgccgcgcggcatgccggttcctcgatgatcatggatatccctcctcatgattttcagtataacataaaccagcaaggaaagctttctcttcctgacttgcaattgagggaaaagcggttatacttgagttagaggtgaagacgatgaagatcttatgtatgatggacaatggatttgaagaattggaggcagtgggaacgatcgcattgctgagacgcgcaggcatcacgatcgatgttgccgcggtgaacgggcatgaggccaccgggcgctttgcattaacgttttccgatctcaaggcgctggatgaagtagatcctgatgaatatgacggtgtattcctgcctggcggaccgcactaccagaagatcgagcagaacgaaaaggtgaaaggcatcctgaaggatttcttcgaacagggcaagctgacggcagccatttgtgccgggccgacggtgctgggacacatgggcctgctcaaaggcaggaactatacttgcttcacgagcatggatgaagatttcggcggaacatatcacgatcagtacgtcgtgacggacggcaacctgatcaccggacgctctgcggcagcttccatcgatatggcgttcgccatcatcgaatatgtgctcggccatgagcgctgtgaagaagtcaagaactcggtatactattattgagccgatcagatcgatgagccaaacggaaccggaaagccagcaaaggcaggagggttccgttttttatcattatgatgggacgggtcgtgcatgtaaatgaaagagaaaaagcaaagcattgatcgtcacacacgatccgcgcatcgcacagcgatgccatacggtctatgtgatggaggatggctgtatcagcagaaaagaaccggaatgatgatccggttcttttctgcttatatgctttctctgcgtatggtctcgatcatgctttcttttttgttcaatgacatatggtagcgcatgatgatcaaggtgagcaggatgaggatgaacacaccgatcgcaatgtgtgcaataggcagatagaaatcgaagctgaatttgacgccgatggtgttgtagatgagcagacacagcggcagtgccagcaggatcccatagatcgagctcttgatggcatagaacagcgcttcgaagctgatcatgcggcggaactgttttctggtcatgccgatggacagcagggtggcgttttctgatgcgcgcagagccaggctggatgtcagcgtgttgaacacattggtcacacagatgcaggcgatcaacaggatgaaggcatagacgaacagattgatgacgctgtacatcgtatcctgctgagcctgtccttcctcggcgctctgccagtcggcatacatctgcaggtccgcgttttgattcacgcattgctcgatctctgattccagcgcctgcgcatcgtccgtgctgtaattgatgacgtactgatagtagcggtccgttccttcgctgagccgttccagggtatcctcgctgacatagatggtcgcgccgccgatgtcgctgttttccatgtccagcacatctgtgctgctgatataggcggcgatcggcaaggtgtgggagacggtctcatcccccatcgagtccagcgtcagctctgtgatgcccggcttgagataatcggcctcagcaaaagtgtgatcggcctggctgatctcagaggtgatgtggttggcgaggatgccgcctccttgttccaggacagcctgccgcgcgatcccgttttgttcgcaaagccgctgcagggaagcatcatccagggaggcgatgcgcatggaagaggcgacatcgccgtattgttcccgctgcagctgctggatgtcatcgttgatcagcgagctgtccctcagcgacagatcgatgctctggatgcgcacggcttcctgcgcgtgatccagcgtcagcagcggatcgcttttatggatgtcgtcggggacactgccggtcgaatacgtcagcatgacatcgggaacggtctcgagcgtcatggacgatgcgcgctgcaaataagaagtgaatgtggatacggtgatgaacaaggtcagggaaagggtgagcgaaaagagcacggcgagatagcgtccgcggctgcgtttctgattcttcaaggcaagcacggcctcgaatccgaataccttctggatcagctgggagaagcggacatgggaagcgttgatgtctttggtctgccggatcgctttgatcggggtgatggaggctgcgcgctgcgcaggccgacatgcgctcacgaacagcgtgatgagcgaaagcagcacggccagagcaagcagcgcagggctgatgacaaaaggcatctgcatgccggggatgatcgagctcagcacggcgctgacatgattcagggtcagcgccgtggcgccaagccccgcggctatgcccagcgggatgcaggggatggccaggaagagcgcctcaaggaatacgctctgccgtttctgcgcccgggtcgcgcctacgctggccagcatgcccagatagcggctgcgctggctcagggagatgttgaaggaattgtagatgaccgccatggcgctgacggtgatgatgagcgagatgatcagcgtcagcagcttgatcatgaagaccagctgatcatcgcctgcaacgccttcatataagagcagataactgttgtggaccacttcttcgcagccggtctcgctgcccagcgcatccgcatgcgcatagagcgagctgtccagcggcgtattttgcacatagacgtcataggtctgcgcatcgctgatctgcgtcattccgctgacgaagtcatagccggcagagagcgaattggaagaagcgctgtcatcatagatgccgacgatggtgaaggatgcgcgtccgttggtgacaaatcgttcgtcttctccttcataggaatagttctgcgccatcgtcgtgccatcatcgcgcacgcgcttgcccatggtcagcgtaagcgtatcgccgatctgggcagaaaaggaagagagcgaagccagtgattcaggcagaagcacttcctgcgatgtcttgggcaggcgtcctttcagcagcggataagggcgaaacgcaaagccatccgcatcgacggcggtgatatagaaataggggcgtctcacgttgtagatcttttcgctccgggcgtagccgacgccttgggtaacggcgcaggcggcgctgccttcgtcctcgcagatccgggaaacctgatcgccgggcacgccggcatattcggtgtgccagtatccgctggtatcgatctcgcgctgtttcatgccgttgatggcgctggcggccagggtggtgatgctgcagagcatggccgtggcgatgatgatggccagcatggtggccatcgtgcgcctgcggttttccttcagggcacgcagcgtcagccgggcgatcagcttcatcggcggatcacctcatctttcacgatggcgccatcctgcatggagaggatccgatctgcctgcagggcgatcgattcatcgtgcgtgatgatgatcagggtctgatgatattcccgatggaactggcggaacagcgccatgatctcctggctgttgtgtgaatccagattgccggtcggttcgtctgccagcacgatggctggcttggcgatcagcgcgcggccgatcgagacacgctgctgctgtccgccggaaagctgagcgggcagatgagacagccgctctttcaggccaagcgcctggaccagcttgtcaaaataatctttatctggctttctgccatccagctgcagaggcagcgtgaggttttctttcgcgttcaggatagggatgaggttgtaaaactggtagatcagtccgatctgccggcggcggaagatggccagtgcggattcatccatctcatagatgtcgcagccgtcgatgaggacctttccgctgtccgggcggtccacgccgcccagcatatgcagcagggtgctctttcctgagccgctggggcccatgatggccacaaattctccttgctggacagaaaagctcacgtcatctagcgccgtgacctttccttctcctgtgccatagcttttattcagatgtgtcacttgtaagatctccatgtgatcgtcctccttttccttcatggtacgaagcagggatgacagaagcgtgactgggaaatgacacatctgtcatgcaaaaaggcatcatgtgtctgatgcctgaaacaataccgtaaagcttgcgccgctgccgggctggctgtctgcgcggatgtcgccgtgctgagcgcgcaggatgggctggggcatggccacgccgatgccgaccgagccgtcagcggcatgtgtcccgcggtaaaagcgctcgaagacatgcgccagctcttcccggttcatgcccggtccgctgtctgtgatctgcagcgcggtatgcaccggcgtctgccttgcccgtatgcggatcgtgccgttggccggcgtatgttcggccgcattcttgaggatgttgagcagtgcctcgctgctccagccaggatcggtgcgcacctggatgctgcccacgtccatgtcgatctggatctgcttgtcctggatcatggtggtgagcggctccagcgcgctgagcacaagctgctgcagcgtgacttgcgcaggctggaaggtgatggcgcacgcgtccatgcgcgccagcttgagcagggaggagaccagccattccagccggtccagctgctggttcacgcagctgaagaactcctggcgctgcgcttcgggaagatcctgctgcagcagttcgttcatcatgcgcatggaagtcagcggcgtgcgcagctgatgagagatgtcgctgatcgtgtcggacaggaagagccggtctttttctgactgcttttgctgctcatggaaggtgcgggtgatcttgtagatgtcattgcgcaggatgctcaatgcgccttcttcattgtcgcggatatcagtatgcagggaattgctgtagacgcgcatcagctgatcgctgagggtgcggatgcggcggttgaccagatggatgagcgccgcgctcaccgcgttccacaacagcgcgctgagcaggaagggcaggatcagctgcggggcggtcagcagcaggatcacggtgatgagcaggcacagcgccaggacgaagagcatccagcggcggatatccctatgattcacgcagcggctccatgcggtagcccagaccgcggatggtggtgatgagcacagggttctgcggatcggcctcgatcttctcgcgcagccgcttcatcgtgacagaaagcgtgttgtcctccacatactgccctttgttgtcccacagcgcatccagcagctgcgcgcgggtgaggatctgtccgggatgatgcaggaagaacaggaaaagctgatattccatggcggacaagtatacttcctggccgtttcggaataccttggcctggcgaagatccacgcgcagctcccggatgcggatgatgtcgtcctgtctgtcttgccggcggcgcagcacgctgcggatgcggctgagcagctcctgcaggcggaagggcttggtcacataatcatcgccgcccatgtcgagccccttgacgacgcacatctcatcatcggatgccgtcaggaagatgacggccgcgccttgcgcgcgagccggctcacataagtcgaatccgctgccgtcaggcagggagaggtcgatgagcgcaaggtcgaagcgctgtttgctcaatgcgtcgcgggcctgttccaccgacatgcagatacagaccgcatatccttcttttttcagcgtatagtccagccccatggtgatggcgctgtcatcttctaccagcaagatgtgcatgttgatcacctcatctgtgttcagtatagcataatccgcctgaggaaaagatgatgaatctgtaacataaggcaggcgttttacagacattcgctcaggaagcaaggcgcgtgcagcgaaagcggttctctggccatcagcacgggaacggtctcgcttttccctgggatgttcagcttcggggagacgatggccgctgtcgtctt

SEQ ID NO: 1187 - DNA, 6425 bp, Unknown
  16S sequences of unknown bacteria
atccagatcctgtcccgccgcaccaagaacaaccctgtgctcatcggcgagccgggcgtgggcaagacggccgtggctgagggcctggcccagcggattgcggcggccgatgtacctgaggaattactgaataaacaggtgctgtcgctggatctgtccggcatggtggccggtaccaagtaccgcggcgaattcgaagagcgtatcaaaaaagcgctggacgaggtgaagaagaacggcagaatcatcctctttatcgatgagctgcacaccattgtgggtgccggcagcgccgagggcgctatggatgctgccaatatcatcaaacccgccctgggccgcggtgagatccgtgtgattggcgccacaacgctgaacgaataccggaagtatattgaaaaggatgctgcgctggagcggcgcttccagccagttacggtgggcgagccatctccggaagcctgtctggatattctgaaagggctgcgggacaagtacgaggcccatcatcgcctgagcatcaccgatggggcgttgcaggcagccgttgatctgtcccgccgctatatcaacgaccgttttctgcctgacaaagccatcgatctgatggatgaggctgccagccgggtgcggatgaagaacgagaaatcctcgcccgatctcaaggcgctggaggagaagctctccgccctgcgccgggagaaggaagaggccgtggccgcacaggactttgaaaaagctgcgcagatccgtgacatcgagcaggattatgaaaagcagatggagattgagcgggacaactggcacaagaaggtggccgcggagcacggcgaggtgaccgaagaggacatcgccgccgtggtggctgagtggaccggcgtgccggtcacccgtttaacggaggacgagggccagaaactgctgcacatggaggaaaccctgcacaagcgtgtggttgggcaggatgaggccgtgaaggccattgcccgggccatccgccgtggccgcgtgggactgaaagatcctaagcgccctatcggttcgttcctgtttcttgggccgacgggtgtgggtaaaaccgagttgtgcaaggcactggccgaagccatgttcggtgatgaaaacgccatggtgcgtcttgacatgtccgagtatatggagcggcacaccgtttcccgcctgatcggctcgcctcccggttatgtgggccatgaagagggcggacaattgacggaaaaggtccgtcgccgcccctacagcgtagtgctgttcgatgagatcgaaaaggctcacgaggacgtgtggaacctgctgctgcagattatggacgacggcgaactgaccgactcgcagggacgccgggtagatttccgcaacacggtgatcgttatgacctccaatgtgggggcaaaaaacatcaccgcccagggaaagcggctgggctttgccgacacagacgccgagaacacccaggatggagagaaatcctttgaggcggtcaaggatgccgttatggccgaattgaagcgcactttccgtccagagtttctgaaccggattgatgaaaccatcatctttcatcctctgaatgcgcaggatattgcggaaattgcccgcaagctgctggccgttacagccaggcgcgtagagggtttgggtatttccatggaagtggacgatgcggcggtggagctggtggcgaaggaaggctttgaccccgtttacggtgcccgtcccctgcgcagggccatccagagcaatgtggaagatgctgtggccgaggcgttgcttcagggcgaagtcaaggagggcgaccacatctgtgccacggcccaggacggcagaattgccattatccgcaaagccgaagttgccgcggagagcagcgatgctccgacggagaacagcaatgcttgagcgttaaacaatacccgtaaggcaaccccttttggagccgccgggaacagctgattcccggcggctttttcgttttctccggcgccgctgtgccaggggcggcacaaaaatgcggcagatgcttgtaattttgcccgttttcccgtatactacaagacaatgaaggaaaaaaccgatggatacagaaagcgaggaacaacagtgaaaattgactttaacgccggaggattcggcggcagcccgtttggtgcgggcggaccttttggcggttttgatttcggcggtgcgtcggctccgcaggaggactaccaaccccagaagagcaaaaagagagctgccaagcccatccagtctccggtgcggcgtacgctgaccaatttgctggtgacggttgtgttcggattgatttatttttatgtggtattgcctccgatcaacctgaaagcgccggaattttattcgttcgtattcctgctctgcgcggtttactgtatctgcgctgtgatgaccacaggctttcagggggacggggccaaaggatatttcaactttgtgcgcaaacagtgccgcatcccgttttatatcgtggctgcgctgattgcgattgcgctggtgggaggcgtcctctcttccgtgatcctgcgggcggatgcctaccagaagctgctgcccattgaaacggggaattttgccgaagaagtggatcagctgagcttcgatgagatccctgtgctggatcgcgacagcgccacccgtctgggtacccggaagctgggtgaactgagcgacatggtcagccagtttgaagtggaggacgactatacccagatcaattaccagggaaaacccgtccgcgttacaggtctgatgtacggcgatattatcaagtggttcaacaatcgggccgaaggtcttccggcgtatttgattattgatatgacaacgcaggaagtgacggtgcagcgcctggaagagggcatcaaatacaccacagccgaacacttcaaccgtaatctggtgcgccatctgcgcttccagtatcctacctatatgtttgccacgccttattttgagattgacgaatccggcgcgccttattgggtctgcgcgcggatggataaaaccatcggcctgttcggcggtgtggatgtaaaaggcgcggtgctggtaaatgccgtcactggtgagtgcgtgtactacgatgtggaggatatccccagctgggtggatcacgtctacagtgcggatcttattttacagcagtacgattattatggccgctatcataacggtttcatcaactccgtgctgggccagcgggatgtaacggtgaccactcagggctacaactatattgcccaggatggggatgtatatatgtacagcggcgtcacttctgcggggacggacgcctcgaacgtgggctttattctcagcaaccagcgcacgaaggaaacgcactactatccctgtgccggcgcggacgaatattccgccatgtccagcgccgaaggcattctgcagcagatgcgctatacggccacattcccgctgctgctcaatatctccggcgagccaacctattttatggccatgaaggacaacgccggactcgttaagcagtacgccatggtcaatgtgcaggagtatcagatcgtggccacgggaaccacgccagaagcggcagagagcgcttatctgcagctgctcatggagagcggcacgattacggctgacgacggtcaggcgctgatcgaaaagacgcaggccgaaggcactctcgcagagatccgcacggcggttctggaggggaacacctattacttcctgcggttggaaggagaggacgttttctatagcatttctgccgcacagtgctccgatgtggtgattatgaacgtgggcgacgcggtcaccatcagttacgctccggcggagactggatcgatcctggacgcatacagtgttgcctggaccgataaaccgtccggcagcgcctggcaggcgccgcagcaggacgtggcagaagctgcgcctgcgggagaaacagaggaaacggaaccggtgctttgagagaacggcccgccccaaaaggctgctgaggggcgggccgctgcaaagaagcgaaaataagaaaaaaggcatggtaccatgccttttccgttcccgtacgggaacggaatgagcattgcgccgccgaagtacaaaagagaaggcggaccgggcaccataaaagctgcgggagggggagaagcatggagattaattatcagaaaatgctggaaactatcatggacgcactgaattatgcgacgttggtagatgagaactgcaggattatttacatgagccgcagttactatgaaggcgtttatggcctgagccgtgacgatatcatcggccggcatatctgcgatattgtcccggattctcgtattccagccattctgaaaaacgggtgcgccagtctgggggaatattactatttccagaacactcgggagaatacgtttgccaatcggtttccgctgtatgtggatggggaattgaagggtctttttgctgaagcggtgatttacagctttgacgatgtagttcacatgaatgagctggttcatgcactgaaacgggaaaaccgcattttgaaaaaagaactgctcaacattcagaagcacaggcacggcctggagagtattgtgggaaaatcggaggcgttgcagaatacaaaaaaactgatttccaagtttgccaattccaatctgagtattttgatcaccggggaaaccggaacgggaaaagagctgtatgccaatgccattcactatatgagcaaccgctgcaatatgccctatgtcaaaatcaactgcgccgccattcctggggaactgttggaatcggagctgttcggctatgaaaagggagcgtttacaggtgcttcggaaaagggaaagatcggaaaatttgaatatgccaacggcggcacgattctgttggatgagatcggagagatgccgctgtttctgcagtccaaactactgcgtgtgctgcaggacaagtgcgtggagcgcgtgggcggcgtcaagccgattccgctggatatgcgggtaatctgcagtacgaaccagaatctggaagaggcagtgcggcaggggcgttttcgaagcgatctgtattaccgtatcaatacggtggagatcaaggtgccgccgctgcgccagcggatggaggatattgcgcccctgtgcgaacatatcattgcgcaggtcaacgaagagaacggtgtgtttgtcaccggtatccagcagcaggcgctgcgtctgctggaagaataccagtgggaagggaatgtaagggaactggagcatgtgctgcagagggcctgtgtggccgccggtgcgggggaactgacaattcgggattttgattttttgctggagcgtatctttcggcattccgcggcggaacaggagccgggcgctgtagagaatttggcggaaaagacggcgaaaacggagcgggaggaaattataaaagcgctggtgcagaccaatggcaataaaagcaaaacagccaagatcctgggtatcgaccgcacggtgctgtattctaaaatcaggaaatataaccttaaaatttgagcttacactgtagtgttttgctgcaaagaagcctgcggcgatgtcgttttgcacatcgccgcaggcttcttttttgcgaaggaatggcctctcattcggacggccgatttgaaatttttctacaggggcagggacttccggagataggagctgttcaggggaggtgcatggcacgccatttgcaggaaagaggcagacacgagaaaggaggatgttcatggggctttatcaggaagaatatcggcgcaaatgctgcacggcggaagccattgcagaaagaattgaaagcggggcggtctgcgccagcggcacatgcctcagcgaaccgtgttccattacgcaggcgctgggggcggccttgcggaatgggacgcggacggggatcgtacatcatcagaccatgtcggtttttccatcgcctttttttgacgacacactgcagggtaaatactctgccgtgtcctggttttccacagcttatggccgggctgctttcgaaaaaggctgcgcggatgttatgccggtttattatcgagatgtcccgggacaatataggcaatttattgatctggatgttttttatgcgacggtttcgcccatggaccgtcacggctatttcagtttcggcaccactgcggcggagtgccaggcgctggcggaacaggcaaaacatatttttctggaagtgaatcccaatatgccgcgcaccttcggcgagcagcagattcatatttcgcaggtagaagcgctttgcgaaaccgacgttccgctgcaggaggcggccccggcggagatcgacgaaatcagccgctgtattggcggtcggattgccgaagaggtgccgaacggcgcgacgattcagttggggat

SEQ ID NO: 1188 - DNA, 24577 bp, Unknown
  16S sequences of unknown bacteria
gatccgtggtgttgtctgcattttactaaatacaaattcaatgtatacagaaagatataaggagtgggagggattccgccgtagttggcattgtaggaaaatccaaaagtttagattttcccacaatgcttcaactattgcagcaaccttatcgagcaaaacagaacgtgtaaagtcatttatcccttgaaatctatcaagttctaacacctgatgtttcaatgaatcgttttcctttgttaatctttcgacttgctctgtcaattcttctatggatgatagtgattgaagtttgttattataacttccttttaagatgcttgatattctactcaaataacctgcaagtatatcagggtccgcctcatccaagaccagttccaactcctgttcagactctttgccaaacaaataaaatatttttaattgcttgtccttaggtatatctgaaaatttctccaaattacggtaattataaatcgtagctttggagatctccaaatactttattaagtcggtaactttgatggaaaattttgttaccaagcgttcaaataattttgtatacattttaccatcctattgttatattttgacgatattataccatttatatcttaatatgtcaatataatacagtccaaaacagtataattaaactttaaatattaattttaacgttaactggtttcagtgtccataaaaatatgtcacagtcttgatacgagagtggcgccgcttcgcgccgccgcgacaagcacacgccacgaaacggaactcgactgaaatacggaaaagcggagtgatgacggaagcggagtcgcccgctgacccgcttgggcgatcttccgctttcaccgtcacacattttccgttttcagcccgtattttaccattcgaagttcagttgcatttccgcattttgtcgatgacgcctttgctgacttgtcccatgtagcagccctcgtcccagcacgaaaaatcatcgtagaggagcagcttcttatcttccttgccgatagggcagacgatgtcctcgtccataatgtccgagatgaaaaactgcggcagtcccttcgagtagaccattttctcgccggtcttttccatatacttcgtgagatatgctatcgcctcgccgagcatagagcggtcgtctacggtcttgaagtcggatcttccgaacctttcgttgaagtatgtgttctggatcgtcgtctgcaccttcttcttgatcggcgaatagtccttgacctcaacgagttctccgggcatcgctccgtccggaatgaagaacagcccgtggaagtgaagccgcttcttttcgggagaacgctcccacaccccgacatacttccagcccttgcggtggcacatcattttgaagcatccgcgcagcttcctcataaagctctcttcggtatgtttttccccatcataggtaaaagtgcagaagtagttgaagtcctgcaaattcaccttacgagtgagcctgatacgccgactgatcaggttccgcaattttcgctcaaattgcacttccacatactttatcgtgctatcttcgttattgaagtatggtttcatgttgctgacgataaatttctttctcgcacttcgaagttgtcctgccgacatctgatacagctcttcaaacagttccttccgcgtcatcgtccgcgttttcggtttctgttcaacggtcggtttcagttgcgtttcgttcgttgcaggcaaagaagacgcatcgtcatcaatggacggtgcgctttcttctgcgtttatggtttcttcctgttctgtggtctgcgactcttcctgctccgtcacctcgatttcttcttccggcggacggaaacgccgtcttgacggccttgtcgtatgcggtatcgctatgtaatgactgccgtcaaaatacactttgcattcgccataagacatggttgcctccttttgccgtaaaggaaacggacagccctaaatcacgcagaactgtcgccgtccgcgtccctgtacagcgaattgatgaaataactgttctgcattttgagttcctccaccgaagccttttccgtagcgtattccaagtagtccgcaagccctgtatagctgcgccgcgccatatcgttgaagtagtccgagaaacagtccgtgctgaaccgctgtgcatagatcttcgcgctcatcaggtaatacttcttattttccgtcttgccgtccatcgtaccgcgctctttctctatcttcagaacggaatagccgaagcgattgtagatacgcaggtttctccgccaaagccatgcgacaacgcttttgaggatatgcaccagcaaggtattgtccccgcgcctgaaacggaagtcataatacaacgacaggaagtggttgaacgcccactccgagagcatttcctctatcgtataaaacggcaaagcgagccgcatatcaccgcacgaagcgatgttgatgatgtccgcaaggtcgcgcgcgtccgcaccccaagactccggtctttgctcgtccgtgaatacctttataaacgggaagttgtccacggtggcagagtgccggcacattttcagccagctattgaacaagtcgttcttctgattggtatcgtccgcacctttcttgatctcccgaagttccagattgttgccgcgctcttttcctatctccgtaatgcctacaacgccgaactcaaaactgcctgccttcggattgttttccaagaccttgcggcccaagcgcaacacatcgaaatcgaggatatgcgcgtgcctgctttgaggtcgtctgcgcttcgggaagaagtccgtaatccacatcggaaagttaccgttatccgccatcacattatccgctcggacggaatagttcgccacaatgaggctgctctccaagacatagatgaagtacgccatcgcgtaggttcccagcacctcgaacaaacggcttattttaagcgaatcgtcaaaagtggtaccataacgcgcataatcgtatccgtaaagctgcgtttgcgcgtttctgtgccgtatgaaccttgaccgcttcaacgccacccaagccttgaccgaggcgagattgtacaccgtaccgtgctccatacaccgccgcagttcgtcctcgaaggcaatccacgggaagtacgggaatttcatgtcgttctgttgcaagatttcaagtgccttttgccggaacatcacctcttgcgacagcaccatatccgtaatgagcgtcgtctttttcttgcccattgagccgcacgccatactgactatcggcagttcgtttatgaagccgcaattcctcgcctcaaagtgccgcagtctgttctgcgcaatatttttccgccagcggtcgaacagcagccagcagacgaacgcgatacaccaccacgggaagtgccggaagatgacctgcaagtctatgaacagcttgcacacctgtacatagaggttcgcgacatcgaagctcaacacgaagtagaagtagtacgcgagaaagcccgtgacgatgcttgccgcgttcagatgaaaagcccacatcaccgcccagaggatccataccgcccgatgctccgtgagaaagtcccgatacgacaatacagttcgtttcaacggctgatacagacaccgcgaaaatgatttgaacactttcagcggcacggtgtccctgttgtgcttggtgttgccgcttttatacagccgccagatgaccagccccaagataagcaggcacggaagaatgatagccacgactttcagcagcacgagcatcacatctccgaccttcgcccaatagcttgcaaagttctctccgtctatgagaagcgcaaagaacgatttcgactgcgaagtgaagccctcaaggtcagatggaagcagaatactccaatccatcaccgaagaatactccgtgacggacggcacgatgtcatgatccaagccgaacagcgtgcagaaatagtacccgacggacaggccgaagtctttggcggtctcgccgaagcgtaggtaagagtcgccgaacacaaacgcgccgagcaggataaacgccgccgttataacaacggtaagacagatattaaatgttctgtgcctgttcatagaccacctccaagattgccgtgctctcttcaacggaagccgttcggctaccggtataaaccaagtagccgacgaccaataccgttacgaccaagagagcaacagccaatattctcctgaccgttttcatttacacctccaatccgtccacatcgtcgggcggtttttgtgtctgctttacggcaggttctttctgcgccttcgtttccgttttccgctttcgtcgattgtctatccctttgaacagagccgctatcgccctgaacggcagacagatgagccagaacagaaatttgaggatatacggtagcacaggcaacaaaatgatgagtaaaacgatgatcagaagcaccgcaagcaggatctgccaccacgggatctcgtccggcatctgtacgggcggagttatcgcgttgacgatatccatagggctggacacaacggggatgaccgtatatacgccgtcccggttgaaggtaagctgaatgatatcgaaatcgaagaacacgctctcccaagcacgatatgcctgaccgctcgtatgcttgtccggaaggatggtgcgaagttccatgatgtccaccgctgcggaatagtagtccgtagtggcgaaacggaacagtacgacctgcttcttctcgtcgtccttaccgctgaccgtcgttgcgtccttgaaataattacggagtgcctgcacatcgttggcattgatgagaagcctgtccgcaacttcattgtcgttgccgtccagatcgctttcctgcacaatgtagatgggcgaaacggtcttgctctcctcttcgggaatgccgccgaatatcgtgtcccacaagccccaatttacccaattatcccagaaggacggatcggtttcctgccagctcgtcagcttctgcaagtccacatcggcgtcgaagtcgtaatacgaatagccttgctgtatcctgccgaactccgtatccatcttgcggtagtcatcaatgtcgtccgcaaacaagtccgcgcttatcgtgccgtctttgatgggcagcgtgccgttgtcaaaggtcttgttgtagtttcgtatgtactcgtacagcgcattgctctccacgccgcctatggacacgatgtccgcatacggatcgtactcctcgatgtcgtctaccttgaacaggtaatagagtgcaggagcgggaacatgaagataacccgaacccaaattccagccccacttggcgatcatcattccgccgccaccgtctcccgcattctgtcccaatgcgtagtggatctcttcgttatgttccgtcataccgaactgatcgaaatcgcccgtctgtctgcctatccacggatacgctttgtcatagaaatcctgattgctcgtcacgacaatatctttggtcttgtactcataccattccgccttgatgcgctgcaatttgccgtaagtatcgaagaaccgctgcggcacggcgaaatacaccgtatccagctgattctgataccccgcgcccttgctcgaagtctgcgtgcggtagaaggtgtgtttgacatccagcgtgatggtttcgagatactccaccgaactttccagcgtactcttcgcacccgcgtccggaccatagcctgccgcatagcccgtgaatttgtatgtgccgttcacgggatactcggtcgcgttatttgcgccgtaagtcacaagttcaatgccggaaacatcgtacctgcgctcgttgctgttcactctgtccttgaatgtcgttccatttatctcgcggtctaccaccttgaatttgtagaacaggttcttgtagttgctgtcctcggacttgctcaaaaactgcaggtcaaacttcgcataattgttcggctttccctcggaatcatacgacaccgccatctggatcttgttgctcttgctgttcgtggagatgttcagcccttgcggattatacacatagacatacagcccgtagttactttgcatattacccttgtacgagtagcaatactccacgaaattgacgatctgcgcctgactgtcctcgtcatacggatagtccttcacatcgaagggctgcccgttcacggtggaagaggtaaggtcgtccatgacacttgtcttgtcgtaattgagttcgccgctttccgcataagcgatattcggcgccgccgaaacgacgacaccgaacaccattaccaacgcgataagacagacgaatatcctttgccttaccgtgctcaaaactctatcacctcctgatccaatgtcactcccgccacttcctgtaacacggagaaatagagcgtaacgctcgctttgccgttatacgacgtgacgatgagcgcgtacatatcctcgtagcccttgtcgctgcaatcgccgatctcattgttcgggtacacagcacgcagcacttccgtaacgccgcctttgggcgttatcgtgaaagaggtttcctcgcgcgctatgtcgaaccccgccgtcaggtcggtttccgcctgaaaggaatacacctgatcgtccagagtgaagtcgaagtctttgccttcgacggcgtgagggacgactttgacggaatagccgctgacgtcgcctcccgcagagccgaaggtgtacttcacatcgacggtgagcggtttttcgttggtgatttcatagccgcccgcgctcgtgaggatgtcttttccgtccaccgaaacgtagaaggtcttgaaatcgctcgtgaaaccgcccgtgaacctgacgatgactgcgatcacgccggcgacaacaagcagaacgagaatgtacgctataactttgcctacggtttttcctgtttgcttgttcgtgctcatggctcacctcagaaagttacgatgtcgtccgccagcaccacgttcgtgaccgtcttgacgggacggactttgaaagacgtgctgacgccgctgttggtttcggtgacgatgacttcgtagtaccagttgtcgtccgtgtactcgcggaacttattctcataggtgatcatgttgccgttacgcacggaactcgtgtagtagctttccagcgtgcagttgacgttgacggtcagcttgttgccgctcacggaccagtcgaacacgctcggctcatacttggaaaccgtcgtgacgtccgcgatgttcacggtctgctccgtgccttcttcccatgtctttccgtcattcaccgtgtaataatactgtgtttgtgtcttgaagctgccgtgtcctttcacctcgaaggtgtagttgcattccgcacccaccgtgccgaacacattgtccggggtgatgtcgaaggtgtaggaattgccggctccgatctcgtagtaggtgccgaagctgccgctcttgagcgagagcgcatcacacgatacgtttaccgaggaaggattgccgacgaacagcacacggcaggtgtcgaagaacgcgccttcacgggaagtgaccgtgacaagggcttcgccgtcaaacgcctgcaaacaggtgagctgcgcggtcgcgcttccgtccgaatcgggaacaagcgtcagatagtccgaaatgtcccttgtttcttcggtatccagccattcgatcgtccagtccacggctttgttcttggcatcttccggatagacatatgcggtaagcgtcttactgacagaaccgtttgccgccgtcactgccgcggaagcctgcgagagcacgagcttctgaactttgacttcggctccctgcacgccgccgctcggaacactttccgtgttgttgtctgcgggcttgacggtggcttccaccgaagtctgtcccgatggggaagtcatgttcgcgcccagcaccccgatacacacgacgcacgcgatgatcagcagggagagaagcaggatgcagacgacctgcgggttgatatgcaatttctcatttcttgcgtttttcatagtccctccttaaaacttcatctcggtcgcattgacggatacgcccgtgaccacctcgtcatcaaaacggacgtcaatgagcttgctgatgcccgaattgttttcggtgatcttcacttggaaatagcagtcgtccacaaaagagcggaacttgttgaagtaggctgtggtacgaccggagtctatcctctgcgaacgctcgtagtagctttcgatggacttgatggagttcaccgtaagcacgccgttcgaataggtgacggagataaggtcgtccttgatggtatccaaggataccgtttcgtccgaagcgtcgtaccagacatctttgccgctctggttgtagtgctccatatagccgaggatgagattgccgacgccgtacacttcacagctgatgtcgtcatacccggcacccacttctccgaacggattggtgagggaaacattgaaggtggacgccacgccgatacccacgacgtagtctccgttttcctgtccgatgttggtgtccagcacgatgtccgtaggcataccgacataggtcacgacgcaacttgcctgatacccgttttcgcgggtggtgacggtcacgatgatgttcccggtgaagggctgcttgcaggtgacggtcgcaaccgtactgccgttcgaagtgggcgtgaccgtgacatattgcgtcacgtccgattcattgctttcatctccccacgcaacagaccagtccacatacttgttggcagcggtcgcgggagcaacggtcgccgtgatagtcttgctgatggagttatttgccgcagtcacggcttgagcactcattttcagggagataaactccgtgttgtgcattgttgcttcaaaatcaccggctgccgcttccgcattgacgccgccttcggtttcctcggttttgtccggagcggacatgacgagggaggcgatcatccctgcgaacagcacgccgatgagcacgaacacgatgatccatttcaccgcgtccgatttcttgtgttcgtaaaattcgttgttcatgttttacctccgaaagatttgaaaactgcggctcgcggtttcccgtaagccgcagaaacacctcggttttttatgccgcccgcttgacgagcatggcgagcagggctttgtcagaattgcggtacggcttgacgctgcactcgtagatctcgccgtcttcgtccaccgtctgcacggcgtaggaattgcccgtgatcactctgccggtagactcgtccttgatctcgtacggcttcaggatgagttccgctgacatctcgttgccgaacacgatatccagcacggtatagccgcctttatcgggcggaacgaccgccaccttgacatccttgccacgaatgacgcccttgatgaagtaggagaagaaagtcctgccgtttttctcgaaagtttctctttccacgaaaatctgtcttgccattttatcctccattatttcttgcctctggtctgcgagatagccctcgcttcctgtttgctcttgccctcggcgagagctttcttgtacttgtacatgcctgcgtggtcggactgcgcctgaagatacccggagcggatccccgcctcatagtccgtcagttctttgccttccttcggtccataggtatgcacctttgcttttctgtcctccgcatagccctttgccctcttggaaggaacggaccagcggcgcttggaatacttatcttttgccacttttgcctcctgaaatttgaattttggttgcccgttttgccgttagcgaagcagtttgcccgtcatgccgatagcccagcgattaagttgtaatatggtaacgaacgctttatttccggaccgctgtcctatgcgatgtcttgcggtgagtggccactcttatccttcgaagtaccgcataggtttcgccctgatgttctttgcgttcggttacgcctcggtcagtcgatgtacatacggatgtaagtgttcgacggaagacgcttgccgttgatgtgcttacgatctttatacagaagctggtacttgctgtcgcgtacgagcgttctgcggtaataagtgtccacactcaaaacggcattgttctgttcggcgtcaacgatcaggtaaagctcttgctttactatgtaatcgcgcgtccgatagacattctcatacagtctttcgcgttcggtcttgctcatttttgctttctccttttcgcttgttttttatgaaatcagcaagttgctgttcataccgacgcatcatgcactcggaaatccgatggatcatatcttcctgttccgccggtagggggctgccttcttccgcacgaaccttgacatacaacggcaccgtgaccatctcatccgattcgctttttcttagcccgatacaagctaccatttgatacctttcgaccatccgatcactcctttttgcaaggtgtcttatcaaccccctcacttagaagccacgaaaaaggcaaaaatggaccccctttactgaaattcttttttgattttgctataaatttttttcaatcggttccttatggcggtaggatctatgcctaattcggccgctatttccgactgcttgcgcccacaataaaacacttgctcaactagccatttttggtcatccgttaaaacggctaacgcacggtgcatccggtcaatgtcgtgctgttttatcagagtttcttcaatgtcggagtccggatcggctatttggaatccgccttctacaagagtttccaacgactgatgccgccgtgtttctttgcgatttacgcgcttttcctcttcatccatctgctcatacagtgcggcaaattcgtccgtaacttcgacctcaacacgggtgccgttgatttcatatctgatctttttcatgtgatttccttccccttgtgctcaatgggggcgagcgatttttctaaatcgctgtcggaaatctttgaaaacaaaaaaagacccgacagcagtgaaccaagtcactgccatcgggagaaggcgccgattttcgggaataaaaaagaaccccgacaataggctcgtcacttctattgtgacttggctctattgtcagggctcttcgcggttcttatctcaacctttaaggtctgccgtatccagcctctgcgccaaacactatgtgcttgactaacaatctcttggaacgggtagtacctcttaacggttcgcttcgatactcttcggtatgccgagtacaggttttattctgccgttcctcaattattcagttgtagcttcttcctatattttacgctgcgtcaagctcttgattttttcgacttaactgcgagcggcaatgcgtgaacgccaccgtctttatctaccgtgccttgaacgactatcttgcagacatggcaatgtaattccacttcgctgcctatttttgcacggcacaataattttccgcattgaggacaagtaatgggctttaatgtcatacttattatcctcctttccccatagtcacttcgcgggtatttgacaaccgcattgcgggggctgggcgtccctccacacggtatgccacgcttattgaccggccctgttatcgtagggcatccgattaaattgtttaaccctgatcactcactccgaatcagggcatttttccgacatctcgtctcggtctaatactttgacatcatgtcgagttccgcactttgcacacacaaaactcaattcctttccgttcctttctacatcttcgcatctcctcccacattttgaacagtagactttcgataacacaagcaacacctccttttcgtgacattacacaaactgcacgacaggcttttcgataaaccaccttcgcggattatcttccagatatagcgctcgctcctgtccgcataatttgaccaaatatttgatagtgctgctactgccaacgaattgaggcggagacatcgtgatcttcacaacgctgtccacatcgaattctcgctcatcccacagaacctttacgggaataaatgttccgtccgtgcgcatctttaccagcacatcaacataggtcttcacatactttacagcgcttgccatccgttctttctactcctaaacgacatccttgatcaccttgacgactatgccttgaatgtctatgctgtcgaaatacatatcctccatctcatcgttttcagggtgcaacctgactttgcgccttcgtctatcagtgtagaaccgcttcaatgtcgcctcgtcgtctatcaacgctacgatgatctgtccttcttccgccgtgttctgctgacggacaataacaaagtcaccgtcctcaatatttgcgtttaccatactgttgccacgggcatggagcgcaaaaaagttacccgttccgagtatcgaagaggagatgggaatgtaactttcaatgttctcctcagcaagcataggcgtgccgcaagcaatgctgcctacgatagggactcggactgtgtccgccaagacctttgtcatcttttttgtcctgatccctcgccaaccgcctgttgcctctatcaaaccgcgttctttcatcacttgaagatttcggctcacattgctcttattcagctttacagcgtccgcgatctcctgcatagtagggacggtattgtttgtaaagaagtactcgtctataaactctataatagagttgaagacgctttcgctcattaccttcataataactttcctgcgttttggatttattacgcaatttttgttgcgttatgaatatattttagctataatggatttagaagtcaagccttttgcgtggcaaaaagacagaagagcaaaaaaaatttgctattgccttttggcggggaggttcctccctcagcgaaaaagctcaaggggcaatgtttatccctcgttaagcataaaacattgcctgtttccttgacttttttctactgaggtcggctttaggggttgcaaaaggcaatagctcaaacaaatagagaaaaggagtgttcctcatggaaaattgtgtcatatacgctcgtttcagttctcacggacagaatgaacaaagcatcgaagcgcaagtgcgtatctgcaaagaatacgccgaaagcaggggcttggatgtcgtcaatctttacaccgataaagccagaacgggaactaacgacgcccgtccggcatttcagaagatgattgccgacgcaaaaacaggtacctttcagtacattatcgtgtatatgttcgataggttcgcccgaaatcgccgcgacagcatcatatataaagagatgctgaaagaaaaatacggagtcaaggtcatatcggcattggaaccgattgccgaagacgaaggtggcgagttttatgagatgttccttgaatggaatgccgagaaatacagtaaaaggctttccaaaagagtccgcgacgggcttgacaccagcgtggcaaacggtactttctgcggcggatttatcatttacggctatcagctcgaattggaaccgatacccggcaaacaaggcaagttcataaagcgtgtgatcatcaacgaagaagaagccaaagtgatgcgctatgtcttcgagcaatatgataagggcgtaagcaaaaagcaaatcgcggaagtgcttaattcacagggcatcagggtaaaaggcaaacctgttacccacaaaacctttgaccattatatgacaaacccaaaatacacgggcgaattctatttcggcgacaggctctgcacaaatatgtatcccgccatcatcgacaaagacacttttgatagggtgcaacagcggcttgccgaaaaccgttactgcttgggtggcaaggaaaccgcaagagagccgtatctcctgactggcaaactattctgcggacattgcggaaccgaaatggtggcgggtggcggtcaaagtaagaccgggaaaaagtattactattacgaatgcaaaaagaagaaaaagaaactttgcaccaagcggatcgaacacaaagacaagctggaaaagtatgtcgtgcaaaatgtcatgacgttcctatcggatgaagccaacctcgcgatcatcgtccaagatgtcttgaaatactttgactcccgtaccgatgaaagcgaacttaaatccatccgcaaaaggatcgccgatatacaggacgaagcggatgcggcagcgaacgcctttatagaagcgaaaagccctctgctaaaacagcgtatcgaaaagcgaatgcaagaatgcgaagtcctgctggcagacttggagaaattaaaagcccagctcattcttgagcgtgggcaaaagctgaccgaaaaagacatcgttgcgttcataaatatgatactgcaaggcgatgtaaacgatttggaattcagacgccgcctaattgacaacttggtctacaaagtgtatgttagcgatgaaaatacctatatctacttcaacataaaaggcggcaaggaaatcgaagagataaccttcgaggacacaataaccgctctcgaaactgtaatgggagttcaaacgcgaagtgacccgtcccgccaaaccaatcctaaatcgaacacctaaattcggtttaggattttcttttactaaaaaacggctaatgcgcatatgcaatagccgttaatttttgagataaggaggtgacccacggtaccatttgggagccaacttatttatgcttgataactccgtaagaaattatcataagagccttaaataaggctttcataaacatcacctccttgacacgccaaggctaataggcaccttaacgcgttggcaatattattatatctattttcatggtataagtcaataaactgcatttttattagatacgcattattagcaaaaattctttaaatccataattttctctattttgtattacatactgcattttgagttgtttttcgtaaaaagaaaagtcccgactttcatcgggacctgcttttacgggactgttgtattgaatgattatcttatcgtcgtacagcgttatttgttttacaagcgtgtttatcagcatctgaggttcgagtgtcaaagcctgcttgtaatacgctcgcatttcttcttccgtaaatttgtctgccgttttggctttctgtatggcaatggctttttcgagttctgcggctttcagttcgagttctctcaatcgtttcattgccgttgcgctcgtaccgccgttttctatcgccgtcattatgttcgttatctgcgtttcggttgtcttgcgttcctttgtaagtctttgtaaatcggcattatccgttatcgactcttcttgcattcgcataagagaagatatcatcttgtccttgactttgaatattttaaggaagatgccaaaaaaacagcgacagattgcatgtaatctttatacaatcttaatacctttcacgagaatcctaatgctatctttatgaaaaaaatgatattatgatacctataaacggaatcgaggcttttacatgggaatactaaaaaggaaactatcatcctttcaaataatactattgggattcgcgggagttattttgctcggcgcgtttttacttaccttgccgatttcttcaaaaactcacgaatggacgtcgtttatcgacgccctctttacttcgacgtccgccgtatgcgtaacgggacttatcgtattcgatacggcaacgcactggacgatattcgggcaaatcgtcatattgttgctgattcaaatcggcggcatgggcgtcgttaccatcgccgtgtctattgccgttatttcaggcaaaaaaataggtctgttcagccgcgaaacgatgaaaaacgcaatttccgcgccaaacgtgagcggtatagttcgcctgaccggatttataatcaagggtatatttttgatagaacttatcggcgcgcttgttatgatgcctgtattttgtatagattacggcgcagaaggaatctggctgtcgattttccattccgtgtcggcgttctgcaacgcagggttcgatattatggggacgaaaagcggcgaatttgcttccctaactcactactccggacaaccggttatcaatattacgattatgttgctgattattatcggcggtatcggttttttggtatgggaagacgtttgcaaacacaagtggcgaataaaagaatatcgcttgcaaagcaaagtggtattgattgtaaccgccgcgcttattgttttgcccgcaatctacttcttcttttttgaattcggcgatttacctgtcggtaagcgaatacttgcgtctttgtttcaatcggtaacgccgaggacggcagggtttaatactgtaaaccttacggcgatcagcgatacgggattatacctgatgactattcttatgttgataggcggttcgcccggttctaccgcaggcggtatgaaaacgacaacgatagcggttttattttcttccactttctccgtattcagaaaaaaagacaacgcggaacttataaagcggcgcgtggacgatgaaacggttaagacggcttcggcaatatttataatgtacataactctgtttttattcggcggaatggcaataagcgcgattgaaaacttaccgatcacgtcctgcctttacgaaacggcttccgccgtcggcacggtagggcttacgctcggaattaccccgacgctcaaagtagcgtccaaattgattttgattttgtctatgtttttcgggcgcgtcggcggaatgacgttgatatacgccgctttcggcgcaaataaaaagcaagcggcaaagttgccgacggatacgattgcagttggttagccgacgcctgaaatcggattcgtttgatggttgctaaggaagtttttataatcggctaaggagtttttttatatatgaaaacgaaatcggttttattgataggtctcgggcgtttcggaaaatacattgcaatgaaattgcacgaattaggacacgaagtcatggcggtagacgaaaacgaagaaagaattaacgacgctatgccttacgtgactgacgggcaaatcggcgacagtacaaacgagacgctattgaaatcgctcggcgtaaaaaactacgacgtatgtattgtaactatcagcggcgactttcaaagttctctcgaaacgacctgcttattaaaagaattgggagcgcaaaaggtcgtgtctcgcgcggaacgggacgttcaggcaaaattccttctgcgtaacggtgcggacgaaattatttatcccgaaaaacaacttgcaacgtgggctgcaatacgttacagttccgaccatattctcgattacatagacctcggtgattcctgctcgatttttgaagtatccgttccgtcggcatgggtggggaaatcggttgtggaaatcgatatccgcagaaagtataacgtaaatatcatcgcaacgaagaaaaacggaaaaatcaacgccgtcgttaccgcagacaccattctttccggagacgaaactcttttggttctcggggaatacaaagcaatgcggaaacgctttgatatttaaccgccgtaaacgaaggtgacttttatgggagacgtaatacttattattgcggtggcggcggctatgattttcggcttttttattatgaagaggcttgacgtcttcttggaagaaaatagaaaagcaatcgaaaaggaacgaaaagaagaatgcagtccgcttgaattcattgactcggaaaattatgagaatatgattttcgggattgagaatttcaaaaaaaagccgtaagacagtcacgcttgttatttttgatgggaaaaatcgggaattgaccgatgtcttaaacgattacaaaagtcgtttcaagtagattttattcaaaaaatatgatataatacaggaagaataaaacgaaggagatacggattaaccgaatgggaaagcagcatataagcgataaagaacacattctggtttgtttgtcttcagcgccttcaaatccgaaaataattcagacagcggcagccatggcaaaggcgttcaacgcgactttttccgcattatacgtaaaaactcccgcgtctgaatctatgacaacggaagactcggaacggttacttgcaaacattcgttttgccgaaacaaacggcgcgtcgatagttaccgtatgcggagacgacgttgcttttcaaattgcggagtatgctcgtctttccggcgttactaaaatagtaatcggcagaaccgttatcggtaagcgaaaatttataggcaagccgactttaaccgaaaaactgatatcgcttgctcctaacgtcgatatacatatcattcccgacagtgacgccgttatagccaaaggaaagaaaaggctttttgaaaagccgtattttgcaaagcttctgaaaggcttgacggtttcggcggctgtactgttattgtcatctttactcggttatcttttttcaagcctcggttttaccgaagcaaatatcattacgacttatatgctcggcgttctgattaccgccatactgacaaaaagcaaaatttgttgggttttttcgtccgttgcgagcgttctggtttttaatttcctttttaccgagccgaagttttcgtttctggcgtacggaagcggctaccctgtcactttcgtaattatgcttgcggcgtcccttattataggaggaacaaccgaaaaactgaaaactcgggaacgtcaggcgactcaaacggcatacagaacgaaaattctgttcgacgcgaatcagttgattcaaaaagcgtccgacgaagcggaaatatttcgggttacggcaaatcaattagaaaaattgttaaatcggaacgtaatcgtatttaatgaaaaagcgcagaaagtttacgtttctcaggctgaaagcaccgccgccgatatatcgctcgactgcgagaaaattgcttggcaagtaacgaaaaacaatgtaaaagaagggaaaggaacggatatttatcctgaaagcgactatacgtttttcccgatatgtaaaaacggcaaaaactatggagcaataggtattttcgtcggagaaaaaccgattgattcttttaacgaaagcattgtggtttccgtcatcggcgaatgcgcaatcgcaattgacggattcataaacgccaaagaaagagaacgcaccgccgttttagccaaaaacgaacagttgcgcgcaaacctgctccgttccatatcgcatgatcttcgcacgccgcttacttccatttcgggtaatgcgagcaatctgctttcaaacggtaacgatattgatgacgcgtcaaaaaaacaaatatacgaagatatttacggcgattcgctctggttaatcaatttggttgaaaatctgcttgcggtaacgcgtcttgaagaaggcagaatgaatataaatttaacgacggaacttgtcggcgacgtcataaccgaggcgttgaagcatattcacacgaaaagcgaaaagcaaaaaattaccgtaatacagccggacgacttgctccttgcaaaaatggacgctcggcttatcgtgcaggttttaatcaatcttttagacaacgctattaaatacacgccgtccgattcgcaaattacgattgcggcaaaaagaaacggagaaacggtctgcgtaagcgtggcggataacggaaacgggatcgagggcgaacaaaaatcgcgggtgttcgatatgttttatacaggagcaaacaaaattgtcgattgtcgccgcagtatcgggttggggctttcgttgtgcaaatccatcataaacgcgcacggcggagaaataacgataaccgacaacgttccgcacggcgcgatatttacctttactttgcccgtcggggagattgaaatacatgaataacttactgattttagttgtagaagacgacgcacccgtccgtaaccttatcggaacgactttgaaaacgcacgattacgattatattgccgcaacgaacggagaaagcgccgttatgcaagcgtcttctcataatccggacgttgttctgcttgatttgggcttaccggatatcgacggcgtggacgttatcagaaaaatacgctcctggtcggaaatgcctattatcgtaatcagcgctcgcgccgaagataaagataaaatcgacgcgttggatgccggagcggacgattatctgacaaaaccgttttccgtcgaagaattgctcgcaagaatacgagttacgaaaagaaggcttcttgcaatacaatcgacaaacaaatccgaatcggtttttgtcaacggaaatctgaagatagattatggcgcaggttgtgcatatttaagcggcgaagaactccaccttacccctatcgaatacaaactactgtgcttattgtcaaaaaacgtcgggaaagtgcttactcacactttcattacgcaaaaaatatggggcgctgcatgggaaagcaacgttgcttccctgcgcgtatttatggcgactttgcgcaaaaaaatcgaaccgtccgccgattcgccgcaatatattcaaactcacgtcggtatcgggtacagaatgataaagattgacgattaaacattgaatttgagccgctgactaacattcggtttgtatattataaggagaactcacatattacatggacacattttaccggttgcttttgcaattaatacttatcttactcaacgctttttttgccgcgacagaaattgcaatcctatctttgaacgaaaaaaaagtaaaggctcgcgcagacgacggcaataaaaaagccataaaactattgaaaataaaaaaagaaccgactaaatttctttccacaatacaaatcggggttacgcttgctggttttttcggttcggcgtttgcggcagacaactttgcaaaagggctttcggaaaggtttataaaaacatttgacatctcacctcagaacgcaggcgttatcaataccgtttcagtaattctgatcactttgatattgtcatattttacgcttgtattgggagagcttgttcctaagcggtgggcaatgaagcataaagagaaacttgcagacaccgcatgtggtataattacgtttttaacagtcatcttaaaaccgattatctggtttttaagcgtttccacaaatgccgttctgcgtttgttaagggtaaacccgaaagatgataatgaaaccgtgtcggaagaagatattgttttaatgcttgatgccggcggcgataaaggaactttgaataaagaagatataaggtatataaaaaacgtcttcaagcttgatggaatgacggcagaagacgtaatgacgcctaaaatgcgtatttcatgcattccggataatatttcggacgataaaattatggaagaaattcaaacgaaaaattattcccgtattcccgtttattcgggcgacgttgacaatatcattggcattttatatacgcgggaatatcttttgaatcacgaattgccgggattcgaattatcacagattttgaaaccgcctatgtttgttccaaagacaaaacgcttggagttattgttcaaagaaatgcaaaaaacgcaaactcatattgcgattattatagacgagtacggaatgacttcgggtattgttacgatggaagatattttagaagaacttgtcggtgaaatctgggatgaaaaagacgaaccgatagagttaatatacaaagaaaatgatacaacttatcgtataaacacggatatttccattgacaatttctttgacttctttaatctttctcccgatgacaactccgaatccactaccgttaacgggtggattattgaaaaatgtaatgaaataccgtgcgagggatattcttttgtttatgaaagtcttttgataacaatcacaaaggtttcgaatactcatactcaggaaattaaagttgaaatttcaaacgttaaataagcatttcgaattgaaacagtgtaaatttaaaatcagaattcttttatgtgctatttgcaaaaattaaacacgaaaaaaataagaaacagtacggaattaaaaatttttccgctttactgttcgaaatgcaaaaaaagaagcactgataaacgtcaaagaatttaatgtaacggctatcaacgaaccgaactcacataggcgaagcggtggcgtatattatcaagtatattgagaaaagcggcgaaaagttagtttactctcgcggactaccgcagtttttcatatccgacattatggacgacgatatcgccgctcctatcgggcttgaagataaaaacttctgttgttcggcgattttatgtgttgggacgaaggctgccatatgggcgaagtgagcaaagaagggataagccaaatgcgtaaaagcaattaagcgaaaaaccgcacctcaaaatacggtaaaaaacggaaaatgccgtaaacgtaaagtaaaagccaaggcatcccttggcttttactttacattgaaatcgctgctttgaattctgaatttattttttttagtctattgtgtccatttgcttgctcaaacccttcgagcatactttccaagataatcgcttcgggcgaatcgggaatatatccgcgcgacgtcttatagtaatcgaaataatctttgacatagtacggcgcgctatcgggcaatttatcaggcaaaccgcctgcaagtgcgtaactgccgtttttataatcttctgtacgctgcttatttaattcgattcttttcttgtagcgggaatccttatcaatgctgtcaaaatatccgttggcagtaactcttgacatatcgtacatcgtggaagcaacggttcaggcggcaataggcgctttaccgcttgccatgggaatgtcaagcggtcagactatacttaccgcagcggtacttgccattctgattaccgcgcccttaggcgctttccttacggacctcacctataaaaaactgcttaacggctttcccgttaaatgcgatacggattaattccgttatttaaaatcctttatcctgccaaaacggcaaacctatcctatttagtcgttagtcaaggaatttacagtttgcgcgcacgtagtcggcggctttttgtatgtcaagcacggggttaccgcccgtttcacgctctattgtcaaaaatccgttgtagcctatttcgttaagcgcggcgaaataagcggggaaatccacgtcgccttgtcctacgggagtttcgataaaataatccgcaacgttaagcgcctctatgccgccttttgcaaagcagtcgtaaacaacttcggggtcggacggcttaagcattttaccgtctttaaggtgagtatggactatgtaatccttaagaagataaaccgcctccacggggtcctgacccgtgaccatgacgaaattggcgggatcgaggttgacgcccacacctccgtccgtgcggtcgataaacgttttaaggacttttgcgctttcgggacccgtttcaatagcataagttacgtttgccgccgcggcgtgacgaccgcattcgcttatcgccttaagcataacatcgtaacgcggatgtttttcgtcggcgggaattacgcctatatgtgcagtaaccgtttttacgcctaagttcgcggcaagatctatgatttcttttgttttggcaattcgcaaaggattgtcctcggctatctcaaaaccgtagccgcccatatctccgcatatcgcgctgagagctatattatatcgctttgacagctctttcagattttttttgcgctccggcgtaatctgccaaggagaatattcgcgctttgtagcattgaactgtataccgcttaaacccagttccgcggcgactttaaccccttcctcggcgtttaccttcaaacaattgacaaaaactcctgttttcatataaaaaccactttctccttaatttttttcaggatataaattattcatatagtacgctttatctttttagcacaatttgcgtggcaaaaaactcgtcccgaacgccgttaaaatccttaaggctgcaattcgacgaaagtaccgtttttttccaaactttcgcaagcggcggcgcggattttaatgacttcaagcgtatcaagagaatcgaaaaacacgggcttaccgccgaaaaactccaaaatatgcgcgataagtattccgaaatagtccgactctatttttttggaaaaacttttgccgtcgcgggttttcaccgtcgcggaaaacggcatatctgaagcataaaccatttcggcgctgcgtccgtcacggtaaaaaacgtttaccgtcacggcttcgtcttttttcagtgaccgcacgcgcacggcgcccttccccatgattttaacgagcatttccgattgatgaactatgtattcggcgaaattgccgcctccgccggtaaccgttgccgcaacggcgttttccgtgtaagcaatttcttcggcgcaccttaaagcggaagtagagaaaaacgaagttccgtttttttcacccagtgaaaaaatctcagcggccgaaggataatcgggcgcaaacgtcttgtcgacgtaaacggggtttttgtaggg

SEQ ID NO: 1189 - DNA, 3285 bp, Unknown
  16S sequences of unknown bacteria
ggctgcttctcagcgggcagacgctgccgttttcattggtgttgggcgctattgcggcggctaccgcgcctgcagccaccattatggtcatcaagcagtacagggccaaagggcccgttaccgaaacgctgctcagtgttgtcgccatcgacgacgctacggcgctcattgcattcggcattgctgtggccgtggcgcagacgctgaccagcacggcggacgtttcgctggtgctgagcatcttgaagcccgtgctggagattgccgaggcgctgctgggcggcgcgctgctgggcgtgctgttcactgtgatgcttcggttctttaaggtgcagtcaaaccgcatggtgctggccatcgcttttgtgctggtgacgagcgctgtggccaacgcgctgaatatctcggcgctgctgacgaccatggccatgggggcagtgttcgccaatttgtgcaaaaactcgagcgaggtcatgtccttatgcgatcatgtgacgccgcctgtttttatgatgttttttgtgctttccggcgcggggctgaatttggcgatattgccgtccatcggcgttgtgggtgtgatctatgtggtgctgcgcgtgatggggaaaatggcgggcgcatggtttggcgccaccgttatgaaggcggaccacaatgtgcgccgctggcttggcccggcgctcataccgcaggcgggcgttgccattggccttaccgtggtggcgcagcaggtcgtaccgcaatatgccgaggtcgtgcgcgccgtggtgctgtgcggtacgctgatctatgagcttgtgggcccgggtgtcgcaaaatggacgctgcagaaggcgggagagatcgagccgggacaataacgggcaaggtgcggcctgtgcggccgcgccgggaaagggcgacaagcaaataccggggggagcgaaagaaaatgaaacccagacaggcctttgatgcagaacgggaggaggccgcggccctgccgcggccggcgcgccgcgacccggcgcttgcaatggcaaaacgccaggtgcttgtactgctgggcgcgtggctggcggtgcgcgcgctgctgatgcccgcggcgctgctggcaggcccgcagaacgcggatttttggatcagcggagcggtggggctcgccgtcagtgttctggtagccgcgtttattctttccggcatgcgtgcgcttgcggggcttgccatgctcgccatggcggtgtcggctgtgcagacggtgcccgcgctgctggaatatttttcttacggaggaggcccggcagcctatgcggcgctgtttctggcagggcaggcagcacagctgggactattggcctgtctgtttttcctgcccggtgcgaagctatatttcagtgtgtgcgggcggaacggaaaaaacgctgaacaattaccaaaacccggcccgcatctgtaagcggaatcgggtaagactgttttttgagctatagcgaagttgcagcgaaccgatacggaatagccggggaggaaagcaccgtcaaacgctctgtctgcattgttgtcttgcaggcaaagagacgaatggatttttgcgtttgaaaaatgaggggaagtgcagctgcaggacacgaagggaaccgatacacagcggttgctgtcaggccaaactgatcgaccgattggccgccaaagatgttggggagtaccgaatagattctcataaaccgggggcaacccattctgaattttttattgctccgcaataaaatttatcgcgccagccacagccgggagagtggcccaaatggcctgaaaacaatttgcggctgttttcgaaatcaagagtctgtttaagccagggaaaattaacggcatgcgaaacagcaagggagttttgcgcaaaacaaagatttggcgcaggaatattgaacataggttatgaaaatcagcaaagcatggcggaaaaggccccacagatcgggtatgttggcacttttcgaataaggctgagtcgaagcatggaaaagacaatttttctatataggttttttgaattgtttttgcggtattttacatgatacaatcaaaatcagaaaaatagctcatgatctttccgaacatggaattccatatccagcgctcctatttgggccgacaaacagagccgttttttatcgacagaagatgctgccagagccagcagagcaaacgccgagccgtcttccgccggaaagacagcagcggcgttataatgggcagggccgccgaaggcatgggaacattggaaatgattttttaggcaacgaggagaatccgatatgcaaaaaacaattcgactgccgttcccggccgccgacccattcattctgtgcgctgcggatgggcgctattacctctactgtacgagcgaagacggcagcggttttcctatctacacttccgaagatctgcagctctgggagcgttgcggcaccgctctgggcaaagaaacctcccgctggggcgtgggatgcttctgggcaccggaatgctatgagattgacggcatatactatctgttttacagcgcagattggaaagtaaaccccaccggcgctttggaaaacttccgcatcggcgtggcgcgggccagcaccccgtccggcccctttacggatatttccgaccatccgatttttgaccccggctaccctatcattgacgcgaacgtattcgccgaagatgggcgatattatttgtattactcccgctgctgctacgagcacaaggtcgacggcctggaggagagttggatctatggtgttgagctggctccggatttttccggtgtgaagggagagcctgttttgctgctgcgccccgagcaggaatgggagggacgcagcgcggcggctaccggccggcgctgggatgaggggtcttatctgatgaggcatgaaggccggtactacatgacctattccggcaatttttttgcagggccggattatgcagtgggctatgctacttcagcgcacccattaggcccgtatgccaaagcggaagaaaaccctattctggaacggagccgtcatgttacgggcaccggacatagctgtatgttccgcactacggatggtaccctgatgatttgctatcacggacggaccagggcaaccggccgggaccgtatcgcctttatctctcccgcgcatttcacgccggacggaaagctgattgttgaaaccgagtaaaatacgggaaaccgcatgcggctctttttcagcttcgtgagttgtcccctgtccgcggaggcaagaggga

SEQ ID NO: 1190 - DNA, 30822 bp, Unknown
  16S sequences of unknown bacteria
cccccgccgccgtaggcggcggaaagcaggcggagcctgcttacttccggcggagccggaaggggctgcgccccgagccggcggtctgcactcggccgggataaagaaaaatccccccggacaagatggcccgggggaaaagcggagcatagatcaatcggtgatgggggtgaaaacattgtccttgctggtctcggcgacaatatcggtgaggtagaaagcagcctgagtcaggccggattcctcattgtagatcttgcgcaggctgggagagacctcaaacatatgggcctgtacttcggggcgcatatcaaagttggcaacgcccttgacgcggatgaagctgccatcggggttcatggcgcagatctccacattgggattggccttgacctgcttgtagctttccttatgggtgcccatgccgaagtacagcttatcctcgaagatcatcataaagccgaaggggcgcacgcggggcttatcgccatcacagctggcaaagaagaaaccgttgcattctttgaggtaatcgtagattttctgaattttgctcatgaaaaagtcctccttaattggtgatacctatatggtatcacaagaaaatgggatagtcaatgcagggataataagaacaaaatgcgaataaactgcggccaaaatgcaggaaggcgtgccgataagttgcacaaaattgcatgaaaaggagagagagctgtcccccaatggcgcacagcggacaaaataagaatccgagagcggaaaacactttagcaaaatgaatggcggcctgcaaattcttttcgtcaaaatatacaagttggaatgtttttaagcgacaaagcgacgaaaatgcaataaaaaaatagtagccaaatgagagaacggttgctataatactactaatatcttcccccggcgtacaagtgtacgccttcggaggtacaatcccatcattccataaggaggaatagaaagatgaaaaaactgatcgcgattctgctgtgcttggtcatggtcgtttccatggtagcctgcggcggcgaaaagaatcccccccccaccgatgaaaaagttatcaccatcggcgtgtttgaacccacctccggccagaacggcgccggcggcaaaaaagagatcctcggcatccagtacgccaattctctgtatcccaccgttaccattggcggtgaggagtacaagatcgagctgacctatgccgataaccagtccgattcttccaaggcgcccaccgctgcccagcagctggtttccaagggcgtgaccgctgtactgggtacctatggttccagctgcgccattgccggcggcccttattttgagcaggccaagatcccggcgatcggaacctcctgcaccaatccccaggttacccagggcaatgactattacttccgagtctgcttcatcgatcccttccagagcgtagctgatgcgcaatttgccaagaagcagggcgtgactaaggctgccgttatcaccgaggccggtgacgactactccgccggtctgggcacctactttgtaaaggcctttgaggcgctgggcggcgaggtcgtggaagtcaacttccagaccggtgagaccgacttctccggcaccatggccagcctggcttctcagggcattgaggccatctttgcccccacctccatcgagactgctccctttatcatcaagcaggcccgtgaggctggtatcaatggctgcatcctggcctccgatacctgggacgatgtttccatcatccagcgtgtagtggaagctggcgcttccattgacggtgtttacttctccaccttcttcattgagggcgatgacaccaaccccgctgccaatgcctttgccgagggctttaaggcctggctgaaagaagattccgcccgcctgaccgataactccaacagcgaagagatctccgccgtgactgcctgcggctacgatgcctacatggccatctactacgccctggataaggctcagtccaccgacggcgctaccctgcgtgacgctctggccgcgctggatgttcccggcctggtaaccggcgacttgaagtttgatgagaacggcgatgccatcaagagctacgccatcatcaagactgctaccaccgagggctttgtatttgccgattctgttgccatcgagtaatagcaaaaaagctgtaacagcatgatgtaaagctacggctgcgcggcgagggagacccactgggtttcccccgctgcgcttgtggccgtttagaacaaacggcatgggtgcggcgttctttgcgagggctttgacccggcgatggatgaaagccccggcaaaggggaccgcagcgccatttttcccggcatatcctttttattacggaggcagtgtatatgcatgactttacctactacgcccagatattgatctccggattgaccatcggcagcctgtacgcgcttatcgccatcggctataccatggtttacggcatcctgcggctcatcaattttgcccacggcgatatgttcatggtcgcgggcttcatcatgatctatatcactagctggagcagcggctttttgggggccggcagcattgccgtcggcttgatcttgaccctgatcctgacggtggtgctgggcgtgatgatagaaaaggtggcctataagccgctgcgctccgccccccgcatgtcggtcatgatctccgccatcggtgtcagctacctgctgcagaacctttctacctatgtcaccggcggcctggcgcaggcctatcctaatatcccctggctgcgcaccgagatccagatcggcggcatcaccgtgcggcggctggccatcatcacccccgtgctgaccatcctgttggtcatcgcgctggtcatcgtgatcaagcacaccaagatgggcatggccatgcgtgccgtggccaaggactttgataccgcgcagctcatgggcatccgcatcgaccgggtcatttccatcacctttgtcatcggttcgttcctggcggcggtcggctccatcctgtatttcagctacatcgggcaggttagccccaccatcggcgccatgccgggtctcaaatccttcgtggcggcggtattcggcggcattggctcggtgcccggcgcggtcatcggctcctatatcatcggtatctgcgaaacattcatcaaatccaaccaggatatttccatcttcagcaatgcctttacctttgcgctgctgatcatcatcctccttatcaagcccaacggcctgtttggagagaaactgaaggagaaggtgtaaacgatgaaaaacaagaaaacacgcaatttgatctgttcccttcttctggcggcggtgctggtgggtgtgctgctgtatatcgataacagcccgctaaaaagctcgatgctctccaccgtgctgcaaaagggttccatttacgccctgctggtggtcagcatgaacctgctgaacggctttaccgggctgttcagcctgggccaggcaggctttatgctgctgggcgcctatacctatgctatccttaccattccggtggatcagcgtattaatgtttatcagtactttgatggcggcattgtgcagttccagatgccccagatcccggccctaatcctggccggtgtggtggcggcgctgttcgcggcgctcatcggcgcgccggtgctgcggctgaagagcgactatctggccattgccaccctgggcttcgcggagatcctccgcgcggtgatccaatgggagaagctgggcccgctgaccaacgcctccaacatcctgcgcaaatttacgggctatgatagcatcctgttcccgtttatcgtttccggtgtatgtatcgccatcatcgtgctgctcatcaattccacctacggccgggcctttaaggccatccgggaggatgaaattgccgcggaggctatgggcatcaacctgatgaagcataagatgctctctttctgcaccagcagcttttttgccggtatcggcggcgcgctgctggccatgttccagttcaatgcccacgccaaaaactttaccaccgccatgacctacgagatcctgctcattgtcgtcatcggtggcatcggctccatcaccggttcggtgctgggctccttcctgtatgtggcgtgcagcgagtggtggctgcgcttcctggataaccccaccatgatcggcacctttaaggttccgctgctcggccacggtttccgtatggtagtgttctcggtggtcatcatggtcatcgtgctgttctaccgccagggtctgatgggcacaaaggaattcagctgggatgccatcttcgcgttctttggcaagattggccggtttttcaaaaatctgtttaccggccaaaaagcagtgaaaggcggtgcggcaaatgagtaaccccgttctaaagctggaaaatgtgacaatgcagttcggcggcgtggtggccgtggataacctttcgatggaagtgggcgagggcgagatcgtggccctcatcggccccaacggcgccggcaaaaccaccgcctttaatgtggtgacaggcgtatatgcccccaccaacggctgcctgtatctcgatggcaggccctatctgtgcgagcatcccaccggccgtgccaagcatgattatctcggcagcgatgtggaaaaattcgcagggaagcctaccctgcgcaaaacgccggatcagatcaccaaaatgggcctggcccgtaccttccagaatatccgtctcttcggcaatctgactgtttttgagaatgttctcattgccaagcacatgcacgccaagggcggctttttggcggctaccttccatctgaacggcaaggaggagacccggatgcgccgggaggcgatggagcttctggagatcgtgggtctggccgagctgaaggatgaaaccgccagcaacctgccctacggtcagcagcgccggctggagatcgcgcgcgccctggccaccgatcctcgcctgctcatcctggatgagccggcggccggtatgaacccgcaggaaacggtggagctcaccgaattcatccgggagatccgggaacagtttgatctcagcatcctgcttatcgagcaccacatgaacctcgtcatgggcatttccgaccgcatttatgtgctggaattcggcaagctgatcgctgagggcatacccgaggcggtccagatggatcagcgggttattgacgcgtatttgggggtggatctcgatgcttaaagtacaggaattacaggtcaattacggcgggatccgcgccgtaaagaatatctcctttgaggtgccggatggcagcatcgttacgctggtgggcgccaatggcgccggcaaatccaccacgctgcgcaccatcgccggccaggttaaggcccaggccgggtccatcacctacaatggcgaggagctgctgggcaagcccagcgatgagatcgtcaagcggggcattaccctggtgccggagggccggcgggttttccccgatatgacggtgctggagaatatgaagatcggcgcctacctgcgtcatgataagctggatgacgatatcgagtggtgctatgagctgttcccccgcctgaaggagcgccactggcagctggccgggaccctttccggcggcgagcagcagatgctggccgtggcccgcgccctgatgagccgtcccaagctgatgatgatggatgagccctccctgggactggcccccctcatcgtgcgggatatcttccagatcatccgggagatcaataagcagggtgttaccatcctgctcatcgagcagaacgccaatatggccctgcacaccgccgaccgcggctatgtaatggaaaccggcgagatcattctagagggcgcgggacgcgagctcctggaaaacccggtcatccgtgaggcatacctcggcaaataaatattcccctgcgggcttttatccgcgggggatttttttgataagggaccttgcaaaaacgccgggaaatggtatgattattccaaagagaggaaagggggaggggcccaatgtcaccgatcgagcggaatgaaacctataccaaatgggagcaggatgccatcaccatgctgcttttgcacctgtgtgcgctgctcatctgcttgtatttgggggagatgggctacgccaaggataccgcaccggtcatctttgtgctggcagtatttctcaccggcttttttaccaatggctacctgtggagcctgctcggctcgctgctttcggtctttgtggtcaattacttttttaccgagcccttttccaagctgagcttttccggccccggctatcccatcacatttgtaacgctgtttgtggtgggtatcctcaccagcgccatgacagtacgcagccgtgaccagcagcgcctgagggccgaaaacgaaaaggaacgcacccggggcaacctgctgcgggcggtcagccacgatctgcgcaccccccttacggccatttcaggggccatcaataccgtgctggagcagcaggataccctgccgcccgagaagcagcgggagctgctgcgaagcgccgaggaggaatcggagtggctcatccacatggtggaaaacctcttgactatcacccggctgaacggtgatggagaaaccaggctcatcacccagccagaggcggtggaagaggtgatggcgggcgcggcggccaagttccgccggcggtaccccgattttgccgtgcaggtgaccgcccccgatgaactgctgctggtcccgatggatgccaccttgatggagcaggtattgttgaatctgctggaaaacgccgccctgcacgggggtagagtaaagaacatcaccctggcggcccgccgccggaatgacaaggcggagctccgggtggaggatgacggcgtggggctggatagccacggcctggaaaatgtttttgatgggatgcgcacccgcgcggagcaaaccagcagcgaccgccgcaatatgggcatcggcctgacggtgtgccgtaccatagtaaatgcccatggcgggcagatcaccgccgccaaccgcccgcaggggggcgccagcttttgcatcacgctgccgctggcggaaatagaggaggaagaacatgatgaataagatcctgatcgtcgaggacgaattttccatcagcaattttatgaaaaccgtgctggagggcgatggctacaccgtggaggtggctacctgtgccgcccaggcccgtgcggcgctggaaaagatggagtttagtgccatgctgctggatctgggcctgccggatgccgatgggctggagctgctgcgggagctgcggcagcgctatggcctgccggtcatcgtggtctccgcccgcaccgaggaaagcgaaaaggtggccgccctggatagtggcgccgacgactatatcaccaagccgttcggctccccggagctgctggcccgcatccgggcagcgctgcgccgggccgggcccgccgccaatctttccgcctttaccaccggcgatctgaccatcgactatgataagcacctggtcacattggccgggcagccggtgcacctcaccgccaatgaataccgcctggtggagctcttgagccgcagcgcgggcaaggtgctcacctacgatcgtatcagcgaggccatgtggggcgatgccgccggcggcaacagccagctgctgcgggtcaatatggccaatatccgccgcaagctggagcagaaccccgccgagccgcagtatatcctcaccgagatcggtgtgggctaccgcatgaaggagccgggctgacctctaaaacaaagccccctacccaaagcggatagggggatattttgcgctgtttacaggctttcgtggctttcctcccggcagcaggtgatgtttaggttgccgttgcggcagcgcagctcatccaggaacaccttggggaccggctcctgccgcagggtgatgcggtagcgcagctcgtacagggtgcccatgttggtggttttcaccttttccagcgtgtgggcggtggtgtagcgctcaaacaggtcatcaaacagcccgtcataatccaggtcctccggaatggtgatcttcaagatgcgtccggcatcctccttttggccaaagcgcagcgcggtaagcgccagcatggctccggccaggatgaggaacagcagcgccgccagccccacataccccatgccggtggccaggccaatggccatagccaggaaaatggcggcgatctcccgggcggtacccggcgcggaacggaaccgcaccaggctgaaggcacctgctacggcaatgccggccccgatgctgccgttgaccagcataatgaccgcctgcaccaccgccggcaggatcgccagcgtgacggcaaggctttgggtgctgcggctgcggtagccagccaccagcgcggtgcccacccccagcagcagagaaactcccgtgcagatcagaaaagatgtcagtgtcagttcggtccctaatatcgagttaagcacagcgatgcgcctcctttgaatcattcatccgcgcgggggcattggcctcccggcacatctctttgtaacaagcgccgtatttcgaaaacgaggcgggataaatatactgagcggaaagcgcccggcacagccacagagggcaggctccggggatcttgacctccatcaggacctgatcctccggcagcaggcgcttaccgtcgtcgcccgcgtccagcgtcagacgattgcaccgccagcggatgttccgatcaaatgtgatccgcagcgccgggtcttcggtgcccgcccaggcggtacggtcatagccgatatacatgcggggcatggtatcgtaaaagcgctggaaccattgcagctcctgcccgatctgcccccattcggccggggcggtttcggtgcgcaggaaacgctccgcctggggcaggggtgcggtgacccggcgcttatacaccacgccgccgcatttctttttcagctccacaaagaccttatctcccgcctttggcacgccgtagcagcggatgcgcagcttttctttataggcgggcttttccagcgaggcccggatgagccggaaattatcggtatcgcagtagatgttgccgatggcgtattcgccgtagcggtcggcggtcatgtgctggcgcatttcacccagcattgtttccgcctgcgcgggggagataaagtatttcttttcgatgcgctggaagctgtattgtgttccgtttgccatatcgggcacccctttctgtgatggatgcccatagtgtaaagccgccgcctaaagattgactaaaggaaaaaactttttttctttagcttttctttagcgcccggctttattatggtatcattgactgaagggaggaaccaaatatgaaacgcaaataccatatcctatccattatcataagcgccgcactgctggccgggtgcctttccgcctgcggcgaaagcggcaccatcggaggcagctcctccgatgaaaacacggcggccaccgtgaccggcggggatgccgccaccaccccggataccaccgccgatgtggaggcccccgatgtaagcggtgccaccaccatcgccctttccgggcagtcggcgaccgctaccggcaccggcgcggaagtgacagacggcatggtgaccatcacggcgggcggcacctatgtggtcaccggcaccatgaccgagggccgcgtccttgtaaatgcccccaaagaggaagtgaccctggtgctgcaggatgccgccatcacctgctccaccggcagccccctgtatgtctataagtccaaggccaccacactttacctgccggaaggcaccgcctccaccctgaccgacggcacggactacacctttagcgacagctactcttcggcggaggaggaagagcccaacgcctgcctctactccaagtctgatctgattattgccggcagcggcagcctaacggtcaatgccaactataataatggtatcaccggcaaggataccctcttcatccaaaaggcctccgtcaccgtcaccgccgtcaatcacggcatcaacggcaaggatagtctgaccatcaagaatgctgacatcaccgtcaccagcggcggggatgccctacgctccaccaatgacagcgatcccaccctgggctatctcgtcatcaccggctccgcgctcaaactcaccgcgggcgaggacggcatccagacagagaccactctgaccatcagcggcggcaccgccaccgtgaccaccgcgggcggcgcgggtcaaagcatctccgatgacaccagcgccaagggcctcaaggccgggacgcaggtcgccgttaccggcggtaccctccagctcaattgctgcgatgacgccatccactccaatggcgatgtcaccatctccggcggcagcttcaccatcgccaccggcgatgacggcatgcatgccgatgataccctctccatctccagcggcaccattgatatcacccgcagctacgagggcctggagggcgccaaggtgctcatctccggcggcaagatctccatcgtcgccagcgatgacggcatcaatgccgcgggcggcagcgatcaaagcggctctggcggcttcggctttgcgccggatgccttcggcggctccggggattacctcatccgtatctccggcggcatggtcactgtcaatgcctccggcgacggcatcgattccaacggtgatatcgaagtgaccggcggtgagctgtatatcagcggccccacctccaatggcgatggcaccatcgactgcgacggcagcgctactatcaccggcggcatcgtggtcgcggccggctccaccggcatggcggaaaacttcggcaccgcctccacccagggcagcatcctggtcaatctctccggctccgccggccagaccatcaccctaaaggattccgacggcaacattcttgccagcttcacccccgccaaggccttcggctgcgtggtcgtcagcgctcccggcgtggcacagggcggtacctataccatcgccgcgggcagcgccagcaccaccgtcaccatggaaagcctcatctacggcagcggtatgggcggcttcggcggtatgggcggcggtatgggcgaccccggcaatatgggcggcggccagcagcccccgcagggcggtgtgggcggccccggcaaccgcggctgatttccattcccccaataaaagcacctgtcacacggcaggtgcttttcccgcttttggggaaaagcccctttacggccgggcgccaaaatggtatggtaaaggggagaggaggcgatagccgtgcaaaatgccgaaatggagcagatcctggccctgatgaaccagtacgctgcggtgcttatcaccctgaacgagcgcggggtcatccgcacctacaatagccccgtaggggattttgcggaatggctggtttcgcaaaagctgggccttcgcctggagaaaaactccgcccgtgggctggatgccaccgggagcgatggcctgcgctatcaaataaagtgccgctgggagcgcaccgattttcccaccccgcaaagccgggagttgggggtcatccgcagcctggagaaaaaccagtttgattttctcatcgctgtcatctttgatagccactttcaggtccgggcggcttatcagatcccgcacgagatcatcccccggtatgcggtctaccgccgccatgtcaatggccatatcctgctggcggatggtcccatcctgcgggatcccgccacaaaggatatcacccacctgctgcggtaagcggcatgcatttacaccgggaaagttcacgcttttctccttgtaccgtgcacggtttcctgctatactatggtcaaaaggggcagcgcccctaaaaatgtgtgacaggaggattttataatgggcttgtttgataaaagccccccttgcgccatctgcggcggcaaggtaaaggggctgcttccgtggaagatcgaagggaactacatctgcgatgattgccacggcgttatcgatgcgcagaacggcaatgactttactatggaacaattcctgaaataccgggatttccgggagcagaatcaggcactccgggagcagttccgggtggatgagatcgtcgaattcggcttcctcagcgaaaaattcgtgttcgattatgagcacagcctgttctgcatggataagaacctgaataagaccatcttccatggcagtgagttaaagtccttcatgatcagcgaggacggcgcccccctgctggagggcagcgccaagggctttattcaccacgaaagccgggtcccccagcgcattgatgagctgctgccccaggtcaatcaaatgctcatccagcggcagatgcaggaatcgatggagcgtctggccaaccgggataaggaggtccgccccagctataccagcatcgatatccccgagccattcaagaaattctacattaagctgtaccttcagcatccctattggagcctttacgagtttgagcgcaccggccccgttatcatcggcgatgtcccggatctgaaccagtaccgcatcgagtacaatgagagcgtccagcacctggagaccctggccaatgctttggcccgcgtagcgggcttcccgcaggaaagcgccgctcccggccagactgttgccgccgcggctgcggctgctgtggccgcccccaccgatgccgtcgccgagatcaagaagtacaaggacctcctcgattccggcatcatcaccgaagaggaattcaccgccaagaaaaagcaactcatgggcatctaaacaacaaaaacccgggaagcaattcccgggttttgtttgtgctgtatttccgctccccatagggggacaagaaaaaagtgagttataatgtgagttacaggggaagaaaacccccggcattttctgcgcagacttgcgcccccaacagggaggaaaaagcgtgaaaagggaaccttcgcgatttcctcttgaagaatgatatgcaatagataaaattgacaaatatgaggtttgcgatgatagctgtcaatcccataaagctgaaaaatgggtgcaatagaattttgccatctcttccccttcgtccgtaagatgatctctgatataatttgcgtgtttcttctgctctgccggatctatttcagcatatctgtggatgatgatattgccaagggattcctcccgcagaatttcgctgtatacatcggcaatgctttcgcattgagatatgggaacatcatgtttgctctcccatgagtgccctttaccgtgtgtcagcccgtccgtcgagtcaagaagataaatataaccctgccggcccttgtagagggcttccagctgatttggaaaacgctcaatatagtgctgcttgccatccgcaccgacgcccatggtgacaaagttctcatccctgcttctacagcaaaccagcgcatagcatctgtcttcgctgaaatatgcaacaaaattgccggtagaatgggattttgaatttgccttgattgtatgcagtccggaaatacatgaaccgtggtagatcataattcctccaaaattttacttgtctaacccacattgtatcatgtacggacgcaccgtgcaacaaaaagtacaccgtaattctatcaaaattacggtgtatttttgtccccatcggagggaaggatagtgtgaaaggaaaccgtcagggtttcctttcgcgtttcatcagggcacaaactaaccctttgcacaggctctgcgttcccctcggcaccaaaaagaaaaagacgcccatggggcgtctttttctttttggtgccggtggtgggactcgaacccacacggtatcgctaccaacggattttgagtccgtcacgtctgccattccatcacaccggcccataacgaaactattataccgaaaaccgccgccaattgcaagcactaatgccacaaacctgccgcaaatggccgaattttctcttcccacagcgcccacagcgccgtgccgccccacagcagcagccgccccgtccccggcagcgccgtaaaatcctttgccagctcccggccccaccgggcgtagggcagttgtcccacccgccccagcagcgtaaattccaccacaccgtcccccggggtaatggccgcgaaagcctgcccgcaccgggtctctgccgccatcacatcggccacccgccacaggccggccccgccgcccagcagcaccagcgccaccagtaccgccgcccatttgcgccgccgcagataccgtttttgcacagtccgtttttttcgtcccatttatcttcctcccgctttccttcattttcccggcgccgttcccccttttatccatgcgcaaaaaggaacgctctccccggcaagaattcactccgccctgccgcttatcaccttggcaatgaccggcgcgatgagctcggcagtgtactgcgcttcctccatagtattcccgttcgtcccgaattctaacagcagcgccccgtcggaacaggcataattgtaggaccgactgcaaaaaaagatgggtcggcacagcccggggtatttttcttcgatcgccgccgccagcgccgccgcaaagcggaaattctcccgccagcttggcaggtccagcgtgccgtcatcgtagggcgctatgatcatcagctgcgccgcctttttgccgtttatcaccgccaccgttttggcaatactggtatcgctgtaaagaatggcgtcccggtgaatatccagcagcacccgcagcccggggtagttcttctggtagctctttatcgtctctgtactgcggatgtaggctcccgtgtaggccgggttatcgtgttgggtggcatcgtgcagtaccgccagctccgcctgctccagcccggaggccagcacatcccctaccgccaccatgttgttttggttatcggtatcccgccaggtgttccgggtatcaaagtaagggctgtcatacagctcatagctttcggtcgcatgtgtatggaacagcaggagctgtggccccttttctttgggattcagcgttaccctgttgggggtggctagcaccttctgtacctcggctgccgtcagcttggtgtagttccttatccagatgttatcccactgcacataggctgggctgtcctcccctgtcatggtcagctcggtcaccgtacctcggtattcctccggcacctccggtatttcagcagggatctccggctcctgcgggtcgggctcggcagccggttcctgcggttcttccggtaggggggcaggctccagctcagccgcgtagcgttcccgcagcgtttccagcgccccagccggcatatccagcaccgtggtaaaaagcgccgccttttgcagcagcgccactgccgccggctccagccgcggccacagcagggtcaccgcgccaatggaaagcatcatcaggccgccgcgcagcagcggggaaggtcttcgcttcttcacagggtctcgtcctttccttttttgacatacccggcagctcctcccccatggcgggttgggccatccgcttcccggggccgcccgttccgggcgccccctcaccgctccggcccgccccgccgcagcagggggacggtccgctgccccgccggggggagggcttttccttctaccctctatatctattcaccccacccgcaaaaaataagtgacatcccgcatcatggttggtataataaacaggaatgaaccaaagccgctggctttccggcccgcttctccgccgctttctgcaaaccgcaggccgctttcccgccgcaaccccatccccaaaggaggtactccccatgatgaccgatatcgaaatcgcccagtccaccccgctttgcccaatagcggaaatcgccgccaaagccggcatccccgccacggctgccgaaccctacggcagcaataaggccaagattaccgaggactttctgcggcagcgggagggcaagccccagggcaagctcatccttgttaccgccgtcaaccccacccccgccggggagggcaaaaccactacctccatcgggctggcgcaggccctgtgccgcttaggaaaaaacgccatcgtcaccctgcgggaaccctccctcggccccgtgttcggtctcaagggcggcgccgcgggcggcggctactcccaggtgctccccatggaggagatcaacctgcactttaccggcgatatccacgccgtcaccgccgccaataacctcctttccgccctcatcgataaccacatccatcaaggcaatgccctgcggctcgatccggaacgcatcgtgttccgccgctgcatggatatgaacgaccgctccctgcgcaaaatcgagatcggtctgggcggtaaagccaacggcaccccccgcttcgatggcttccagatcagcgtcgccagcgaggtcatggctattctgtgccttgccaaagacctgaaagacctgcgggagcggctgggccgcatccttgtgggctacaccgtggagggcaaaccggtctttgcccacgatctccaggccgaaggcgccatggctgccctgctgcgggaggccctgcggcccaacctggtgcagacgctggagcacactccctgcttgatgcacggcggccccttcgccaatatcgcccacggctgcaattcggtgcgggccacccggctggcgctcaccctggccgattacaccgtgaccgaggccggcttcggcagcgatctcggcgccgaaaaattcttcgatatcaaatgccccgcggcgggaattaccccggcgatcgccgttttggtggtcaccgtgcgggcgctgcgctacaatggcggctgcgataaggaaagctgccgcacccctaatgccccggccgtcgcggcgggcctgtgcaacctgaccgcccatgtggaaaacctgcggcagtacggtgtgccggtggtggtcgccatcaatcgcttcccggatgacctgccggaggagctggccctcatccaggcggaatgtgaccggctgggcgtgcgcgcggctcaaagcgaggtctttgccaaaggcggtgcgggcggcctggaactggcggaagcggtgctggctgcctgccgggagccgggtcactttgctcccattaccacccccgccatgcccctgcgggagaaaatcgaaaccatcgcccaaaaggtttacggcgccgccgccgtggaatacagccccgaagcggaagaacagctggcgcagatggccgccctcggtctggaatacgcccccgtctgcatcgccaaaacccagtactccctcagcgataacgccaagctgctgggccgtccgcagggccacgccctgcatatccggggccttaccgccagctgcggcgcgggcttcgcggttgcgctggccggcagcgtcctcaccatgccgggcctgcccgcccatcccgccgccatggatatctccctgaccgacgacggccgcatcaccggcctgttctgatatcggctcctgcaagattcgggccccgccctgttcccaaagcccgccgcagccggcaaatagcaggaacgcccctcgccctctctgcttacccccaattttcgttgactttcttcccggggtatgatagactatcgaaaggcataaagcccaaaagaagaaccaaaaatcaggaggacactacaatgaaaaaatggctcgcgctgctgctggccgctatgatggctctcgccctcgtggcctgcggcgatacccccgcaaacaacgataacgacaacaaggataacgataccaagaccgaggaatttgcccgcggcagttgggatggcaatgtctataccaatgattctctcaaccttaccgtcaccgtccccgatggctggaagatcgctaccgatgaggagctggcggccatcatgggcatcaccatcgatagcctgactgagcagggcgtctccgaggaattcctcaaggcccagaacacctacgaaatgatggcgcaggaccccaccaatggctccaatgtcatcgtcatggcggaaaatctcactgtttctgtcggcggcacctcctacgatgaagaggcttattccaatgtcatcatcaataccctgcccgaggaatccggctatgaattcgccgatcctaagactgtcaccatcggcggccgggattactatctcctgcagtgcaccgccggggaaggcaccctgggtcaggatttcctgttcacccgcatcggcaaccacatggtttccgtcattctttcctattcccccgtgcttgtcgataacgccgatatgctggcgatgctcggcatcaaataagcaatttatccaaaagctgtcccgtttccggggcggcttttttgcgggccatccggccatttttcctgtcccggccttttcaaagggacagcaaaatggtataatatcatgaaaacattttagaggaatgcgcagagctgggagacgggccccggctccgcgttcccacccccatcacccgaaaggaggccccgccatgcttaccgtccttcgccgcctgttccgccgcatcgatgcggtggtgctttgctgcgcactggggctctctgccttcagcgtggtgctgctgctcggcatccagcagatgggcgtcatcggccgccggaccgtgctgatgcaggtcgttgccgccgggctgggctttatagctgccatggtgctggcccacctcgattacgagcaactgggcagctggtggaaattctatgtccccgtcgcggtcgttttgatgctgcttacctttacccctctgggccaaacccgcaccgattccatcgaaaccaaccgtagctggctcaatcttggcttcaccaccatccagcccgcggaattcctcaagatcgccttcatcctctcactggcctatcacctgtcaaaggttggcgcctccctcaatggcagtaagacgctgctgcgggtgggggcccacgccatcttcccggtgctgctcatcctgctgcaaaaggactggggcgtggctctggtcatgctcttcatcgtggtggtcatgctcatcatggccgggctttcctgccggtggattttgctgggatgcgccgccgcggtggtctttgccccgctggcctggtttttcctgctggatgactatcagaaaattcggttcgttctgctaaagaaccccgaagcctatgccctgggacaggcctaccagcagctacagggccgcatctccttcggctcggggcagctcttcggtatcggcattttcagcccggatcaccgctatgtccccgatatgtataatgatatgatcttcaccttcatcggggaatcggtcggctttttgggcgcattggcggtgctgctggtgtatggcctgctgctggggcgcatcctccgcattggattgcggtgcagcagccgcatgggccgtttggtctgcgccggagtctttgccatgctcgccgcccaaatcatgatcaatgtcgccatgtgcctgatggtcggcccctcggtgggtgttaccctgccgcttttgtcggcaggcggcagctcggtgctctcggcctatttggggctgggcctggtgctttcggtccgccacggagagaaaacaacgatgttcagctaaggaggctttttatgggtaaaaaacgctttgtcgtcctcgaaagtgagggctccggcttttccaacgccatgcaggaaattgtggataccgaaaccggcgcgcattacctcacctggcagtccggctacgccggcggaatcaccccgctgctgggcgccgatggcaaaccggtcatcactgcccggggaatggagttcgataaatgaccgtgactatcaccacccacagcccggcccaaacgcaggcgctggccgagcggctggcaaagctgctgcgccccggcgatgtgctggcctataccggccccatgggcgccggaaaaaccacctttacggtgggtctggcccggggcctgggcagcagcgattgggtctccagccccacctttgccctggtgcaggaataccgcggcccggtgccgctctgccacttcgatttttaccgcatcaccggggtggatgacctgtatgccaccggcttcttcgactacctggacggcacccgtgtgctggccgtggaatggagcgagcggatccccgatgccctgccggagggagccatccgcatccgctttgagccgctgggaaacgattgccgccgcatcaccatttccacccccgccggcgatgaccggctggctgccctgcccgcttgacggggctgccccctgccgcgcaaaaatcggcctgggcggcgtcgctgcccttgacaggcgcaagcccggcttcgctgggcgcaagcttgccttcgggcgcttctggcccatttccgatttttccggggcagcgtgcagtccctgtccactgaatcatgaaaccaagccgaaaggggagaccccgtaaaatgctgctgttctcactggaatgctccgccgccgcggcctccgcttccctgtaccgggaggggaagcttttgggcgaggaattcctcaatgttccccaaacccacagcgtcaccctgctgcccatggccaaaagcctgctggagcatactggcatctcccccgcccagatcgattactacgccgtcagccgggggcccggctcctttaccgggctgcgcatcggcatcgccgccatcaaggggctggccttccccgataataccccctgcatcggcgtttccaccccggaggccattgcctatggcctgctgggctttgaggggattgttatccccatgatggacgcccgctgcgggcaggtgtataccgccctgttccagggcaaagacggctgcctgacccgcctgagcgaggatgaggccctgcccctgagcgaactgaaggagaagctgaaaagctgcaccggcccgctgtggctgtgcggcgatggcgcccatttggggcttgccgcctggggggaggagctgccggtgcggatggccccagcacatctctgctgccaaagggcctccgcggtgggcctggctgccatgcagcatttaggggaggcagtttccccggcggccttagtgccctgctatctccgcccggccaatgccatgaccctggccgaacggcagaaaaaagccgagtaaaaaaccgcctcttttcgtgctcgtcagggcgcaatccaccaagaccaccccgcccccaaaaagccgggcatttgccacaggatccgccccgggcgcccgcgcaaaccaagtaaactttacaccaaaggagtgttgtgatatgaagatcgtcataggctgcgaccacgctgccctgaccctgaaggacgccgtaaaggcgcacctgctggagctgggccacgaagtcaaggacttcggcatctaccaggccggcgaaaagtgtgattaccccgaaaaggctgctgaggtggcccgctatctgcgggacggaaacgccgagagaggaattctcatctgcggcaccggcgtggggatgtccatcgccgccaataaggtgaagggcatccgggcctgctgctgctccgataccttcagcgcccgcatgacgcgcgcccacaatgacgccaatattctcaccttcggggagcgtgtggtggggcagggcttggccatggagttggtcgatgcctttttgaccacagaatttgagggcggccgccatcagcgccgggtggatctcatcaccaagctggagcaagaggaaaacagctgatttaacctattcagtcactacacaaccattgccgatagaatcacaggaggaaaaaacatgtctcagacctttgaaccccagatcctcaatcatcccctcatccagcacaaaatctccctgatgcgcaaaaaggagaccggcagcaaggacttccgggagctggccagcgaggtagccaccctgatgtgctacgaggccacccgggacctccccctcaaggaagtcacagtggagacccccatctgccgctgcaagaccaaaatgatcgccggacggaagctcgccatcgttcctattctgcgggcgggccttggcatggtggatggtatgctgaccctgatccctgccgccaaggtgggccacatcggcctgtaccgggatgaggagaccgccaagcccatcgagtatttctgcaagctgccctgtgatatcagcgagcgggaggtcattgtggtggaccccatgctggccaccggcggcagcgccatcgatgccgtttccatgatcaaaaagcacggcgccgccaacatcaagtttatgtgcatcatcgctgccccggagggccttgcggcctttggaaaagtacaccccgatgtcaaggtgtatgtcggcgtgctggatgaaaagctgaacgatcgtaactacattgtgccgggtctcggcgatgccggcgaccgcattttcggtaccaagtaaaatcaatcgcagggggaggggaagcggtactttccctcccttttcgggctttagcagggggcagggcccgggccgcaggccgccccggcttcgccggggccgacgggcttcgcccgctgaggccgtccggaggacggcctggcctgcggcccggcacccttgcccccgctaaagcccatccgaggagtaaactatgccaacagagctgtacgaaaatttagaggcccccaagaaggcggtactggccgccgtggataccggggagtatgatgtggaaacctcgctggaggagctgcgagagctggccagaacggccggctacccggtggtgggcaccgctacccaaaagctgcaaagtcctgtggcggccacctttatgggcagcggccgactgctggagctgaaggagtacctggaagcggtggaggccgacctcatcatcttcgatgaggagctttccccggcgcagctgaggaatatcgaggagctgtgcgactgcccggtgctggaccgcaccatgctcattctggatatctttgcggcccgggccgccagcggcgagggtaaattacaggtggagctggcccggctgcaataccagctgccccgcttggcgggccgcggggtgcagctttcccggcagggcggcggcgggaccggcgggaccggtgcccgcagaggggccggtgaatccaagctggaagtggaccgccgccacatccgccgcagaatagacgccctaaaaaccgaattggccgccctggcacgccgccgggaacagagaagaacccgccgtaaaaaagacggcgtgaccacggtggccattgtgggctacaccaatgtggggaaatccaccctgttgaacaccctgacccaggccggggtgctggcggaggataagctctttgccacgctggacccgactgcccgggcgctggagctgccggacggacgaaaggtcatgctcattgataccgtaggtttggtgaggcggctgccccaccagctggtggaggccttccattccacgctggaggaggcggccagtgccgatctcattctcagcgtctgcgatatcaccagcccggagctgctagaacagcgtgccgtgacggaacggctgctggaggagctgggggtggagggcacaccggtcatcaccgtgctgaacaagtgcgatgccgcccctgatgcccaaaatgagccctataagggctgcgtccgcatctcggcaaagacgggctacggcttgccgcggctgctgcaaaccatcgccgaaaccctgccgccccaaaggatccgctgccggctgtgcctgccctatgccgaaggcgccctgctgcaccggctggaggagcagggacagatcttcagccgggaatacaccgccgagggcaccctgctggatgccgaggtggaacagcgggactggcggctttatgaagcttacctaaagacggaggactgaaccgttgcagaaggcaaaaaattatcatctttttctaccaactcctcagccggctatgcgattggccgaggagaaaagaaaagagtgacaagccggctaaaatgcgctattatagtaggacagagcggcagaacgccgccaaaccgatgaaaatgaccgcagagatgcggacagaaggagaaaattatgcagccaattcgtattcaaaaagcgctgagtgaagcgggagtggccagccgccgggcggccgaggagctggtgcgccagggccgtgtgaccatcaatgggcggaaggccgaaataggccagagtgtgaaccccgaccgggatgtgatagcggtggacggcaagcgggtgtattttgcccggaagaagcagtaccgctacattatgatgaacaagccccgcggctatgtgaccaccctgaacgatgagttggggcggcgctgcgtcaccgacctgctgaccggggtggaggaacgggtgtaccccatcggccgcctggaccgcaatagtgagggacttttgctctttaccaatgacggcgagctggccaaccgcattatgcaccccgccagccacatcaataaggtgtaccgcgtgacggtgcgccccgatattaccgatgaacaggccgcggagctttccgccggggtgaagataggggagaacaccaccaccctgcccgccaccgtcattgtgctggaaaaacagcccggccgcgtggtgctgcaaatcaccatcagcgaggggaaaaaccggcagatccgccggatgtgcgaggccgtggggctggaggtggtgcgcctgaagcgcattgctgtggggcccattaagctgggcatgctgcagcccggccgctggcgtgacctgaagtccagtgagctgatcgcgctgcggggcgcgattaccaaggcaggcggcaatggcgccggggagggacaggaatgatctcgatcctacccatccagccggatattttacagatgatggccgaggataccggcctgaccgccgaggggccggtgtggggctactttgcggctgagggcaccaaaatgctgggctatgtggtggtggaaaaggccgagccggtgcgcatcatagcgctgcaatgcgaggactttgtgattgccgatgggctgctgcgccgggcgctgcatcccttttacgaggagggcagcaagggctatacctttgcgtgcgaagtgcccatgccgctgccgatggcctatacccgccggggagcgggcagcctggaggtcctttttgcggggaaatgccccggaaatacaggagaaatctaaaaaaacctcttgcgtttttccggtgggaatgttatcataacaaagtaccgtctaatagtatgtaaggaggtgtaacacatgcccaatatcaaatccgctaagaagagagtaaaggtcattgctaccaaaactctgcgcaataaggccatcaagtccgagctgaagacctatgtcaagaaggctcagaacgccgaggaaaacaaggccgaggccgtccgcgtcgcgatcaagaagatcgaccaggccgctgctaagggtatcctgcacaagaataccgctgccagaaagaaatccgcactggcccgcagcctgaacgcgtaaaaatggccgcacccgcccggaccgtgtcaccgggcattcgctgggcacggatcgttcccgtacccatgcgcgcagccgaagaaaagaaactcggagattgcaagcacaatcttcgggttttttgctttatatatctatatgcaggatttgatgcaatttcaatggcagaaatcagcgctggtgttgacattgaagattgctgccggataagcgcggcggattttatgcagattccgcagggagccgcaaaccgtgaagggcgggccgcaggccgcccgccgaaggcgggccagcgggcgaagcccgctgaaaccgtccgcaggacggtttggcctgcggcccgaaccccgccgggcgctgtgactgatcctctattcgctaacccttttgccctacagcaaagagaaccccgtgacccaaaggaagtatccatatgactctgtttatcaatgattacagcgagggctgccacgaaaggatcttggaggccctgacccgtaccaaccgcgttcaaaccaccggctatggcaccgatccctactgtgccgaggcccgcaatatcctgcggcgggagatggcctgcccggatgccgatatctggttcctatccggcggcacccagaccaatctcattgcgctgacggctgccctgcgcccgcatgaggcggtgataggcgccgcgacctgccatatcttcgtccacgagaccggcgccatagaggccaccgggcacaaggtgctggtcatcccggatgaggagggcaaggtgcgcccggagggggtgcgcgcggtgctggcggagcacagcatggccccgcatatggtaaagccccgggtggtgtatatttcgcaatccactgaggtggggacggtatataccaaggccgagctgaaggcgctgcatgaggtgtgccgggagaataacctgctgctgtacgccgatggcgcgcggctgggggtggcgctgaccgccgaggggtgtgatgtgacgctggccgatatggcgcggtactgcgactttttctgcatcggcggcaccaagaatggcgcgctctttggggaggcgctggtgctggtgaacccctgcctgaagccggactttttgtatatcgtaaagcagcggggcgggctgtttgccaaggggcggctgctgggaattcagtttgcggagctgttccgggatgggctatattatgagctggcgcgccacgctaatggagaggctatgcgcatcaaggcggcgctgaccgagctgggggtggccttccaggtggattcgcccaccaatcagcagtttatttatctaagcgaggagcaggccgatgccctgcggacgcgctgcacctacgatgaggagtggcgccgggagggccgggtggcgctgcggctgtgcaccagctgggccacccagccgcaggcggtggatgagctcattgccgcgctgcgggagataataagataatgcggaggtccctgccgggtggcagggaccttttttgcggaacagggctacccatatagcttttgccaccagggacggtgggattcgagggcggggatgctctccccggcggcgaggacggcggtgccaatgacatggtccccgcggcgccataccacctggcccagcggttggccggcttccaccggggcgtagcagaagccgcggtttaggtagacggtgacggtgatgccctcctcccggccgcgaatggcggtataggtgggctggcccacaaggacggtttgcagggcggccttctggccgcccaccaccggcagaatgggggcttccagagtaaggggacggctttcggtcaaggcgaaatagcgctggtacagcgccgcgtgggtgttccagtcatcggggcaatttaaggtgacgcagatgagctgtacaccgtccttttccgcggcggagaccaggcaccgcccggcctttttggtaaagccggtcttgacgccgatggcatcaccatagagggagagcaggcggttgtgattgagcaggctgcgggcgtagggcggctggccgtagctgaccgtcatgcggcggctggcggcgatcccggcaaagaggggattctgcagggcagcgcgggccagcagggccatatcgtaggcggtggaatagtgctcctcggcatccaggccgctgggggtgacaaagtgggtgttgttcatgcccagggaggccgccctgcggttcatctccgccacaaaggctttcatactgccggaaatgcgtaccgcggccgccccggcggcgtcattgccgctggccagcagcatgcccaccgccagcgcgtacagggtgacggtatcgccctgccgcaggcccatgctggagccctccacccggatggcggtttcatccacagtaaattcctgctgcagattgggctgctccagagtcagcagggcggtcatgatctttgtggtgctggccatgggcagctgccggtggatctcctgcgcgaatagcacctcgccgctttcggcctccatcacgatggcggcggccgcccccaccccgtaggcttccccggtgaccaggcaggcggctgcggccgggtgcatcagcagcaggatggccgccagcagcagagcggcttttttcatgggacagacccccttatttttgcgtctttgctatgtgtatgcgggggcagggcggcaaaatgccgtgggacgcaaaaacggcagggcgcatgccctgccgtgatgtggctgatttgcggttattcgtcatcggtcagctcgcggctgtacaggtagcggcggccctcatgcccgcgggagagccactgggccagcagagagaggacagcgaataccgccgccagccgcgcgatgagacagatgattttccacagagttttcataatggcctccttttggcgtttttatcattataccatggggagagcgcctttgtaaacggggggaagtttaagaggggtttaaggtttatttgcgatagccgggcggcgcggttttgcaaaggcgtaatctgtacatctcgccgccgtggccttacctttctatgaagaaaaggagttaaaagattattaggccaggtttgttgtcgcctgttggcgtcgcggaatcaccggagggtgacggccggtacgcctacccggcgggggggttacttttctatgaagaaaagtaaccaaaagtcatttagggctctgccctaaaaacccgtacgctcgtcggacgcaacctccgcttgagtcgagctgaccctgcgctttgcttcgggcagcactctccgctgcggtgcatcctcctctccccacaaggtcttgcgaccttgcgggggccccatttgccccgcccggaaagccaaagcgacggcttcccggagcgggattagacgacgctgataaggtgccgcaggcgcattttatgtaggaccccggtggcgaggcgtgctggttagtgctctccggcttcatccgcaccacaaaaaagcaccccgattggggtgcttttttgtggtgcggatgaagggacttgaacccatacagtattgctaccactagaacctgaatctagcgcgtctgccaattccgccacatccgcaggtcagcttagttataatatcatttcccggggaaattgtcaataggcaatcggcaaaaaaatatccttttgccaaaaaacaagcccccggccaaaaccgggggacttgcgtatggtgcaaaacggtacagggtcgtatcagcgcttggagaactgaggcgcgcgacgggcggccttcagaccgtacttcttgcgctccttcattctggggtcgcgggtcagcagaccggccttcttcagaatgggacgcatctcatcgccgtgctgcagcagggcgcgggcgatgccgtgacggatagcgccggcctggccggaaacgccgccgccagcgacggtgcaaacgacatcaaactggcccagggtatcggtaagggccatgggctgacgaacgatcagcttcagagtctccaggccgaaataatcgtcgatgtctctgccgttaatggtgatcttgccggtgccggcgtacagacgaacgcgggccacggagctctttctacggccggtgccatagtaatagggattcttgctctcgtacatggattatttctcctttcgatcaaatttcttcgggcttctgggcagcgtggccgtggttcgcatcacggtagatgcggcagcgggtcagtgccttgcggccgatggtgttatcggggatcatgcccttaacggccagcatcatggccttttcgggggtttccgccatcagggtcttgtactggacctccttaaggccgccgacataaccagagtgatgacggtagtatttctgctccagcttgcggccggtgaggactgcctgggcagcgttgatgatgatgacatggtcaccgcaatcaacatggggggtgaaggtgggcttgttcttgccgcgcagcagaacggcggctttttcagcggtacggcccaggggcttgccggccgcatcgatgatgtaccatttgcgttccatgccgggctttgccatggtagtggacatatctttttcctcctgaatatttgttagctttcttttagcgccccctgtataacaggcgcagatacaaagcgacaatgattattatagcggggggctgtgccggtgtcaaggcgtttttcttattttttaatttatgatgtgcagctcttttatttactcttgttttctcgtgaattctactgttttcttacatgtcaattttcattttgtgtcctttacggccgggactttgcggcctttttgcagaggcataaattgcagcgcctgccctgtgggagtttttttctgtgaagaaaaggatgcaaaagaatttttgggctgaatttgtagtcgcctgacggcggggcattgattttgcagggtgcaaagccggtacgcctacccggcgggggcctacttttccatgaagaaaagtaggcaaaagtcattcggggaggtccccgaggcccccacgcgtcggtacaccccgtaaaattggggcccccgcaaggtcgtaagaccttgtggggaaaggaggatgcaccgcagcggggagggctgcccggagcaaagcgcagggtcagcccgacttaagcgaaggttgcgtccgacgcgacgacgcttataaggtgtttattttaatt

SEQ ID NO: 1191 - DNA, 3269 bp, Unknown
  16S sequences of unknown bacteria
agtgaaaacagctcttgaccaaaatgatgatggcgagcttaatttaaaagatgcatccataattgcagagaccctcaatgcctctgtaaaaggaaccgttgcagttataaaagatattgcacaaacgaaaaatcgggaattggaattaaaaacgcttcagcctattttcgcagaaaatttggacggcgcggatttcttgctgccaaagcttgtccgcattaccgagatggacaaaagacgtgcagaaagcgaagtttgcaaaggttctgtgggctatttctcgaaagaaaaagatttgaaggtcgtcaatattttccgagataaaatcggtacttttgggctgaccttttatccagacacagataacgatatttactatgttgaccccagtgaccgcgaccgttatatcgccatggatgattatttcagttatttaaaaactgcccgagtcaacgaactgcaaaaaattgcacaggatttgggcgcaaaacattttagagtaactttcaaagagcaaaaaacaaccttttccaagaaaaagcaaaaaggcagcgcgaaggcaagggcagcaggagaccacgccgatatagatgcagaacatgaacttgcttccactgcagtggctactgtggaaattgctgctgaactggattttcccggtcacgcccccatgccaccggaactccattatctgcaaagagaacctgccattcaaacgttgatttccctgcgaatggataaagcttcgccattgacacaccagaaatacactctgaagcttagcaactcatctggaataaaagaaagcgatgccattaaaatcgacgcagcattaaaatccatgaagatttgcggcaacactacaattgccagcgaggtccagagcgaagcgcgaaaattctttgaatatgaaattgatttctaaaccgtcttcaaatttacagcacgccaaaagcagactgctctttacaagagcagtctgcttttcattttgggctttccttttccataagcctttttgttcccgtcccgaaagctctccgctgcggctgtccgcgcggcgccgcagcgggtgacaaaatccggaacacgtagtataatagaagaaaattttggtaatttttgtccttaaatgtataagactgtcgaatgtagtccccccggagcggcgcctgcgttccgcatgcccgcggcgcgctctcactcttggagcatggtggttatgatcaagcaacatttaaagcaaaacgtatacgaagcctttctggaacggctgaaattcatttttgaggagttcgacaatatctatatctccttctccggcgggaaggacagcggcctgctgctgaatctggtgctggattaccgggaccgctgcttcccccaaaaggcgctgggcgtttttcatcaggatttcgaagcgcagtacactgtgacgacggaatatgtggaacgcaccttcgagcgcatcaagggccgtgtggagccttattgggtctgcctgcccatggccacgcgcaccgcgctcagcagctacgaaatgtactggtacccctgggacgacacccgccgggacgcctgggtgcgggaaatgccgcaaaaggaatacgtcgtcaacctggaaaacaaccccatatcgacctaccgctaccgcatgcatcaggaggaccttgccaagcagttcggcagatggtaccgcatttcacacggcggccggaaaaccgtctgtctgctgggcatccgggcggacgaatccctgcagcggtacagcggctttttaaacaagaaattcggctacaagggcgaatgctggatcagcaagcagttcaaggacgtctggtgcgcgtcgcccctgtacgactggtccaccagcgatatatggcacgccaattaccggttcggctacgattacaaccgcttgtacgacctgtactacatggccggcctcaagccctcgcagatgcgcgtggcctcgccgttcaatgactattccaaggattcgctcaacctgtaccgcgtcatcgaccccgaggtctggacaaagctggtggggcgcgtgcagggcgcgaattttgccgcgatctacggccataccaaggcgatgggctaccggaacatcacgcttcccgaggggcacacatggaaatcctacacccagttcctgctggacacactgcccgcccgcctgcgcaacaattacgtcaaaaaattcagaacgtccatccagttctggcacgaaacgggcggcgggctggacgaagccgtcatccgtgagctggaggcccacggctaccccatcctgcggaacggcgtctccaattatacccgcgacaaaaagtcccgcatcattttcacaggccccatccccgacgatacggacgacatcaaatcgtcaaaggacattcccagctggaagcggatgtgctactgcattttgaaaaacgaccacaactgccgcttcatgggctttggcctgacgcgccagcagcagcggcgcattgatatcatccgcaagaaatacaaaagcgtggaggcgatggaaaatggcgtataaaagcccggtctaccatgtcattcccgtacccatcgaaaaggtgcggccgaacacatacaaccccaacgccgtggccccgcccgaaatgcgcctgctgtacgaaagcatcagggcggacggctacaccatgcccatcgtgtgctattacgccaaaagccaggacatttatgtgatcgtggacgggttccaccgttaccgggtgatgctggagcatcccgacatctacgagcgcgaaggcggcgtgctgccggtttcggtcatcgacaagccgctggaccagcggatggccagcaccatccgccacaaccgggcaaggggcagccacgacgtggacctgatgagcaacatcgtcaaggagcttcacgagctgggccgttccgacgcatggatcgcaaagcatctcggcatggacaaagacgagctccttcgcctcaagcagatcaccgggctgacggcgcttttcaaggatgtaaagttcgggcaggcatggcagcccatggacgaggaagacggggatgaaagcgaaaacggtgacgacgcgctgctgggctgaggcctccccctctgccccggcgcccgccgtttcgcctccggcgaaaccgtgcgatcacttcccgcaaacgggagattgcaggcgtccaaatgacgtttttgtgttagggcaacaccgcacaattctaagagtcgaatcgcgccggcagattttttggcaggt

SEQ ID NO: 1192 - DNA, 3331 bp, Unknown
  16S sequences of unknown bacteria
ccgtgggtatcggttctcctgcccgtgtccgcgcctgtgctcgtgctcgtgacaaaccggatagctcctgaccatatacgtgacaaaccggctaggctctggccatttttggccaatgccttgccgatctgtcacgtatatggtcaatgccttgccggtctgtcccaatcgcgataatggcacgatacccacggcccctcgtgccagtttgaaccggagggacaccccgcctcggtccgtagccctgcgggcgtggatattcgctagtatggagcccatggaaaacaagcagacatacgacagctcctgggtgcgttcgggcaagacggacgcgcccggcatccgcgagcagctccgctccgtccccgaagaaccgggctgctacctgtggaaggacagaaacggcgcgatcctctacgtgggcaaggccatcgacctgcgcgcccgcatgacccaatacgtcacgggtcaagacgagcgcgagaagatcccgctcatgatggagcaggtggcgagctttgactacatcgtcgtcacgaacgagaccgaatcgctcgtcctcgagaagaacctcatccagcagtaccacccgccgttcaacgtggactaccgcgacaacaagagctacccctacatcgcgatcaccgaaggcgcgctgtaccccggcataaagtacacgcgcgagaagcacaagtcgtcgacccgctacttcggcccctacaccgacgcccgcgccgcgcgcgagaccatcgacacggtgcgccgcatcgtgcccatctgctcgtgctcgtgcgcggagtaccgcaagctctgccgcaacctcgagcacggcaaatggcccaagcccgacgacaaggcgtgcttcgagtaccacatcggcaagggggcgggcccctgctgcgccgccatcacgcccgaggcgtacaaggaatacgtcgcgcgcgtcgagcgcttcttgtcggggcaccgcgacgagttcgtgaacgagctcacctcggagatgaaccgcgcggcagccgagctcgacttcgagcacgccgcccgcgtgcgcgaccgcctggccgccatcactgccctgcaggaaaagcagaaagcggtgctcccgcgtcccatcaacatcgacgtcgtgggctttttccgcgaggagaccatcgcgagcgcgcacgtgttcgtcgtgcgcgagggccgcgtcatcatcagcaacgacttcatcctcgacaagggcatgaacgtcccgcaagccgacctcgtcggccagttcctgagcaggtactacgactccacgcaggagcttccgcacgaggtggtcatcgccgagacgctgcccgaggacgtcgtgcgcccgctcgagagctggctgacgcagcgtctcgcgagcgtgcacggcgccaaggtgcacgtcgtggtgccccagcgcggcgagaagctcgacctgctcaagatggcgcaggtcaacgccaagcacgccctcatgcgacacaaggtgcgcacgcgctacgacgaggagcgcaccgacctcgcgctgctgcagctcgaaagcgcgctcgcgctgcccgagccgcccatgcgcatcgagtgctttgacatctcgaccatccacggcaactactcggtcgcctcgatggtcgtgttcaccgccgggcgccccgacaaatcgcagtaccgtcgcttcaagattcgcaagacctacggcgaggcaaacgacttcgccatgatgtccgaggtgctgcgccgccgctacgggcccgagaccatggccgacgagcgctttggctccaagcccgacctgctcatcctggacggcggcaagccgcagctcacggccgccatgaccgagctcggcaagctgggcgtcgacatccccatggcgggccttgcaaaaaaggacgaggagctgttcgtgccgtggaacgagacgggccccgtcgtgctcccgagcggaagcccctcgctgtacctcatcaagcacgttcgcgacgagtctcaccgcttcgccatcaccttccaccgcgagctgcgcagcaagggcatggtcgcctccattctcgacgacgtgcccggtctggggcccaagcgcaagaagctgctgctcaagaccttcggctcggtcaagaagatgcgcgaggcgacgctcgacgagattgccgccgtgccgggcatcccgcgtcaggtggccgaagacctctacgccgtcatcgtggattcgaacgcgtagagcggcctcgcgggctgctctgtctcaccgagacgctatacttggggcgacacggcaagcagaaaggtcgcgctatgacgcaacaggaaagtctcgacgaaatcgacccgacctcgttcgggccggacctcatcatcatcaccggcatgtccggtgcgggccgcaccgaggccatgcacacgtttgaggacatcggctacttctgcatcgacaacctgccgccgtcgctgctcatgaacctcgtgagcctcgccggcctcaacacgggcacgctgcgcaagctcgccgtcgtgtgcgacctgcgcgccaaggagttcttccccgagctcaccgccgagcttgccaagctcaaggagatgggcctgtcgtacaccatgctgtttctcgactcgagtgacgaggagctgctcaaccgcttcaaggcgtcgcgccgccgccacccgctgtgcgacaacggcatgacgatcgtcgcgggcatccgccgcgagcgccagctgctggcagagtgcaagcagatggccgactacgttctcgacacgagcaccgagcgcccgcaggacatgcgcgagaagctgcgctcgctgttcaccgaccagtccgcgcaggagggcctgggcgtctccgtctactccttcggcttcaagcacggcgcgcctaccgacgccgacatcgtcattgacgtgcgcttcttgcccaacccgttctacgagcgcgagctgcgcgacaagacgggcatggacgaggaggtcaaggactacgtcctcggcaaagacgagaccaaggagtttctcaaacgctggttttcgctgctcgacttcgtcatgcccggctacgtgaaggagggcaagcagtacctgtccatcgcggtcggctgcacgggcggccagcaccgcagcgtcgtgctggcaaacgcgacggggcagcacctgtcgcaggagggctaccgcgtcacgaccacgcaccgcgacctggcgcttgcggaggtgcataagtgatgaagcgaacgaaggccgtcgtcatcggcgggggcaccggcgcccccgtgtccattcgcacgctgctcgacatgggctgccaggtctcgtccatcgtctcgatggtcgacgacggcggctc

SEQ ID NO: 1193 - DNA, 2749 bp, Unknown
  16S sequences of unknown bacteria
acagaatcttattcagcaatgtcacaagcagagcagacggaattgcgatatagttatctattgcaggcaacagcggatgcccaaggtgattttgcgagaacttctagttcatacgcgaatcagattaggctgttaggagaaaattggacggagtttactggaatggtggcttctcaagtaattccggtattgacgttgttggtggaagaattgaattccggaatttcatggttatctgcgaattggagtgttttacagcctgttttattgggaattatagcattggtaacgacatatacgagtgtgctcgccgcgcatgccgtgatgcaagctatatctaatgctattgagttggtggcggaaatacaagcgtataagacggcgaccgcattgttggcgaatgtaaacgcacaattgttggcaacttctacagaatatgctttggctgtagcgacagcacaggcaactgtagcacaggcgggatttaacacagcattattggcgtgtcctgtgacatggatcatagtggttattatcgcattgatcgctcttttatatgccgttgtagcacatataaataagacaagggatgaggcggtatcggctactggttatatctgtggagctgttgccgttgcaggagcatttattgtgaatacaggagtagggctattaaatgggctgatacagctcatatggagtatttttgtcgaaccgtttttaggtattgttgaatgggtgctcaatgttacaaatggaggatttgacagctttggcggagcggttgcaaatctgatcggaaatattatttcatggtttttatcgcttggcgaggttgtcaccaagattattgatgcgattttcggaacagattggacagcgggtcttaatgcgttacagaacaatgtgcttgcgtgggggaaaaatgaaaatgcaatcacgcttgacagggaagcgcccacaatcgcttatcgtgcaagttacagtgatgcctataacaagggatatgatttcgggcagggcgtagagaacaagatttccgacttctttggtggtattaaggatcttggaaacagcggagacaccggagcgttaggtagctatggagccgcatctgatatggctgcgaatgtcgccaacatagcaggtgatacatcgaacatctcggattcgctggatgtttcagaagaggaccttaaatatctgcgtgatattgcggagcaggaggcaatcaatcgctttacgacggcggaaatcaaggtggatatgtccggtatgagcaataccgtgcataataccaatgatctggacggtattgtggatggactgactactcgggtactggaggcgatggaagcggtaaaggaaggagtttagagaaatataatgacaaatatcgggcagtatagtataatcgaactcataaacaggagggaggataaagttatgagtttgattagttgcccggaatgcgggaaagaggttagcgataaggcacaaagttgccctaattgtggatgccctttgcatggaacgcaggagatgaatgcggaaatgcacagagctgggacagcgggaatgcctttgaaccaacaacagagtgcgtcccaggtaaagccaaagaaaaaaggacgtggatgtttgatcgcggtgttaatagttgtttttttcatgatttgtggcattgtaggcgctacggcttctagagccaataaggagactgcaggtagcacaaatgcggaagtggttgaagacgttcagcagtttagtggaatttcagtagaagcactaaaggaaatcatgggcgacccagtggcggaagaggagtggacaaattccacatcaaagggagaattcccggttacaacattgcagtatgaaaagaactcaaatcattatgaatttattattgcagaggatgcagtggtgagattgtcgatttattcaaatcaatactggaatggtacaggtgacttattctcatactcaggcgataaagaaaacattttgaaaatgttcaatgttgatgctggagaaagtgcgcgtatagaaactgataatggagtttcgtatgtattggtttccgtaaatgatgcgattgctgaatttaatgttcaagatatcgatgcgaacgcagagaattttggctttgtgaaaatcacatataatgcaaattattttgactaattttttccccgcttacataacgtaggcggggatttttatacccatttttaggaaaggaggaatgaccgtggcatacagattgtatatggatggcattttatttcccgttacgccgtccaagatcaccatgaaaatcaacggcaaaaatgaaacggtcacactgatcaatgagggggaagccaatattttaaaaagccccggtctgacggacgtggattttgagctgctgcttccggcggtgcagtacccgtttgcggtatacccgagcggattccgtccggcaaaatactatctggacaagctggaagcgctgatgagcgccaagagtgcgtttcagtatgtggtcacgcgaacggatggaacgaatcagcgtttgtttgataccagcatgaaggtatccattgaaagttacgacatcgtggaggatgcgggggaagggctggatgtaacggtaaaagtaaagctccggcagtaccgggaattcacaaccaaggcgtgtacgtttgacatttcgcttccgaagccgagagctgcaatgcaggcagcaagagcggcatcatcc

SEQ ID NO: 1194 - DNA, 7095 bp, Unknown
  16S sequences of unknown bacteria
cccgctccccctctcccttcgcttgacttcttcaactctttctgctatcatttctttacacccttcttcccttttcgcgcgttgaacttcgtatctatcgttacgcgcgcagactcctccccttatcccgcaagccttttctctgaggcggcgagtaaaggacgaaagccaaaggacaacttcgttcccttcccgattttttcgcagacaatgcaaaaggagatactgccttgaaaaatttacgaatcatctttaccgtcatcgccgcgctgttcgttgccgcggtcattcctctgggcgcgctgtactcgtgggcatgggcggggctttgcgtcatcggcggctttctctttttcgggcttatgctgttgtgcaagcagaagcaggaagaaaacgacaagcgcgcgaggcacaacgatttgtccgaactgaatttctttggatccgattcgcctgaacgaaagggcggggaaacggacgacaagaaaaagggcaagtgaaaaaagttgcttttttaacaaaagttttgcggcaaaaacgtatttacctattgacaatttgcagaaaggatattataatataattatcaaatataacggaggctttttatggaagcatatagaaagtggatcgattctcttcctcttttgatcagaatcattttggcactgcctgtcatcgacggtatcatttacggcatttaccgtatttgcaaagggacaaccaacggtcttattctgggcatcgtttggatctttatcggcgccgcgatcgggtggatcctcgacatcgtcctgcttgttatgaaaggcagcgtctgggagttataaatcgatctttcataaaaaatcccgtcgtttgcagattgcagacggcggttttctattctttattcccctatatcttttcctaatctatatcggcatatacgacggttttttatttccctcctattttcccctatataatatatattttgtcgcgcgcacgcgtaaaagacacgggatcgtagcagtttttctccaaacgctcccgcgcggagtcaacaaagtcggaaggaatagatcgtcgtccgcttgtaggatgtttgcgcgcagtccgtcggggagccgaagcaacagaatccgaaacccgccgcttttctcgccttccccttccaaatacccgcctttcgcgggcaaagccctccacagcgcttgcgccgtcggctcggggctttatcatggcggttgatagcgagggaacgtttttcgttcggatcgttttttgtcctccgcgacaaagaaggcgcgaaaaatggatagaacgtcgcagacaagcgcaaaagatacttaaaaaagggagccgcgtatcatgacagcgcggattgtcacgcttacgaaaaacggcgatttccctcggcaacagcgattttcaaccgcgaggaaaacatcgtaacaattgcggctcatccggcgcagcgtccctcctgtaagagggaaataaaaagcccgtttccgaaattcggaggcggacttttttgttcgtcaaatacctgggtgcttttttttattattcacgacggtcgaaacgctctatcatatcgagcatttcctcgaagcggtacaaatcttccgcggaataataatcgatataaattctgccctttttatcgttgccgatcaacgacactttggtgcggaaaaccgaacgcatacgctcgacgaacgctttgagctgcgcgctcttctccgccgcggcggctgccttttccgattgcagcacctcggggggcgtcaagaacgccttgacggcgcgctccgtttcccggacggaatatccgcgccccagcgcctctttggcaaaagcatactgtttgtcctgcggaacggacaccagcgcgcgggcgtgtcccgcggacagtctgccgcattccaccagccccaccacctccggggaaagagtgagaagccgcagcgtgtttgccacggcgggacgggatttgcctatttttgccgcgacgtcgtcctgcgtccagccaaattcggtcaggagctttttcatcagatacgcggcttccattgcccccacagagtcctctttcaagcgttccaccgtttcaaaaagctccgcttcgcggtcggaaaaccgatagacgatcgcaggcgcctcggcaatccccgcgcgcttggctgcgaaatagtcggcggcgcccgaaagcaggcgatatctgtcctcgcccaaagcattgacgacgagaggcggcataccgttcaataaaaagtaagcggcgcggcgttctatctccttttcgtcaaaaggcccttccggcagggactccgaagcttccacgccgtccatccgaatacttttccgttcgcccgcagccgcgggcaccgataccttttttgcggatttcatagttactccgtgtattcatcgggaagcggacgcttccctctccgttccctttttgcgccgtcctgaaaaacaccgccgcaaggggacaaggcgggcgttttttcaaaacaggaacaacgcgccgattaaacgatgttcgccgtcgaacagacgaaaaacagaaacgccgaacatcccgcacggcaaagggaggcaaaaatttattttcctgccctataaaacggcgcgcccgcgattccccgactcaacttggagaaaagcaaaccctctccgtccgcaattcaggctctgtaaagcgttttccaaacgcggcttcccgcaaaacggaatacccagcgcatagatcctccgacaaaaagcgttctctaagcgcgacctttcatgaaacagcatcccgccgttataagtccgacggggaattttatctaacctcgaacgccaaggagcgatattgccttcgccgacgcgaccttagcgacgaaaaaatcctttcttctatccgccgcaacgtttcctcgaaagcggcgtgcaatccgcagagaaacggtacggagccgagaaaaattcccgactccgcgcttattttatgatagagcgtcccgacggaaagaccggttttcttaaagccttttacgcggattcgcgccgatcgtcggcgggatgtttttcagtcttaccttcgcaaaagtccgcagtgccttccctttttccgacgccgagttgtttaaacgagcttgggcgtcaggtggtcggagccgggcgtcgtcatgttttcaaacggattttcgcggtgtttatcctcttcccgttccatgaaatcgatcacctcgcgaaaggaagagccgcgcatcaacatggacacctcttcggtgtagatcgtttctttttccaccaatacgcgcgacatattatcgagaaccgccctgttttccgtcagcagcttgacggcgcgttcgtgcgcgcccgccacgagtcttctgatctcgtcgtcgatctccgcggcggtcttttgggaatagccgttgcggctgccgccgccgtattcgtattccatgcccatgaatacgggctgatcggaatcgtaagccacaagcccgagcttatcgctcataccccactgcgtgaccatgcggcgcgcgaggtcggaaacgtgctgcaaatcggcgctggcgcccgtcgtcacgtcctgaatgacgagttcctccgcgactctgccgcccagcgacatacagatattgtccaccaatttattgtacgaaacgtcgttgtcgtccgtttcgggacgggtcatcgtatagcccgccgccttgccgcggggaatgatggacacttcgtgcacgggatcgcagtgcttgcaaaggcaggccaacacggcgtgccccgcttcgtgatacgccgtacagcgcttatccgattcggtgacgacgcggctgcgcttcgcaggccccatcagcaccttgttgatgccgtcgtacagctcgatgttgccgatcagcttcttgccgtttctcgccgccaggatcgccgcttcgttcaaaaggtttgcgagatccgcgcccgagaatcccgcggtgatgcgcgccaccgtcttaaaattgacgtcgggcgcaatgggcttgttgcgcgcatggactttcaaaatctgctccctgcctttgacgtcggggagattgacgtggatctgccggtcgaagcgtccgggacgaagcagagcggggtcgagaatgtccgcgcggttggtcgccgccatgacgatgacgccctcgttcgtttcgaaaccgtccatctgtacgagaatctgattgagcgtctgttcgcgttcgtcgtgaccgccgccgagtcccgcgccgccgtctgccgacggcgtcgatttcgtcgataaagatgatgcagggctgattctttttcgccatatcgaaaaggtcgcgcacacggctggcgccgacgccgacgtacatttcgacgaagtcggagccggaaacggagaagaaaggcacgcccgcctctcccgcgacggctttcgcgaacagggttttacccgttcccggagggcctaccaagagcacgccgcggggaatcctcgcgccgaggtcggagaactttttgggagtcttcaaaaattccacgacttcctgcaattcttctttttcttcttccgcgccggcgacgtccgcgaaacggactttgaggttgctctgtacgtgcgccttggtcttgccgatactcatgaccttaccgccgccgcccgccgccgaacgcattaaaagccagaacaccacgatgacgaggaccgcggcgcccagcgtaaagattcccgaccacatactgcccgcgttcggatctgcaaaatggacatcaaaaccgcgcccgatccaatccgccacccacgtattttcgggatcataaggattaaggcccgaacattttaaatattccgtttttcccgcagcttttaaaattcctttataattgtagccgtccacataaatttctatctgcgcatcttctgtttttgcagcttcctctactttttccgtaaaagtactgaaatgtacttcggtgtatcggggagaaatgatctgctgaaacaatattgccacgactaccacgatgatcaccgccatggcaatccaaaatatggtttttgttttcttgttcaatgctctgactccttacataaatatcccgcggcgcaactcccgcggtccgacctttcgtggggcgggaacgccacggataactatctaacattttaacacacaagcctctttttttcaagcgtttgcggtatacatttctaaacatttagcaaacattcacaaatttaacactctcttcttttttcgaaaacgcaaaatttccccttttccgacttgcgttcttcccccacgtccgccgagccttttttaaaaacgcgcgccccttcttttttcgtccccccgcgagttctttcttggcgggaaagcgctcaaaaaacgcgccgccgcgttcggcgtttaaaggcgtctttttgaggaagcaagagagatcccggcgccttcccccttgaacggatcttcctccctcttcgggaaaaagataaagattccgcttcttttctgccccgcccgatttttcctcccgaacaaaaaaatcgcgttccctgtccgtccaaactttcttcgaaaaaataacgcccgccttccaaacgaaagttttttcggtaaaatcatccttgcgctgcttttcagcgccaagcggatttcttccgcgacaaataaactcgcctcttcgattttgcgcctttcgaagtttttgttcctttgccccgtccctccgctttcgcgcatcgccctttccacacgattttgcgcgtttttcgccctttttatcccctttgtccgcatttgccgaaaaaagccttcctttcctcccccgtttttccaaaaggtccctttgaaagcagacttttccgctctctgccctccgcccgcagcggtttctctgccgattctttgcgcttgcgaatagcgcctgctttgccggggacttcggacgcgtttctctccccctgttccccgccgcgcgctcttgcaggcgtccccgtttcggcgtttttccatgcttttatacctattcccctcgccgtttttttgtgctcccacccgctttttgcagcgaagattcggccaaactccgcgggaacggcttgacaaagcgcttcctttccgttataatggcgaaaacgaagtcgtatttttatatccaaacagtaaagacggagcggcgaaaaaaggaagggtaaaaaacttttcggctcttttgggcttttcgacccgcgcaaaaaggaggacatccaatgaatctgacggaaacatatcaaaaagaaaggctcgacgaacttaaaaacttatatgaaacggcgtttcccgcatcggagcaaaagccgtttgaactgatgctgaaaaagcgcgaagaaggcgatgcggagcttctttcgatcgaagacggcggcgcctttttgggtcttgccatcgtggtttcccggggagatttggcgctgttagactatttcgccgtttcccctcaacaccgcggcggcggagtgggcggcgaagcgtttgaaatgctcaaagaacgatacgcgaaaaaacggtttttcatcgaaatcgaggatacgcagcttgcggcaggcaacagcgagcagcgactgcgcagaaaagcgttttatctgcgccacggcatgaagccgctccctttcaaagtcgatcttttcggcgtcgatatggagcttctcaccgcttcccgcccgcttacgttcgaggaatatcacgcgctctatcgaggcgttttcggacccgggattgcgtcgagaatcaaacggcgcgaacaggcataaaaacaatttcggcaactgcctttttccgcttttcccgccccggaaattttctgacgaaactttatctccgcttcccctgcctcccctgatttgtgtttgtttctgcccctcccattgttttctttccttgccgacctcctcccattgttttctttccttaccgacctcctcccatgggtttctttccttaccgaccccctcccatgggtttctttccttgccgacctcctcccacgggtttctttccttgccgaccttcttccacgggtttctttccttgccgaccttcttccacgggtttctttccttgccgacct

SEQ ID NO: 1195 - DNA, 8084 bp, Unknown
  16S sequences of unknown bacteria
gtatataataataacataaatacaaaacacttgaggtaggatggtgaaagcaatgattcttcatctaggtggagaattttgctgtttttttgaggatgtgctgtttgtattgagggccgacggctgcgaaaaaaatgcgcagacgcagcgctttttgcaggccgcagaggacaacgggacgctgatcgtgatcgatcccacgctggttaagagctatgttgtcacgtctacacctcagggaaatgagcgcgtttatgcgtccccaatctctgccgctacgctgcaaaagcgggcggagaaagcagccgagaggtgaaatgaactttatgaacgagatggaaaaccaggaaaacaaaattttggaagaacaggaaagccaggcctatgaacctgtggaatttgaagagggcacgatggatgcgtccgtagagggggaataccgggcggacgagatccaggtgctggaagggctggaagcggtgcgcgtccgccccgggatgtatatcggctctaccgattctcgcgggatgcatcatctggtgcaggaaatcgtggacaacagcatagacgaggcgatggcgggctactgcgatgagatcatcgtacagctttatcatgacggcagctgcagcgtgacggacaacgggcgcggcatcccggtggatattcatcccaaggtggggaaaagcgcgctggaggtggcgctgaccatgctgcatgccggcggcaaatttggcggcggcggatacaaggtatccggcggtctgcacggggtaggcgtcagcgttgtaaatgcgctgtccgagtggctgacggcggatgtatacagggatggctaccactaccatcaggactatgtgcgcggcgagccggtatcgtatgtggaaaagatggagcctgtggagattaccggaaccgtgattcggtttttgccggacaaggagattttcgacaagggaacgcacctggaatacgacgtgctgaaggggcggctgcgcgagctggcgcacctgaacagcggcatcaaaatcgtgctgcgcgacgtaagcgacggcaaggaggacgtattccattttgaaggcggcatcccgagctttgtggagtatctgaaccgcagcaagaccgtgctgcatgagccgccggtatacatttccgccaaaaaagaggatgcgtcggtggaaattgggctgcagtacaccgatgggtttgtggaaaatacctatacctttgccaacaacattgccacccacgagggcggcgtgcacctgacgggttttaaaaacggtatgacgcgtgcggtcaacgattatgccagaaagtttggcttattaaagcaaaacgacgccaatctgtcgggcgaggatgtgcgcgaggggttgaccagcgtgatcagcgtaaagctgacagacccgcagtttgaagggcagaccaagaccaagctgggcaacgcggatatccgcggcctggtggagggtgctttgtttgacgggctaagcacgtttttcgaggaaaacccgcaggtggcaaagacggtgatccaaaaatgcctggtggcgcgccgggcgcgggaagaggcgcgcaaggcccgggaaatgacgctgcgcaagggggcattggaatccaactcattgcctgggaaattggcggactgctcggaaaaggatccaagcgtctgcgaaattttcatcgtagagggcgattccgcaggcggcagcgccaagcagggacgagataggaccttccaagcgatcctaccgctgcgcggcaagatcttgaacgtggaaaagacgcggctggatcggatgctggccaatgcggagatcaaggcgatgattacggcgtttggtgctggcatcggcgaggattttgacattgaaaagctgcggtatgaccgtatcatctgcatgacggatgcagacgtggacggcagccatatccgtattttgcttttgacctttttcttccgttatatgcggccgctggtggagcaggggcatgtgtacatcgcccagccgccgctgtataaggtaaagcgcgggaaaaaggaaatttattgctacgaggacgaggaattggagcgcgagctcaacgaaggcggacgccagggtgtagagatccagcggtataagggtttgggtgaaatgaatccggaacagctgtgggagacgacgatggacccggagacgcgcaccatcctcaaggtatcgctggaggacgcgatggctgccgaccagatcttctccgttttgatgggggaccaggtggagccccggcgcgaatttatcgaagagaattgcaaattggttgccaatttggacgtataagggcaacgcaggcagaggaggaaaaacgatggaaggactttttgcatccggcagcccgctgtggctgatcctgggcattgcgtgctttgtctttggcggctatggatactacaaatcccgcaaagggaaaaccaaagaacagtacaaggcggagcagcgcgcggtatccaaaaaatttgaagagcgcatctctcatatgaacgaaacgccgtatgaacgcatacagcgcagagataggatcaaagaccagaggcgcagcagcgacccaatgacggatgcggccgaggtattggcagagcgccaggcaaacgcaaagcgcaagaaaaaataaggcgcttggcatagccaggaaggaaaagagggaacaacgtggaagaacagcgaacctcaatcggcaaggtacgcccgattgacatagagcatgagatgaagaccagctttatctcgtatgcgatggcggtgatcgtgagccgtgcgttgccggatgtgcgtgacgggctaaagcccgtgcataggcgcatcctatacagcatgcacgagctggggctaaccaacgaaaagccctatcgaaagagcgccaccatcgtaggcgatgtgctgggtaaatatcatccgcacggcgattcggcggtatacgacagcctggtgcgtttagcacaggatttttcttcgcgctatccatttgtggacggccatggaaactttggcagcgtagacggcgacggcgccgcggccatgcggtataccgaaagcaagatgacaaagtttgccgaggaaatgctggcggacctggacaaggatacggtggactttatccccaactatgacgaaaggctgttgcagccttcggtgctccccagcagagtgcccaatctgttgatcaacggcagcggcggcattgccgtcggcatggcgaccaatattccgccgcataacttaacggaggtatgcgacgcgtgcgtggcgctgatcgacgatccggagatcgattttgagggcctgatgcaatacatcaaaggcccggactttcccacgggcgcgctggtaatgggcttgagcggcatccgccaggcatatgccacgggccgcggccgcatcatcgtacgcgcacgggcggaaatagaggaatttgggcacaaccggcaacgcatcatcgtttccgagatcccttaccaggtcaacaaggcgcgccttgtgaaaaacattgcggatctggtgcgcgataagcggctggagggtatctctgaccttagggatgaatctgaccgcagcgggatgcgtatcgtcatcgaaattaagcgcgacgccaatgccaatgttgtgctgaacaacctatacaagcatacgcagatgcaggacacctttggcgtaatcaacattgcgctggtggacgggcagccccgcgttttgagcttaaagcagatgctggtgcattacctagagcaccgcaaggatgttgtgacaaggcgcaccagattcgagctggagcgcgcccaggcacgcgcgcacatcctagagggcttgcttattgcactggacaacattgacgaggtcatcgccatcattcgctcttcggccaacgacggcgaggccaaggcgaggttgatggagcggtttgggctgtccgataagcagtctcaagcgattttggatatgcgcctgcgccggttgacggcgctggaggtgggcaagatccaggcggaattggacgaactgtccaaacgcattgcctattatctggatcttttggcccacgaggaaaagatactgggcgtgatccgggaagagctgattacggtgcgcgacaagtatggcgacggacggcgcacggaaattttgcccattgagggcgaagtggatatggaggacctgattgcagaggaggatatgtgtctgacgctgacgcattttggctatatcaagcgtttgccggcggatacctaccgagcccagcaccgcggcggcaggggcgtatctggcctgacaacgcgcgaggaagactttgtggaaacgctgttctttgcgtctacacatacgccgatcttgttctttaccaataagggccgtgtattcaggctgaaatgctatgaggtgccgatggcgggaaggacggcaaaggggatggcgattgtcaacctcttgcagctacaggcgggcgaaaaggtggccgctgcattcccgattcccaaggatgtggaggcaaagtaccttgtaattgcaacgcgtaagggcatgatcaagaagacgccggtgcaggaattccagcatatccggcaaaatggattgattgcgatggggcttagagagggcgatgagctggcctctgtattcatcacatcaggcgaggataccatcattgtgggcacacatggcggtatgagcgtgagcttccacgaaaacgacatccggccgatggggcgcacggcgcatggggtacgcgcgattcgcttgggctacgaggattttgtggtggatgcgcagcccgtttacaagccgtatgtgctgaccatcagcgaaaacgggtacgggaagcggacgccctttgaggagtacaatgtgcagaaccgcggcggcaagggcatcaagactatacaggtcacggaaaagacgggcaaggtagcgggcctaaaggtttcggatggtacggaggacattgtgctgatggacaacaacggcaccatcatccgctttgcctgcgagcaggtttctgtcattgggcgcagcacgcagggtgtgcggctgatgaagctgagccaaggcgctaaagtagcggcggtggaagtggtcgcgcatgaggagccggaagaggaagaagctatgcaagctgaaaaggctgtgcagacggagccgacgccggcagaatgagacataaacgcaaaaagagcggagcatccgctcttttttatttaagaaaagccgctttgtttaagattggaaggatatggtatactaaacaaacaaacgattctaaaaaggggaatggcatggaagtatatatccctccgaaaaagacataccacaaagcgggcagccagggagaactttccccgggcgggcgaaaaataaaaggcaagcagctggctgtagcggctgcggcgctggcggtgctggtggcattggtatttatcatcggttcctgctttggcaaaaagacggccaaggtgatgacaacgcaggcgatggcggacagcgctctgtttgcccagctggcaaacgcatacaaagaggaaaccgggcggacggccaaagcacaagcggccacggaggaagagctgcaggcagcggtcggcgaaggaaaggcaggctgtattttggcccccttcacgccggacatcaacgataccttggagacaggcgcctatcatggcgcggcggtgttttacgatacctatctgattgtgggccccaaagaggacccggcgcgggtaaagcatcttggcaagtacaaggcccaggatgtattaaaacacctcagcttgctggagcagccctttgtgcacccagccagcggcaccgagctgcaaaccaagatcaacgggcttttgcagcaagcaggcctcacggtgggcgattggtatgtagaagcggcggatgacgggcagcaaatgctgcaaacagcgcaggagaaaaaggggtatgcgtttgtgagcagggaaaactgggccctatatggtgccgagacgccggaactagaagtgctcaatcagcggctggtgggcatggtagatcagtattacctactggcaaagcccagcgaaaaggagggcgagcaaagcccggacgacgcttttttggaatggatgaaaggtgatacggcgcgcggcctaatccaagcctaccaggaggaagggcgacaaacgcctacctttgagatcaatgaaaaggatgaagtgattgaaaagcccaaagaagtatagggtaaagccgacatagagagaatgaggctgatcaaaaggggcggaaagctcctttttgcatacggccgaaaacattgcggggaggagaaaagatgaaaaggctgagcaaaatcggtatggtgattttatcgatctgcattttgatgctgggcggatgtgccgggcaggagccagagccaacgccgggacagacggagaaccaagcgacgccggttgaaaaagagccagtgctccaagagatggactggacctctcaatttgaggggctggaaggtgcggcggtattgtacataccggaggaagagcgctatttggtgtataatcttccgattgcgcagagaaggcgatccccctgctctacctttaaaatcattgcggctgcaacggcgctggaaaacaggagcctagtaccggaagactcgacgcgtaaatggagcggcgaaaagttttggaaccaagcgtggaatcgagatattgactttggccaagcatttcagacttcatgcgtttggtattttaggcagatgatcgatgagcttggggcgcagcagatacaggcagagctgaataagctgcagtacggaaaccaggatatttccgactgggaagggcgtttgaatacaaacaacgacaacagagcactgactgggttttggattgaatcatcgctgaaaatatctcccatagagcaggcagaggttatggaacgaatttttggagagcattcgctctattcacaggatacacaggatgcgttaaggcaggtaatgctggcacaaacgcaagagaaaacggatatgcgtatctatggaaaaacaggaatgggaaaaagcgacggtgttgtggtagacgcgtggtacacgggctttgcggaaatgcaagaggggcatgtgtatttctgcgtgtatttgggagagacagaggaaggcgatgtttcgtcccaaagggcaaaggagattgcttttgacattttatccgcttatcaagagggcgcggagtcataagataccgatgggcaatgaaaaaggccggggcaacaaagcccgcggcctttgaaatttatcttgcgtctacgacaggggggatattatcccttggagcccttggtgcgccggccggcaaagatgataagcagtacgatgatgagcagcagcacatagggcaatacggtggcaaaggaagcctcggaggatgtatcctgtttggttccctggatgacaaaggtacccatgctctgtgtctgcgcagtgagggttaccgtgtcgtcggaattgttttgggtctgggtttccagggcaatgagatcaccggaagcatccatttggcagatctggaacgcttgctttttatcgttggtagcaaaggtgaaatgcacggttaaggggctggtgaccatgccgggcggcagggtggattcggattgccggacgccgtcttgcacataagcctgtttaagctgaagatccactgccatcagcgattgagtaagatcatccttggcggtttgggctttttcaggaaggggtatatcgttggcaacggcgtacagctgtaccgtgccgttttcgccgggagaaagcatggaaggcatcacgctttccaacccatcgagggacagggtgcattggccgctctgggctgtattcacgcggtcgatggaaggcatggtgacgatacgtccgctggccatggctgtggtttccaagaggctgtaattatggctatccgccccctgaagctgaagattggtaacaaaggctgcgacattttcgccccggtctgggctgatgaacgccgccttggcattgagataatccaccgagacagattcaccttccagcac

SEQ ID NO: 1196 - DNA, 8831 bp, Unknown
  16S sequences of unknown bacteria
atatttgtcatcgcatatatttctccgtttttcgggttcataatgagaatcgaaacgctgtcagcctgctttttctccatgacctgccgtgccgcctgctctgcatactgctgaatattataatccagactgatgacaagatccttccccgcaaccgggtctctccggctctctcccactcctgtaagctcgatgccgcgtgcatctgtcagtgcaagaatctcacctgggatcccctccagaatcgattcgtattctacctccagccctatgatcccctgattgtcccctccggtaaagccaagtaccttcgaggccatacttccatacggataataccgccggtagtcctcgtctaccttcacacctgcaagcccatagctgcggatccgatctcccacctccttttccacattcttctgaatccattccatcgagctgaccttcccgacttttttctgcacagtctccttatccagccccagttcctttgtcagtacctcgacgacccgcttaggatccgtgatctggctgtggataacggagatcgtacagaccgtatggttgtctgccagcacctcaccatttctatccaatatccgcccgcgcgctgccttgatcggacgttcccgctcatgcagatcttctgcgagcttcgcatagtatccggaatctgccagcatcagctttccaagccgtacacctaaaagcgccagcatcagcagcgatgcggaaaaaaccaataccatttttcttcggtgaaacgatcgcgttttcagtcaccatcccccgctttcttccttttacaggatccttcttcgttcaggccaaagtacacatcatgcttcagacgcaccctgatacggttcagtatatgtagtaaaaggtgaggggatgcttatctgcgttcaacttccataacagcaaaaagagcaatatctgataaatatcgctctttcatcccgatttttatttttcagttatcatactttcttacaagtgttataagcaaatttacaacgccttatttttacagatatggcatcccaaggcacttcggaacctcccccatggaggcaagcagctccagccccatctgacgcgccgcaattacggacgaccgcacagcgcttgcatcaccggagaatccgagaatcacctcattcgtgtgactcgtcccaaggctcggcgtcatatagcaggcaatcttaactacagatgtcttcatcgctgcatccgccatcacgagcccgatcgctgccggtgccccggtcaaaaagccgaacgcctcaccgggtgctgcatggaaggctttctgtaaggcacctcccgcactggcagagtatgcgaactccagatgtcccgctgcacttgcatacacctcgcccgcatatttttccgtcagttccagagcgatctcaatcgcatgacgtacatctgcgacgtctcttccaccgatcacgatgtaattgccgtgtccggctccgcccttcgtatcacgcggaaactcgatcgagagcacctccacatttgtcgctttgaccgcatcatccatcgccgtcacctggccggctgcaccggtacgggagctgaatactcctatcgcgcgatattctgtaccaacattcattttttctaataatgtatcatcaataccggagatcacaagaccgatcgtatccaatatcgtcgtgccgacaaattctgtccgcgtacaggttgtgctaatgctattcaagtctatcataaaattgtctcctttcgcagttcacctgcgcggctcgtcatcattgcgctgtattaccatcctgcgacgcatcctctcccagcgctgtaccatcccacaccgctccattatcggcacccgccgcgctctgatccggcggtgtcgcgatgttcggattgtcgaccttcggatccggatcatcggatgtagtatcggtgatcgtaaacacatcatttccataagcgtcaatgacgtgattctgctcattgatcgtaacaccgtcaagcacatttccatcaccgtcaacgacctgtccatcctgtacgcgcgcatctgtatgatatgtgccgtaggaatcaattgcatcaaaggtcactacactgtccgtcgtcgtcacctcttcacgttcaagcccaagatatgccagcagctcatccgtgatctcctccgtctggtaaatacccatgtacggaagcatctccatcgcaatcttgcggaagatctcctgcgcgtacgtactgtgtgcctgatctgctacgtttggctcatccacaactacgtaaagcacgacctgcggatcattgatcggcactgctccgatgaaggataccagatactttccggccgcacgggttccggtcgtataatcgatcttctctgccgtaccggtctttccgccgacacggtagcccggcacctgtgcctttcttccggtaccttccgataccgtcgtctccagatactgccgaagcagagacgacacatgattcgagatcggctgctttaagagcataccatcggagctcttgatgatctttccgttctcatcaagcaccttctccacgacatgcggctgataataatagccgccgttcacaaccgcgcaaaacgatgcaatctgctggatcatcgtacaggtaaagccctgtccgaatgtacaggtcgccagctctacctcattcatgcctttctggtcatacacaataccggcaatctcctccggaagatcaatgccggtcttactgccgaaattaaagagtgactgatacttgatgaaatccgagattcccatctttgcaccgatcgccatcagtgcgtcattacaggaattcttcaggacatcctccagagtctccatcccatgtgcgcccggatagacatcacagcggataaatgtatctgtgacctgctcaccgccgtcacaataaaacgaatcatcctcactgaccgcaccgctttcaagcgctgacgcgatcgtgatcggcttaaatgtggagcccggctcaataccgtctgtgatacagtaattgtcccagagcatgtccttcatcgccttggacttctcctcgtcagtcatggacttaatctgtgattccgtataccaggcggagagatcctgtggattgttcagatcgtagctgtggttcgtcgccatcgccagcaccgatccgtcattcggatccatcgcaatgacaccgatatccttcgcaccgtgcttcgccgtgccgttatcctcatcggttccgtattcttcatcaaattcctgaatatacttttcgacaatctcctgaatattcacatccagcgtcgtctgcagggtgtagccattttccggggcaatcgttttcttctgatactcctgatcctcattcagatagccaaataccctcccggacgtaccgcttaaaaggctgtcatagtacagctccagccctgtaataccgtctccgactctgttggaaaagccgaccacattgctcgccaccgcattcagcggatatttacggatgaactgctcctcgaaccagacacccgtcacaagaccgcgcttgcgcagctcctctttggacagactctcctttgtatcctcatcgggggaaatgtaatcctcataggcatccttctcatcctgcggaatctcggtctttaatacctggtactgactgttcttcgttttttcattctcaatcagatcccggatcgccgctgaatccagatcaaactgctccgagagcacctcaatcgtcgcattgactgcgtcgtccttctttgtgacttccgtcgtgttattgatctccttacagtcaatgaccagccggtacaccttctcgctgtaggccagcagctgaccgttccggtcctgaatctcacctcttcggctgtaaagtgtacggctgtcataattctcctgcgacagcacctgcttttcatactctttgccatcttttaaattgatataaacgatgcgcactagcaaaaaaacaagcaatactaaaatgaatgcaaatatagccagaagctttatttgcattttttttgtgaatttcctcttcagttttcgtttcttacctgatgcttccaatgcttcaccttacctactcttccggtacgtctgcatactgtctcacataatcgctgtcatccaaactgtaggtctgcacctgattcttcgtcgcatagcccatgccgagctcattgactgccacatccttgacatgctccatatctacgcccgccataatgcggttgtaatcggaatcattctgcaggatcgcagcatccagtgatgtctcaagcgccgtgacctgcttctgcaggcgggtaccctgcgccttcagctgaaggtaattgacacacatccagaccgtcgcaactgccgctgccgtgagaaataccacataacggacattcatctgcgacgcacgttcccggttgctccttgtagacgcactgatggacggattcttctttttctgtatctgctgccgtggtgcagcttccagcctgcgtaccgctgtcccttccacgtacgcatgcatattctcttttgcttctctgccgccggatctcctccggccgctctttctggtatccgccattttacgttctcccaaatctactgtatttcacgctcgaatacacgaagcttcgagctctttgatcttgtattttcttctaattcttcctccgacggtacgatcggctttctcgtgatgactcgcccctttggcttcttgccgcagatacacaccggaaattctttgggacaggtgcatggattttcgctctcccggaacttgttcttcacaatccggtcttccagtgaatggaacgtaatcacacagatccgtcctttatcattgagcaggtcaatcatatcgcccagcgaatgatccagcacatacaattccctgtttacctctatccgtattgcctggaaggtccttttggccgggtgtcctcctgtcgctctcgccttcgcgggtatcgccgcttttataacatgaattaactccccagtcgtttccagttgtttttcttttctggcacttacaatgtgtttggcgatgttctttgcaaaacgctcttctccgtaatcacggataatgtgatacagctccatttcgctgtagtcgttcacaacctctttcgccgacagggtctgccgctgatccatgcgcatgtccagcggggcatcctctctgtaagtaaaccctcgttccgcctcatcaagctgataggacgagacccccagatccaaaatgactccatctacagatgtaataccaagtttgccgagctcttttttcatatcgcagtaattactgcgcacgatagtcacccggtctttgaactcttccaaacgcttcgtagccgctgcaatcgccgccgcatcctgatcaatcccgatcagtctgcccccgtctgagagccgccggcagatctcatacgaatgtccgccgccgcctaatgtaccgtctacataaattccatccggtcggatgtgcaaagcctcaatgctttcctccaaaagtacagatttgtgtctgaattccatacaagcctcccaaggttatatgcttaaacctaaatccgtcatttgttcggcgatatcatccatatcatcataagcattgttctctgcccatttctcctttgaccagatttcgattcgattaatatttcctgacaggacaacgtccttgtccagctgtgcaaactccctcaatggctgtggcagaagaattctcccctgcttgtccagttcgcacaaattcgctcctgccacaaaaaaccgaacgaattttctggcgtttttctgagtgagcggcagatcacgcagcttttcctcaaagagctcccactcgtttttgggaaacacaaagaggcatccatccaatccctttgtcacaataaattcatcgcccagctgttctctgaatttggacgggatgatcagtctgcctttggtgtcaatcgtatgattatactcacccataaacatcatgatacacctcttttgctgccatggtgtccccgtgctgcagcccggttccgggaaaaagccctccacttttcccccacctgataccacagctcaccactttctaccacctgtttcttataatagactaatttacatgaaaaaacaagccccaaatccgaaaaattgaaataaatatgaaattaccatttgccctcgtggtaaatttacagatcgatgagacgcgatctgtaaacagccaaaaaaggagacattccatgactgttgccatcaaaatgtccccgaaaataatcatttttctatttattacagtctgatatactgctcgatcagctgatctacaatcaggctttgcccataggctgtctcactgatctcatcaccgtcaagcagcagattcagcttctcgcgctcttcctcaatttgatccatcagtacttctttttgctgcatctcgtttgttcctttcaccatgtgtgccgttccttcaatttctttttgccctgtgccacagcaggcaggcacctgctgcaatcaccagtattcccgagagcagctgagaaaccggaatcacagttcccggaagcagcagctgatcggtacgcagcccctcaatccagaatcgcccgacgccgtacaaaaacagataggatagaaacacccgtccctcatacgcctttgcagcccggaaagtcagatacagcaaaattccaagagccacgagattccatatggattcataaagaaacgtaggatgcacctgaatatattccacaccgttgatcgtcgttacatgctgccacatttcctgtgtcacctcatacgtccgtacatccgacacagggagctgcatcgcaaggagattatcggtatagctgccaaacgcctcgcgattaaaaaagttcccccatcttccaagtgcctgtccccatacgagccccaaaactgccgtatcgagtgttttccagaaatgcatcttccttatgcggcagaacactgccaccgtcagtacccctccgatgacaccgccatagatcgccagcccgcctttgcgcagattcacgatctccgtcagatgttcccggtaataatcccaggaaaatacaacgtaataaattctcgcacaaagcacagaaaccacgatcgcaaccataccaaggtcgaaataatcgtctcccttctgcccggtcttatctgccaccttcatgacgagcagtaatcccgtcaccattgcggtagccagcactattccgtaacaggcaatctccagatttccgacggaaacagtctttatgacctgatgcagggtaatccccaaatgcgggaagcggatcgtaccattcatttactgcctccatttgtgtgcacagccgttgccatcagacattgaagcggaataagatgacatctccgtcctttaccacataatcctttccttccaatccgaccagtcccttttcctttgcagcggaataggaaccacagtcaagcagatcctggtagttgactacctccgcgcggataaatccacgctcaaaatcagaatgaatcttgccggctgcctgcggtgcctttgtgcctttgcgtatcgtccacgcacgggtctctgtctctcccgcagtcagatagctcaaaagccccagcaggctgtagctggcctttatcagtttctccagtccggactcttttaatccgagatcctcaagaaacatttgtttttcatcgtcgtcgagttctgaaatttcttcttcgatctgtgcgcagatcacgaatacctcgcttccggtctcttttgcatattctcttacttttcctacgtatgcatttgacgctccatcgtctgccagatcatcctcactcacatttgccgcaaaaatcaccggctttgccgtgagcagattgtactctgccatccatgcctgctcgtcctcatcatcggtgtggtaggtaatcgcaagcttaccatcctccagatgtgctttgagtgcctgcagaagatccagctcctttgcaagcttcttgtcgtttcttgccccgcgtgcagtctttgcaattctgcgctccaggatctccaagtcagagaaaatcaactccagattaatggtctcgatatcgcgtaccggatcaacagaaccatccacatggattacgttcggatcctcaaagcagcgcacgacatgcacaatcgcatcgacctctctgatattggccagaaactggttgcccagtccttcgcctttggaagctcccttcaccagtcctgcgatgtccacaaattcgatgaccgccggagtcacctttgccgaatgatacaggtcggcgagcagcttcagacgctcatccggtaccgcaaccactccgacattcggatcaatggtgcagaacggatagtttgctgactccgctccagcttttgttaaagaattaaataatgtacttttcccgacattcggcaaacctacgattccaagtttcatgttcgttcctctccatttctgtatcttctaactttttcttttgtactgtcctttgtatttcatactgtctttcaaccgtctttatcggcaagtcacagtttagcacagaaacacaattttcacaatagtttctgcaggaaactcatcgacacttttcctgttttcccgctcttttttgcagaaatctgcggattttcctgatttttcctttttatcctccataatccgcccgctttaatccgggcgaaaacgtccgattctgacttctccacgcgcttttataaaatgatgatgatgccagggtcaaaaggtcaaaaagccgttcatgcttgcatgataaggc

SEQ ID NO: 1197 - DNA, 32759 bp, Unknown
  16S sequences of unknown bacteria
atcttaggcgggtatgccctcttttgcggtaagtaaagtgttgtccaaatcggtgattaccaatatgtcatttaaactttttttcattagatattttaccaaaaaattatttaattttcactttgtcataaaatttttgaaattgactgcaccaaggtgcggaaaattccatatactctttttttataggatgaacgaaacctataacaccccgatgaagagcctgaccgtcaagctcagttataatatttttaggcccgtacacgggatctcctgccagcggatgacctatgctctgcatatgcacccttatttgatgagttctgccggtttttaggcgacattcaataagtgtaaaccctttaagcctttccaataccttgtagtgagtaaaggcgtttttagaattcacttcggtgacacaaaattttttcctatcggttttatgtctgcctatgggagcatctatatcgccctcgtcattttttaaattgccgtacactatggcgttgtaaacacgggttacggaatgttctttgaactgtgccgccaatccctcgtgagccttgtcattttttgcaaccacaagcaaaccggaagtatccttgtctattctgtgtacgattcccggacgaatttctccgttaattcccgaaagactgcccttacagtgatacataagggcatttacaagagttccgctctcattgccgttggccggatgaaccaccataccttttggtttgttcacaacaagtaaatcgtcatcctcataataaatatccagcggtatatcctgggctatgatacccatatctctggcgggaggaacatttatgactatctcgtcattttcttttaccttgtagcttttgctacaaattttgccattcacaaaaatattgccccgatccataagcagttgaacggaatttcttgtataatccgaattaccggcgataaatgcgtctaaccttttaccccgattttccctcgttacaataattgttatactgttcaagattttttatcctttttaattatctcggtgtaaaccgtgtaggcaaaataaagcgccatgcccacacatacatacacgtcggcaacattaaatatagcaaaattcataaacaaaaagttaaagtagtctacaacatagccctcaaaaactctgtctatcaaattgcctattccgccggcaaatataagtaacaggaaaaacttttcaaattttgtaccatacttttttataaatatcaagtaagccaaaaagcacagcgcaaaaaaggttatgcctataagcacaatagtttttccgcttaacatactgaatgctgccccggtattttccgcgtaggtcaaacctaaaattccgggaattacagtaattgttcccttgccgattaaatattcagccgcccaaattttgctcaacctgtcaataaatacaagcaccgctgttaaaataattccgtaaagcaaaaaattctcctaaatcattcttcaaaaagagaagaaatatttttaaattttgcggaaacttcttctgtttccggctcggccggctgttcaagttctgatgtaggccgttcagatgcctcttgtgattcccgccggtcaatttcatcatttacagcccggaactcttttgtgtcccgacttacttcatcactctttgcaggctgttcttcagatttatcatcaggcaatttgctcaaagactctatgtgttctttgtacaaactgagaactgtgtgcttaaagtcgcttacttcttttctcaactttctaacagcgtcctcgctgccttcaatttctgcatatgcagaagatatgatattgtttttctttatcgtggcctctctgagaattgtttcggccttgtccttggcatcggaaataatgctttcacccaaacgctgtgcattaatgagggtaactttaatgctttcttcgtcagccttatactgctctaccttttctgcaagaacatagagtttttcttctaagtcctttttgtctttttcaagactctcaaaatcgttggcaacactttcgataaagtcgtcaacatcctccggcttatatccgcgaacagatttttcaaaactaacccgacggatttcttctgatgtaaacataactgtttctctcctaatatttcaaatatgtaataaaaaacctatccttacggcttttattaccgtcacatatcaatttatattttccgtaatgtcttatacttaaaacatctccattttccgtttcaaaatccggttttttagtcataagatgatttacagacactaatccgctttttatcatgactgcggaatcactgcggcttatattcaaaaccgcaccgataacccgatccagacgataagatgcaactgtcacagttttttgcagcgaagccttgcgggtatagtttaactcacccgtataaattgaaaattttacgctgctgttacccacctgtgtcaattcgtcgataatgagctgtgacatatttctgtggcaggcaatataacacacgccatcttccacaattatatcaccgatataatcccttttgatttttaggttcattatagcacctaaaaagtccctgtgatttaagtttgaatccttctcaagttttgaaacaagtatatcaatgggaaaataccaactttccggctcgtaatcaccactgtaaacacaggcaatttttctctcgctgtcgccttgaaaaccggcgtacatttttaaatttattccggaaaatttattaaattgactttggaaaagttcttgttgtctcaaattcaaaaaagaggaaaaatatactgttcccctgttatagtgtctttcgcaccgggagtaaacctgtttacagaacacggtttcttcccgattttgcggcggaataaaacctctcatttagtaagtaatatcccctgtgccggacgagcctgtttcaatatcgtccataagacctatacctgaaatatccacattgtaaggtgtgataaggaatgtggaatttgctattttttgcacattaccttgatttgcgtaggcaacaccgctaagaaaatcaacaagtcttcttgcagtttccttatttgtggcctcaaggtttaaaacaacagttttttttgcattgaggctgtctgcaatgtcactggcctcttcatatctttccggtttaacaagaacaacctgcaaccgagcacccaatgaggaagttgaaatacttctttctctcttaggctgtgcagaagcaacattccgagaaaaatcggctttaaaagtattctcagccggtgtttcctccacctcttcgtcctcgtagtcgagctcatcctcgtcttcttcatctataccgaatgtatttttaagtttatcaagaacacccattttaattctccttttactttgtaatattgtaatttctctcgccaaaaatgcccctgcccacacgcactattgtgctgccttcggcaatggcatacgggaagtcgcctgacatacccattgataagattgacatatctacattatgatgttttttgctctgaatgtcaacaaataatttatgcatttgctcaaaatattttcttacgctctcatcttcggatcttggcggtacacacataaggcctttgagagtaatatttttaaattgcgaaagctcgtccacaaaacctggcacatcggcatacataatgccgcccttgctttcctcgttgcctatatttacctctatacaaatgttacagtgcttaccggctttaccatactgtttttctatttctgcggcaagttttaaactgtccacactttgtatcgtatcggtaagctccggcagatatttaaccttgtttgtttgcaaagagccgataatatggcacggcacattgtgagatatgaagaaatcccctttttgaacaagctcctgaacacggttttcaccaaaaagccttattccggcattatatgccctttcaatggcaggtacatcttgtgtttttgaaacccccatgagagttacttcttcagggttacggccgtattttacacaggcctcggcaatttcgtcctgtacccttttgacattttcctcgatattatagtcaaaattcagcttataagtattttccgtcatataaatttcttcctttcactattatagaatcatataacttaacttggttgtcgtcagaagttgtacttgggacaacaacataattactatcctcaaaaatcggatttatctttttaaactgggctatgtttgaaaaattcacgtagacacccatttcaccgttttcaaagtgaatagccgatttaggtattttaatgcccttatactgcttattaagtatttcgcactcggttatccttgcggtagccgaccgagaactcataatagtacattctattacaacgagatatttatcatcaaattcttttattttttttacggtggccttttggaactcgttatccccggcggaaattgatatatttacggttttaccctcatacaaattctctccgtcagccttgtcaatatacgtgcacaaactccacttgtaatctgttattattttaccatactcaccactgttttgtgaactgtaaattttattttttattatatcaattccccgccgagcatcaatattccaaaaattatccacagtcgccacactttcatatccgtcggtattgtttataaaataccctgtggcaggtgcacacaggttttccgaaggggaatttatccctgcgctgacagaatcaatctccgattgaataagcgacgccccaccggaaaaatcggtaattttgcctgttgcaacatttattttgttaatgctgaaagcaagcgccgccaagtcgtcggatatactgctgtaatcttcataagcggttttttgcgacattgcggtcaactgatttgtaagcgattttcttgtaaccgaaatatccaatgtgttaccggttgtatatgatataaccgaatttatatccgccataagggtttgtttgcttctcaatttgattaagttgtcaacatcgctttgagatggataaacattagcgatgagctcaccttttgaaactctccgcccgtccgccgcaagataatccacatatccatcggaagttttatttaataccgtttcctgtcggcaaactatcccgggagaaatcacactgtcgtttatgtaaccttcctgagctttgacggtgtcaacaccgttaaaattcatcaaatagaattgaacaaatccgtatatgacaagaaaaatcaatataatcgaccgcaaaccgtgtttttttcttttctttttcttttcttccataacttatttaatcaaaaatttccgcacaagctcttctccaagctttttgcagtcgtcttcatctatgtaaagccaattaactttactcatccttctaaaccatgtaagttgccttttagcgtaatttctggaagattgctttaatttttcacaacattcttccaaagtttctttgttttcaaaataagggaaaaattctttgtaacctatagccgccgcactggttttaaatatatctcgattatcgtagacatattttgcctcggcaacaacaccctgccggaccattaaatccactcgtctgttaatattatcgtacaactttgacctatccttgaagttgagacctatcaaaaggctgtcgtacggttgctgccgaggaaccgagttttttatctggtaggacatattatgtccggtgagcttatatatttctattgctcttaaaacccttacagtgttatttgggtgaacggttttagcatattccggatctatatccactaattgattatacatgtactcgatgccattttcccgtaattcctgtcgcaacttgtcttttacaatactgttatccggctgccgaccgaatctgacgccgtttataaggctttccacataaagtcctgttccaccggcaataataggaagcttatcccttgatgttatatcgtctatacaatctgctgcaagccgacaaaatttctgcacattataaggttcttccggttccataaaatctacaaggtgatgaactgccctcgcctgttcctctttcgtcgcctttgctgtgccgatatcaaggtttttatacacctgcatagaatccgcagaaattacttctccgttgaatttttcacataaatcaatggcaagcccggtttttccgctggcggtagggccgcatataacaactattttcttcttatcttccaaactgtttttcaagctccttttttgttatagttattataatcggtctgccgtgtgggcagtacaaagggattttcttacttcttatatcttttacaagtgccgtaatccgatttatttctgccttgtcgccgccttttatagcgctgcggcaagccactgaccgaaaaatccagtccattttttcactcatctctgatttatttccgtttgaaagattataggcaatttcacttacaagattttcaggattttcatctacgacatacataggtattgcccttacgataactgcatccccgccgaaatcctctatttcaaaacccgaactctctaaaagttccccattttcgagaacagcttgtttttccggccgtgaaagttttaccgtaactggaactaagagcatttgcttatcaattcttgtgtttttcttaaactgttcgtacaaaattctctcgtgtgcggcgtgcttatctataacgataatttcgtcacccgtccgacaaattatatatgtagaaaatacctctcctataacttttaaattatccgagtaaaattcccgggcgcttaccggcggtgttacttcggcagccggcactccatcttcctgtttataatttgcggtagaaatcttgaaactgtcatatttataaccgccattggtaaaattttccgccggacgagcgtctgctcttgttttatactctgcgccctcactgtggaaaatatcatcgcctgcttccgccggccgttcaatttgcggttttatgtaattttccatataccgatcggttttctttgtatcaaagcttccgcttaaattaaaagtatcataacttatttcctgttttgggaaagaagtgtaatcatcgtcttcggtttttttcggccgctctgtcataatctgctgtacgggggtatcgttcggtatatcaaatgccgtctgttttttaaatgaaaattgttttaatgtaacatcagaagttatagccgtttttattgctctgtatactgcgctgaaaatatcaccctcgtttgaaaaacgaacttccgttttagccggatgtacatttacatcgacttcatccagaggcaaccggatatttataacataccccggaaacttaccggacataactgttcctttataagcgttttccacagccgaaataatggttttatttttaacatatctggaatttacaaaagaaaactgcatattccttgactgtcttgacccatggggtaccgttgtataacctgtaattttaaacttttcggtttcgtagtctacctttgtaagggtattggcgtactctgttgagaaaacagaggctatagtattaagcaaattgccgtcgcctacagttgaaaaaacttcggtaccgtcttttataaaggtaaaagatatatccggttttgagagtgcaagatttgtaactatatcctgtacataccctgcctctgtggaatcctttttcaaaaacttcattctggccggggtgttataaaacaaatctcgtattataaatcttgacccggttacaaaaggttttatctcaaaagattcttcttcaccgccggaaattttaaattcaacggcaaaatcctgttcttctgttttagaaataagagttgtgtgggaaacaccggcaatagacggcaaggcttcacccctaaaacccaaacttgcgatatgatccaaatcctcgccggtttttatcttacttgtggcgtgccttacaaaggcggtttttatatattcgctgtctataccgctgccatcgtcctgcacaagtatttttttaataccccctcgttcgatatccacaagaatattttttgcccctgcgtctattgaattttccacaagttcttttacaaccgatgccggcctttcaaccacttctcctgcggctatcaattccgctgtttttttatcaagaatatttatcatcgccatttgtaacacctgcctttataacatagattttaatttattaagcaaatttaacgcctcaataggtgtaagcacatttacatctattttggcaagttcttcttcaacccggcttagctttgtgccttgactttctgccggccggtaatttgtgaacattgtgtcgtcaagagataattgtcttacagccattttttctctttccgcattttccacaagttcttttaaaatttcttttgctctttgtattacccaatcgggaacaccggccaacttagccacctgaataccgtaactgtcatcggcaccgccccttactattttacgcaaaaatgtaatgtcatctccgcgtttttttactgcaatattataatttataacgccgtggaaattgttttccatttcggtgagttcatggtaatgagtggcaaacaatgttttacagcccaaattattttgtgggttaattatatactcgacaactgctttggcaatactcataccgtcatatgtagatgtacctctgcctatttcatcaagtattaccaagcttttcgatgtagcattttgtaaaatctcactgacttcgctcatttccaccataaatgtacttctgccgctggacaaatcatcggaggcacctactcttgtaaacaccgtatcgcaaataggaacaatcgccgacttggccgggacaaaacaacctatttgagccataatgacaattattgccacttggcgcataaacgttgacttacctgccatattcggccctgtgataatatttaccatattttcgttgcagtccagcagagcatcatttggaataaatacttcctctctgctcatctgttccacaaccggatgtctgccgtcctttataataagccgatcttcctttgtaacggtaggctttacgtagttattttttgtgctgatccgtgaaaatgccgccaaaacatctatgtacgccatagctcttgtggttttcaaaatcttatcggtctcatcggcaatagatttcaacaaatcggcatacaatgccttctctcttgcaagaagattttcctttgctgtgagaatttcctgctccagatttttaagctcttcggttatgtagcgctcaccgccggcaagagtctgcttgcgtataaaggtatccggcactaaatctttatatgaatttgtgacttcgatgtaataaccaaaaacacgattgtaacccactttgagtttaggaatttttgtttcctctttaagtcggttctcaatatcctttaaaatgtctatattatcgtttaccaaatggcggtatcggtcaacatcccggtcaaaaccggcctttataaagccaccgtcttttattgtggcaggcgggttttcaactatcgccctgtctaaaagctcacccaactcaaagagagtatcaatatccccattaagtgatgatattagcctgtcgtcagatttagcaagcagattttttactgtcggaatttcttttacagaccgagaaagagaaaatacatctctcggtcccgcactgccgaacccggctcttttgcaaagtctttccatatcccgaataagtttaagccgattttgcacatccatgcggagaattagattgttgttaaaatattccaccgcattaaggcgcatgtcgatttgttccttatccatgagtggggcggaaataatctgccttaacattcttttaccgaaacttgtctttgtgccgtcaagaacccataacaagctgccttttttctcctttgaacgtatggtttcaaacagttcaaggtttgaaaccgtagtatatgacaacttcataaagctgtccggggaataaatatccaccttatcgagtttctctataccaactttttgcgtctgtgaaagatagtttatcaactgccacagacagcgggacatctcaattccgaaagttttgccggcaaattgtttttttacaacttcttccacgacaaaatcattgtagtcgaaatcgtttacaagctcggcagaacagtgtataacatctcgcaaataatcagaaagccacttttgattgagaatttccgaatttatgattatctctttcggcatatatttgtacagttccgacttcaaatcgttttcaaaatttccgctttgaatttccgttgactgcattgtgccggtagatatatcacaaaaacaaagccacgcacaaccgtttttaaagtaaaggctgcaaatgtagttgtttttatcctctttcagcatggaatcttccataacagtgcccggtgtaacaacccttataacatctcggtttacaagagttttgcccttgcccggaagctcggtttggtcgcatatagcaaccttaaaccccttttcaataagtctttgaatatatgtttcccgagcatgaaaaggtatgccgcacatcggcgccctttcctccatgccgcagtcttttcccgtaagagtgagctccaattcctttgacgcagtaatggcatcatcaaaaaacatttcataaaaatcgcctaccctgaaaagcaggatatgatccttgtgttgatttttgattgcgaaatactgttgcatcataggtgaaagattacttgccaatattacaccaccgttctgtaaataaaatttaaatcaattaccgctgcaaccggaacaaccggagcagtcgccggaacaaccgcctgccggcatttccacaaccatagggtcgccgccgttaaaagcagcgttaattatagccgtaatataggctttaagctgatctgcttctgttttgcagttgttatattcaatcatgctgtcattggccatgatttgattatacaagtccatgtattcgttatagagggcatcaattttgtcttcgtctttgtcctccttcacagcctcaatcctgtaattcatttggcagatattgagcttgccgataagatcctgcaattcctgatccatatcgttcattttctgtgcctgttcaagatatacgattgtatcgtcctttttaagttttgaggcaagaattttaaattctctgattatttccttttcgtccattgtgattacctttcctttaattattcgataatatcggcaataagggttgtgccccttttgcctgtgattttaagatttacaaattcatctgtatgatcatttttacagataaatttaacaacaaatgtattttgcaggcgggcggtgtacatatcgccgtttttctcttcaacaagcgccctttcggttttgcctacgtattcgttgagataatcaaaagttatatccctttgaatagctataagcctgttgagccagcgagctttttcttcatgggtgatgttatcttccattttggcagcccttgtgccgtttcttttagagtatatatagttaaaaatctgtgtaaagcgaacttcctttacaagcctttccgtatctaaatactcctcaaatgtttctcccggaaatcctacgataatatcggttgaaaatgtcactccctgtatctgctccttggcataatttattatatccatatattgttctatggtataatgcctgttcatttctttcaaaattctgtcattgccggcctgaacaggcaaatgaatttgtcttgaaatttgcggattatcacgaattacatcaataaccttttttgtaaaatctcttggatggcttgacataaagtgtataacataatccccttttacagtacacagcaaccgcaacaagtcggcaaagtcaaactcacggtccaactttttgccgtaagagtttacattttgccccaacagagttatgtctttatagccccgatctacaagttcggtaaactcacggagaatatcctccggctgcctgcttctttcccttccccttacataaggcactatacagtaagaacaaaaattatcgcaaccgtacattatagaaatagacgccttcgacttgctctgccttaaaatcggtacatcgtcatcgaattcccgtctttcttcaggagaaagaatttgctttttgttttcggtatagcaattataaattaactgtggcaaaatttcaatggcatttgtgccgaaaacgatgtcaacaaagggataactcttttttattttttcaactatgtgttcctgcattaccatacagccgcacacggcaactatcatattgggatttgcttttttaagtgctttcagcttgcctatattgccgaaaattttaagctctgcattttcccttatggcacaggtgttataaataacaatgtctgcattttcaaggctgtccgtcatggaataaccaacctcgtacaaaagtccccttattttttcggagtcattttcattttgtgcgcagccgaaagttacaacatcggccaaaggaactccctcaaatctctgtgatattaaatctcttacttgggttttataattcaaaactgccaccttattcaaaatatttctttaaaaattgtcctgtgtaagacgccggatttttgcttacctctctcggcgtgccggttgccacaactgtgccgccgccgtcaccgccctcggggcctatatcaattatatagtcgcacaccttgattaaatcaaggttgtgttcaattacaactattgtattacctgcatcggcaagcttttgcaacacatcaataagtttgtgaacatcagctgtatgcaagcccgttgtaggctcgtccaaaatgtacagcgtcttacctgtctgtaccttggaaagttccagcgccaacttaactctctgagcctcaccgccggaaagggtggttgcgctctgtcccagtttaatatatcccagccccacatcgtacagggttttaagttttctgtatattttcggctgtgcctcaaagaacgacattgccgactcaaccgtcatatcaagtacatcggcgatgttctttcctttgtacttaacttcaagggtttctctattgtaacgcttgcccttgcaaacatcgcaaggaacgaatatatcaggtaaaaagtgcatttcaatttgcactataccgtcaccttcgcaggcctcacatctgccgccctttacattaaatgaaaatcttcccgggccgtaacctctgacttttgcatcgtttgtcatggcaaataaggttctaatatcgttgaatacccctgtgtatgtggccggatttgaacggggagttcttcctatggcgttttggtcaatgcaaataactttatcgagattttcaagtcccaaaatatcatcatgcttacccggccttgcctttgcatgatttaaaaccatagcggtttttttatacaaaatttcatttacaaggctggacttgccactgccggaaacacctgttacacatataaatttaccaagagggaactcaacatcaatattctttaaattattctgctttgcaccgataatcttcaaaaaattaccgttgccctctcttgttttttcaggtatatctatatgttttttaccgcttaggtattggcctgttatgcttctttcacaatttataatatcttgcaagctgccttgtgcaacaacctcgccgccgtgtacgcctgcccccgggcctatatcaacaatataatccgccgcacgaattgtgtcctcgtcatgctcaacgacaataagcgtattgcctaagtcacgaagttttttaagagtatctatgagtttttcattatcacgctggtgcaaacctatgcttggctcgtccaaaacatacagcactccaacaagagaagaaccaatctgtgttgcaagacgaatacgctggctctcaccaccggaaagtgatgatgcacttcttgaaagagtaaggtattcaagtcccacactctttaaaaattcaagccttgatttaatttcttttattatgctttcggcaatgaaattttctctgtcggtgagctttaagttattcataaaatcgaccgcatctctgaccgacatatttgtaaattcacttatatttattccgcctacggtaacgcctaagataataggtttaagtcttgcgccatggcactccgggcactctatgctgtccataataccggcaatttcctcttttacccaacttgaatttgtctctctgaaccttctttcaaggttaggtataataccctcaaattcagtttgatatgtgcttgttcccctgtcggattctctctttaagtcgagtttctcgccgtttgtaccatacagcaaagcctttaatgcgtccttgccaagttctttaataggagtagaaagtgagaaatgatactttttggcaagaccgttgtagtacatttgtgaaacgccgccatctgcataataccatccgctggccttgattgccccctgatctattgaaagatttttgtttgggataaccaaatccgggtcaacacgcataaagatgccgagaccggtacatttttcgcaggcaccgaacggattgttaaacgaaaacattctcggggacaattcgtcaatgcttatattcgggtgatccgggcaggcaaaattttgcgaaaacatcatttcttcgccgtccaccacatctacaagcgctgtaccgccggtgagacccaaagcggtctccaaactgccctcaagccttgtcattatatccggctttatggcaagtctgtccacaactatctcaatagtgtgctttttatttttttcgagggttatttcctcttccaaatcatacatattgccgtcaacacgcactcttacaaagccttgtcttttggcggcatctaattcttttacatgagttcccttttgtgccttaaccacgggagccataatttgcacccttgtgccctccggcaggttcataattgcgtcaaccatttggtcaaccgtttgctgttttatctccttaccgcaaatcgggcagtgtggtatgcctattctggcgtacataagccttaaatagtcataaatttctgttacggtacccactgttgaacgagggtttctcgatgttgtcttttggtcgatggatatagccggcgacaagccctcgatagactctacattcggtttctccatctgtcccaaaaacattctcgcataggaagaaagactttccatatatcttctctgtccttctgcataaatcgtatcaaaggcaaggctggattttccgctgccggaaagccctgtcataaccacaagtttatctctgggtattgtcaaatcaatgtttttaagattgttttcctttgcgcctttgataataattttatcgtttgccatactgctccttactttgaatttctcaatttttctattctgtcacgaagatacgcggcgtgttcaaagtcgagtattttagccgcttgtttcatctctttggtcaagcgctcaataagctgctctttttcggctttggacatacgcttagcctgctttttggggctgtcctcttttgaggatatttctattatgccccttatatctttctttattgtttgaggaactatgccgtgttcccggttatatttaatctgtatttctcgcctgcgataggtttccgttatagctctttccatagaccgcgtaaccacatcggcatacattataacctgaccgtgggcgtttcttgccgccctgcctattgtttgtataagactggtttcgcttctcaaaaagccctctttatccgcatcaaggatagctataaggcttacctccggtaagtcaaggccttcacgcaaaaggttaatacccacaagtacatcaatggtgcccacacgcaaatctcggataagctccattctctcaaatgtgtcaacctcatggtgcatatattttacttttatttttttgccggacagataatccgtcaaatcctctgccatttttttggtaagggttgttataagcaccctttcgtttacctttattctctcgtaaatctcgcctaataagtcctctatttgaccctcaacaggctttacgataatttccgggtctataagaccggtagggcgaattataagttcggctatttgttctgcttttgccctctcatacttgcccggcgtggcgcttacaaatactgtttggttgattttttgctcaaactcttcaaatttcagaggtctgttatcaaaagcgcttggtaaacggaaaccgtattcaacaagatttttctttcttgcatagtcgccgccgtacatagcacttacctgcggtatcgtaacatggctttcgtcaataaaaaggacaaaatcatccggaaaatagtcaagcagcgttgttcccgtctcaccgggttttctgcctgagaaaacgcttgaatagttttctatacctttgcacatacccacttcgctaagcatttccatatcatattgggtgcgctgtgcaattctctgcgcctctatcaatttgccttgccgagtaaacatttttacctgcttgtccatttcggcctcaatatttttaagagcctctttcattctgtcaggcggtacaatgtagtgactggccgggaaaatcgccacatgattaagggttgaaagcacatttccggtgacaacctgtatttcacgaatacggtcaatttcatcgccgaaaaattccactcttatggcaacttcatttgagtaagcaggatatatttccacaatatcacctctcactctgaatttgttacggacaaaattcaaatcgtttctctcatactgcaatctgacaagagatttaagcaaatcgtcacgggacattatgttgccggggcgcagagaaataaccatttcacggtaatttatcgggtcacccaaagaataaatgcaggaaacgctggccactattataacatctcgtctttctgacaatgccgctgtggcgctgtggcgcaagcgatctatttcttcgtttattgcgctgtccttttcaatgtagacatctgtggacggaatatatgcctccggctgatagtagtcgtaataggatacaaaatattccactgcattatccgggaaaaactctttaaattccgtacaaagctgtgccgcaagggttttattatgtgccaaaacaagagtaggtcggtttaccttttctattattttggccattgtataagttttaccggtgcctgttgcacccaataaaatttgatttttaagacctttttcaaggccgtcacttattttttcaatcgcctggggctggtcgccgcttggcgtatattcactttttaaaacaaatttatccataaagtttagaacctaattcactgtaaccggaatctttcaaggacgccgcctcgttatccgatactataacatgatccaaaagttttatatccacaagagccaaggcttctcttacttttgccgttgctctcaaatcatcttttgacggcaaaatcaaacccgtcgggtggttatgggcaataatcacatttgtcgccctgttttcgatggcaatttcaactattttccttatgggaacatttgccgaatttaccgacccttcatatatttttacccacttaattatgttcattttgtcatccaaaagaacaatctgtacttcttctctgactttgccgtaaaatcttggaataaaaaattgtttggcatcatcggaagaattgattttttgtatgtccctgactttatctctgccatagacaacaaacaattccgggatcatttttataagcaccgcactgtgccggcttatgccgttgatactcataagatcctccataccggcttcaaatacaccgtgcagagagccaaatttatttaacaactcatgggcaatttcatttgtgtcgcttctggggattgaataaaacaagagaagttcaagcacattgtgatcttcaaaatttgtaagaccctcgttcagaaagcggttttttaacctgtttctgtgcccgtcatgcaaacccataaatactcccccgaccaaatgtctttatttttttattgcggaatggtataatataattccaccagtgtattataccataaactgttaaaaaattaaagtaggttatatgaaatatgagaagttatacagcaggcaaaaatgatgacggtgtaagacttttgcgtttttgtgaaaagcaatgccccaatatgccgaaagggcttttacacaaggctttcagaaacaagagagtaaagataaacggcaaaaagcaagatgagaattaccgaatcagccggggggatttaattgaattatacataaatgacgaattttttgcgccaatcgaaaaagacaactcggcacacaccgattacagcaatttgaagatagtacatgaagatgaaaatctgcttattgtaaataaacctgccgggctgttatgtcactccgataataaagacgaggcaaatttaatcgacatgataacagcctacctgaccagtacaggcaaatatgtaaaagaaaacgaaaacacatttgccccggctttgtgcaacaggatagaccaaggaacccggggacttgttattgctgccaagaattatcgcagtttggcagatatgaaccggatcataagaaatgacaaaatacaaaaggaatacttgtgcgttgttcaaggtaatatagatgacggcgaatacaaagcctttttaacaagagataaaacccggaaaaaggtaaccgtaacggccaaacccacagaagaatccaaagagataataacagagttccacacattgcaaagcaaaagtgattacagccttttgcagtgtattttaaaaaccggcagaacccaccaaataagggcgcatttggcctttttaggccgtccgataatcggtgacagaaaatacggaaagccgtttaaaggcctcaaaagccagcttctgtgcgcatataggctgacattcggcgatatagaaccggacaatagcctctcatatctgaaaggaagcacctttgtcgttgaagataacccggtgacaaattttttcaataaattggaaagcgtaaaaacaaaaatcccgaaaaataaattcgggattttttgtttgtgttttatattaaattacgcctttttggtttttctttcctcataagctacccacagcggacctgctatgcagattgtggagtaaacgccggaaatcatacctattgccatagggaatgcaaatgtgagaatactgtttaaaccataagccatggcaattacacatacaacgcccaaagccaaaaccgtagatacggttgtattgatacttctgataagagattgattgatgctcatattaacaagatccgtaaatttcattgtagggtgagcgtttttattttctcttattctgtcataaacaacaacagtatcgtttattgagtatccgagaattgtaagcattgcagccacaaagttgccgttgattgtaaatttgcatattacaaatacgccgaaaatcacaaccaaatcatgcataagggcaacaatagccattgcacccgctggcaaaccgccgatatttttaaatctgatcgcaatataaataaggataataacagctgcggcaacaagagcaaccatacattttgcaaagaattcactgcccattgctgcgtttacattatttacttccagctgttgaatattattgccggcatacttttcaccgaacatagttgaaagatgttcaagttcttcagaagaaacattgtcctgtcctggcattgaaaccgtaaatgtcgtgttgcccgtaacggagttttcacctgttgttacggttgcgtttttgcccaaaatgtcgtttatatctttttcgatgtctgtatcggaaatttcaccctcatagccgtatgtaagcaaagcgccaccggtaaactggatatcaagttttgtatcgattacaaagcttgcggccactattacaaccataagaacagccgagaatgtgaaatacttctttttattgcctataaaatcaatatgcggcaaaggtttcggattttccgaataaccatagaattttttgtttcttaaccgattgaattttgaaacagatctaagcataagtcttgcggcaacaataccaaaaacaaagttaaatacaacgccaacaagaagtgtgtagccgaacgaataaattgtgccggcagtcgcaacgccgaaagcaaagaaaataggtttcaaaatctttgcaaaaatactgtcggtagggccaaatgaacccataaggagaacggcgattataagaattgtaatattgccgtcaacaataggggttaagcctcttgaaaaacctgcggaaattgcagaatccaaatccataccgctgttaagttcctctttaattctctcggcagtgataatgttcgcatcaacacccataccgattgcaaggataatacccgctatacccggcaatgtaagtgtaaagctgtttgaatccgggaacaaaccggacacgcatgcgattgttgcacaaacctgacctaaaagagctattgaggctattacacctggcaagcgatacaaaacaattatgtatgccgcaacaagtataaatgctattataccggcttttaccatagcttcaagtgatgatgcacctaaagtcggactgattgtagaatagctgtcggcagaaagtgtaaacggcaaactgcctgcatttatattgtttgcaaggctctgtgcactttcagccgtaaagttgcctgtgatttgagcttgaccgtctttaatttcttcgtcaaccgtcgggtaggaaattaaagtgttatccatccaaatagagataatctgacctttaagtttctttgttgcctcggcaaatttttcactgccctcggcggtgagcttcaaattaacaccatacttgtaagcgccgcttgtgttgtccttgtacgcaaccgcagaggcgctttccacatcactgccggtaatgacaatttcaccgttcggcgtcttgtcttcatctacggaaataccatctctaaatgtaagataagcatttgcgccgatttcgttgatggcgtcctccgggttaaaattcgtctcgtcctctttccacgggaagcgaacgataattctgcccttgtttgtatctgtgtaaatttcatagtccgtgatattaagatttacaagtctgagtttcataatagcctcggcagcctgcaaatcctcctcggacgctgtttcgccgtcggcagggacaaatgtcgcctctacgccgccacgaatatcaataccgaaacgaatgtcgctccggctcttgaaccatattttttcactgtcgccactacctgtctttaagccaaaaaaagtcacataactaaaagcaagtataaatgccgcaacaataaaaaatacggattttccctttcttttcatggaatatcctccgttaaaatattttatactataaatacagcaacaaatattataaccaataacagacagttcgtcaagattacaattttaatacaataaactaaatcgtttctgtactttgcaaaaaaaataaaacctgtaaacaaaactgtttacaggttttggtggagacgatcggactcgaaccgactaccttttgaatgccattcaaacgctctaccaggtgagctacgcccccgaaagacaacataaatatgttatcaaaaaaagcttgttttgtcaatagtaaattttaattttttttaaatttcaaatacaaatcctgctccgatttttgtatagctttttacagattttgcaaaatccgcaacggcagggcctgtacaatggcaaacgccggaaaatttaatgttgctgtttataaaataatcaatggttgttttaactctgttttcattgtaaggaaccaggtgcgttccgccgaaaatccgataaatactatcattggggaaatgctttttaacagtgtttaatatattcattattccgttgtgggcgcagcctgtaagaacaacaagtccatttggtgtttttataaccgccgcctgctcgtctctaaattcgtcaacaacaaattcaccgtttatctccattcgcgatgccggaaaaaccgcttctattcccctttgcaccgggaaattggacacaagataaatattttccgaaacattatataaatcatcctcaattattctgaaattatatttttgattttggaaaaagtattccgactgcatagccggacccacttgctctaaattttgcgccgcagtaatgtctgtaatagggtcaaatcggtgatcccaatatttgcgtatgttaaaacctttgtgggcatagattttgcaatccggtttaattaaatcacagattgataaaaatccccctgtgtgatcaacatgattgtggctaaatgcgacaacatcaatatttgtaaggtcaattcctaacttctgtgcattttctcttattgctccaaaatagcctgtgtcaaacaaaaagttaatcccatctgcctgtacaagtatggacataccgtgttcggcctttaaatcgctacgcaaaacagaattttcggttaaaactgtaagtttcatgttgggttcctccatttttatttgattttattatataccatgttaattgttaatacaacaaaaagctctgccaaaatggcagagctttaatatagcgtttatctaattcaaattagagcaaaatgcctgtgaatacactgtaaaatacaagtgcaacaatagtcatcaacttaataagaatattgatagatgggcctgatgtatccttgaatgggtcacctactgtatcgccaacaacagctgccttgtgagcttcgctgcctttgccgccgtggttaccgccttcgatgtacttcttagcgttatcccaagcgccgccggcgtttgacataaagatagccataagaacacctgttaccaatgaacctgcaagcataccgcctacagcttctgtgccaaggagaataccaactaccagcgggcaaataactgccatagcaccaggaataatcatttcacggagtgaagctgttgtagcaatagcaacacatgacttgtagtcaggtttaaccttgccttctgtatcttcaagaagaccaggaatctctctgaactggcgtctaacttcttcaatcattgtgtaagcagcttttgaaactgattccattgtgaatgatgagaagaggaacggcaacataccgccgatcaaaagaccgataatagttgtgtgtgagagaatattgattgtttcaaggttaactgcatctgcataagacatgaacaaagccatagctgtgagagcagcagaaccgatagcaaaacctttacccatagcggctgttgtgttaccaactgcgtccagggagtctgtgatatcacgaacagattcgtcaaggaatgacatttctgcaataccgcctgcgttgtctgcgattgggccgtaagcgtcaacggcaactgtgatacctgttgtagaaagcatacctacggctgcaagagcgatgccgtaaagacccatgcactgataagcaacaaagataccgatacagataaggattacagggatagctgttgactgcatacctactgcaagacctgaaatgatagttgtagcaggacctgtctctgactggtctgcaatgtgcttaacatacttgtagtcaccggatgtataaatctccgttactataccaatgataagacctgcaacaagacctgcaacgatagccaaagccggcataaggttgccgaagaagtagttgctgagtacaaatgcgccgataacaacgattgcgtcggctgtgtattcacccatgttcaaagatttctgcgggtttgtaccctctttacctttaacaaagaatgtgccgatgatagctgcaacaatacccaaagctgaaagaatagccgggaagataatagctgcgttttcaacaggtgttgtgtttgtcttagaccaaacaaggccaagtgtgatagctgaaatcaaagaacctacataagattcaaacaagtcggcacccatacctgcaacgtcgccaacgttatcgccaacattatcagcaataacagccgggttacgagggtcatcttcaggaatgcctgcttcaaccttaccaacaaggtcagcaccaacgtcggcagcctttgtgtagataccgccgccaacacgggcaaacaaagcgattgaagatgcaccgaggctgaagccgaaaagaatatcggcattgcctgtcaaagcgtaaacaacgctaacaccgaaaaggccaagacctgcaacacacatgcccataacggcaccgcctgagaaagcaactgacaaagcgcctgcaatgccgctttctcttgctgcgttagctgttcttacgttagcccttgtagcaacggacataccgcaataacctgcgataacggaaagaatagcaccgaacaagaagcaagctgctgtagcaaagcctctaataaagaaaataagtacaaaaagaataactgcaaatacagccaaaattttgtattctgcaaacaagaatgcttttgcgccttctgcaatagcagatgaaatttctttcattctgtctgtgccaacgccaactttattaactctgccggcgagaacaaatgcataaagaagtgcaagcacgcctgcgcatactgcaacatacattaaattcaaaatgttttcctcctttaatttaaagtacataattattttcaatgcctatcaattatatataaaaacataaaaattatcaagtctttttcgccacaattttgacataaaaaggtaattttttatttttaacggcatttatctgtcaagaaaagccaaaaaagccgtgtaagccgaataaacatctgtcttcgcaacaagctcaaaaggtgcgtgcattgacaaaacaggtacgcctatatcaactgtatcaacatttttccgtgatatgtacttagcaacggtaccgccgccgcccatatcgactttgcccagttcgcctgtctgccaatttacatttttgctgtcaaaaaggtttgtaacttcggccataaattcggctgaagcatcgtttgtgccgccttttccgccggagcctgtgtatttggtaattacaacgcccctgttcatgtagctggagtttttaggatccataacatcggcaaatgtagggtcatatcctgcgtttacatcggcagaaagacactttgaccgaccgagagttgttatgtaatcaacaccctgcatttttgaaagatacataataaagtgttctaagaattcgctgttcatacccgaaacgccgtcagaaccgatttcctccttatcggcgaaaacagtaacagttgtgtggttaggacattttgtctccacctccgccataagtgaagtataggcgcaaactctgtcatcgtggccgtaagagcctatcattcctctgtcaaagccaacatctctcgctcttcctgccggaacgacttcaagttccgcatttatgaactctctttcggttatgccgtacttttcgttcaaaagcaccaatgtctgtaactttacagcctcttttacatcctcgtcatcataaggcaaacatccgatgataatgttcatctcttcgcctttgataacatctctcattttgcgctcactctggtcttttgcaaggtgcggcaaaaggtctgtaagacagaacaccgggtcgtcatcttcttcaccgatgtgaatatcaaccttttctccgtttgtctttacaacaacaccgtgaatggcaagaggaatagctgaccactggtactttttaataccgccgtagtagtgtgttttaaagtatgaaatttcggtattttcatacaatgggttcggctttaaatcaagccttgggctgtctatatggcttgcaacgattgtgaaaccgtcacttgccgacaatttgcctattgtggaaagaattgcggattttccacgattgttgaaataaatcttgtccccgggctggtacatttctgtggggtcaaattcaacatatccgtttgccttggcaatttcaatgatatttgccacggcaagtctttcggttttactccggcttaaaaaatccatataaccgtcgcaaaactcgaagcttttctctaccgccgatttgtcttttttggcgatatgctccactttgtaagtaagctgtttttccaattctttacctttggataaagtttccatagctaaactccttctctgttttcgtatattttataataaaaattataagccttgtttattttaacaacatagttgttcatctgtacaaagggaaattccgtaagaaatcttccctctttgtcttcaagcagtttgtcaaccgttccccagccgctgtgatatgccgcagctgcggtgtccatactgttatcgtacctttgcatacattttgaaatgtaatatgccccaaacctgattgacgtttcggggtcatataaatcttggaattgcaaatcctcataagggcacatcatcaattttatccaataaaatgtttcttccgttatttgtgtaagaccgattgcccctgcttcggattttgcctggggattaaatccgctttcagtcttgataagcgcatatatcagatacttatcaacagaaaattcctcggcatatttttccacatattccgaatattttatcggatatttcagtttttgaacaaacttgctgttcagcacagccaatcccaagccggtaagcacaaatataccggttagaattataataactctctttttatcgagtttgattttcttctcctccccgtttcaaaagttgctttaatacatattccccttgcaggataagctccgttaccgaaccgttgttgttaatcacataatccgcctttttaagcatctgcgagtacggggtctgtccgttcaatcgctcctttgcctgttccgtcgttataccgtcacgggcagaaattctctcttgctgtaatttttcggaggacacaaccacgatatatttatcacaatatttttcaaaagcatgacctatgataaccgcaccgtcaacaaaaacatacttatctccttttttaaatgcagtatccgcttgggagagaatctctttaatgatataaggatgtgttatatccgtcaatctttgcaacttttccgcagtggcgaaagcacgccggacaagaagttttttatccagcatgcccccggaaactatatcggtgccgaattccgcctgcaattccacaaggcaatccacatttttgtgtaccccggccgcaacttcatcgcagtctataaccgtaaagccttttgaggcataatatgcggacagcgtgcttttaccgcagccgctttgccctgttatggcaacaataagtcctttttccattacaaattcaccaccctaaatgccgccgcacgcaaaagtctgttgtaaaccgccaagcctacgccctccgtagacggcatcatggcgtacactttgtccgcaccgattttatccaattctcgcagtgcggaaaacagatttaccgcttgtgaggcgctgtctttctcgctgccgtagcaaacgacaggagcgtttattttatctttgtactcctcaaagcacattgccgttgccttttctttttctacaagctctttatacttttcaaaaggtgcgtttactatgacaacttccgcttttggggcgtaatgcttatgtttaagccccggagacagcaccttttcatccttgcctaattcttcggttatgccgtgggacaaaataacctctttgcccaaaacctgcgagagctgcttttgtgttatatatcctgggcgaaacagtataggctgttccccggcaagagaaataaccgtagattcaacccctatattacaactgccgccgtccaagaccattggtattcttcctaccatatcatcgtaaaccgtctgtccgtcagtagggcttggtctgccgctgcgatttgcagatgggcctgcaaggggcaatcttgtctttgatatgacttccaggataaccgggttagatggcattcttatgcccaccgtgtcaaggcctgcacttaccgagttcggaataagatcgctttttttcaaaatcattgtaagggggcccggccaaaatgcctcggcaagtttgattgcgtcctccggcacttccgccgccacttcccttaacatatcataatcgcaaatatgcactattaaagggttatcctgaggtctgtcctttgccttgaagatttttgcgcatgcctcggactttgtcgcatcggcgaaaaggccgtaaaccgtttcggtaggtattgccgcaacatctccgttttttataatatcacaggttttttctatactctcctgtgtaacttttaaaaactcagtttccatctttattcctctgaacttgatttcaatttttccgcttgatccgccgtaataagggcatctataatttcgtccaaatcaccgttcataacccgttcaagacggtatatggtaagacctattctgtggtctgtcaccctgctttgagggtaattgtatgttcttattctctcgcttctgtcaccggtacctacctgactctttcttgtccgggcaacttctgcgtcctgtgcggctttcttttggtcataaagccttgaacgcaaaactctcaaagctttttccttattctgcaactgacttctttgatcctgacattccacaaccatacctgtgggaatatgagttacacgaattgcagaagaagtcttatttatgtgctgaccgccggcgccggaagaacgaaatgtatcaattcttaaatcatttggatttatatcaacttcaacatcgtcaacttcaagcataatagcaacggttactgtggaagtgtgtattctgccctgagtttccgtatcaggaacacgctgaacacggtgtacgccgctttcaaatttaaggcggctgtaaacgccgtcgccctctaccgaaaagctgacttctttaaagcccccaagctctgtttcattcagtgacagtatctcggttttccaacctttgctctccgcatacatggtgtacatacggtaaaggttataagcaaacagagccgcttcttctcctccggcgcctgcccttatttcaacgatacaacttctgtcgtcatcatcatctttcggcaacagcaatatacgcaattcatcggaatatttttctgtaagctccttgttttcttcatattgagcctgaaccatctctttaaattccgggtcaaggccgccttcatcaagaatactctttgcctcgtcaaaattttctttcgcctttgaataccggtcaaatttttcaacgattggcgtaagctttttgtattcacgcataagagccttgtatttggcattatcacttataaccgatgggtcggtaagctgccggtttacttcttcatatctgttcctaacagcagtaagtttttcaaacattttctttctccgcctgggtaattacttttttaatatttttttctattttggcacggggtaccataacttccctgccgcactttgtacagcgtattttaaaatccatacccacacgcaaaacaagaaattcattgtttttgcaggggtgttcttttttggtaactataatatcatttacatttatattcaaaatatcaccgccatttttaatttatctgttatattttaccataaaaccgataattacaaaagtgaaaaataaaaatatttttaaatataataaaatttttgcctgcagcatatatttttacaaataaatacaggatggtttacttaaaatgaaatatattccagaaaatgtttgcgatatcaccgcaaacataaatgcggaatttttaaaaaatgctatggaaaataaagtgcttatctgcgcaaaagttttactttatcggccggaggaggggcttattttaaatttagggggttttagagccattattccaaaagacatggcggagtatagccaaaccggtcacccgattaaagaggctgctttaatcacaaaggtcaataaaaaagtgtgtttttacataaccgacataaaagaagaaaacggacagatcacagtttactgttcccgcagggatgtgcaaaaacaggtgtttgacgaatatatatcaaatttaaaacccggcgatgttatcccctgtaccgttacccatatagacagtttcggtgttttttgtgatgtggcggcaggcataaccgccctcttacccattgattttatatcgacttccagaatagccgccccgtccgaaagatttaccgtaggacaaaacatttttgcctgcgtaaagagcatagacgaaaacgaaagaattgttttaacccacaaagaacttttaggcacatggcaggaaaatgccgatttatacacccctttttccactgccacgggaatagtgcgcagcatagaaaattacggaatttttatagagcttaccccaaatctggcaggtcttgcagaagtgtgcgagggagtgtccccgggcgaccgtgtaaatgtttatataaagagtattatccccgataaaatgaaaataaaacttgttattctcagtaaaatcccggacagcgattttaaaagcgagataaattatcgcattaactccggccatatccgcaaatggaaatattcgccggacaacgccaaaaaacaaattgaaaccgtattttaaaaaacagccgtcggctttaaaccgacggctgtctttgcaatattttataattgtaaactttgttttattatactctgaactcggcaaacaacaggtaaataagcgttgccacaaggcctataccgaacagcaacaagctgtaggacaatgactttgtgattgatgtttcggtgcctgcgccatcttccgcctttgcgggtttgccaatatagaatgtggcaggaaccttaacggacttgcagaacaatctgttaataataaagatcagtatgtcaagggaaacatcgaatactcttgaaacaagaccacctataaaaggcaaaattgtaaataatacaggtctgaaaatcttgttctcgattgtccattccttgttgtgtgggtttacatagccctttttcgcagagcataaaagcgttcttacaaaagcaatgtacaaaatagcacctattgaaattgaaatcaatgcgcctttcaagtttgcaaagctgaagtagttaatagcctcactaagaggttcaacacccataaattccgcacagcttgcggcaatcttgtccattgtaaagttaggtgtaagacccaaaacaagtattgctgcgcttacaattcccaaaacaatttttgtcttggttttaacataaggcttgttttcatgcataggcttgttaggttcctttacaaacaggcatacaaacaacttcgtcatgtatgcaacagtgaagccgccgcttacaaggaagataacttcaacaagtctgaatggcagagctgtttcgcttacaaggtgtattctttccacaatgccctcatgcaaaagggttttacttacataaccgttaaatcccggaatacccataataccgcaagcggcaatgccaaagcaaactttaaggaacggtttgtccttgccaaagccctgaacatcgttaagattaagactgtgagtgttccgatatacaatacctgcacttgtaaagagaacaagttttataagtgtgtggttaatcatatgcagtacagcgccgtatgaagcgatagcaccctcttctcccaaaacagatgtcatggcaacaccgatgataataaaaccgatttgagacattgaagaatatgccaaagtttctttaaggttgattgacaggagtgcaaacaaagcgccaacaaacattgtcaatacaccgagaacaagaacgataatcgcccatgtgaagctctcgcttaaaatctttaaggtaacaacgataacaccgtaaacaccggctttaatcaaaataccggaaagagcagcggaagccggagcaggtgccgccgggtgtgccttaggcaaccaaccatgtaacgggaacatacctgccttagcggcaaaaccgaagaaaatcataaatcctgcggcgtacaaaagcggatttcccgcataaggggcacaagcatctttaagttcggaaacaaccaatgtgcctgtgaggctgttaaggataaatatacccataagaacaaccaaaccgcccaaaacggctattgtaagatagctgttgcctgcccgaatagaatcatcgtcttggttatgtgcaaccaaagcatagcttgcaaaagacataacctcaaagaagatgaaaaccgtgaataaatcgtgacccaagaaaatacccaaagttgcaccgaatgtaacggcgtaaaaaccgtagtatctgagcaagtttgttttgtcgtggtcaaaatattcatctgagaaaacacttgaacccacccaaattattgatgtggcaacggcctgcaaaataccaagaccgtttaa

SEQ ID NO: 1198 - DNA, 7934 bp, Unknown
  16S sequences of unknown bacteria
cgaagacgatacgctgtgcgtcctgcggctacaccccggagaatcagtcaaaaccgccgaagttctgcccggagtgcggcaaaccgctgtcctgagaacatgaagagtaagttaccattaagagcggtgataataatgtctgttttccttgtagtgtccggactctttggctgtgaaagcagtaaaaaacacacggtcgatgatatcatttcgttacatacctcctactatggcatggaaagcaatccggtttattccttcgcgctgcgaaaacaggatgaaaactggctcttctccgcaagctgtaatctgaagagccgggagaactattacacatccttcagttgcttcccgataccgactgaggaagcggaggaaatccttgatatcatccgtgaggaaggcgagatcgagcggctgcggaaataccgcaatccgatacatatcttccacatagccgacgcaccgacgcgcagctccggaatgaccttcatcgacggaagcagtctggaaaaagagacctctttcagtgataagctgcaaaaatatctctatactcttgctgacatgcattatgaagcggcagaaagcgttgaattcgagtctgtctgtatctaccgccactgtatggattattcatcctcctattcgtatactcttgagaaaaacgaaaatgactggtatttctcatttgacgcggtaattgacagcagcggagtacatacggaagttgaaaagcaacgcatagatgaacacaacgcagaggaaatactcaaaatcataaaagaacagcagctggttgcaaaggtcagacagtatgagccgccgccggatgacggcatctcggttcttgacgaaacaacatacgggatttcgtttgacttcccggacggcagctcagtacacgccccgataaacgcgggcagtgaactgtcagacgcgttctattcccttgcgggcagaataaacaaaaaataaaccgactctgtcggtaagtataaaggagaattatcatggctaacaaatgtgcgatctgcggagcggaaatcaatctgttccagacccagaaacttgcggacgggaactgcatctgccgcaagacctgccgtaagaagggcttcaaaacatacgattatgtgcatgcaaatctttacggagtccaagctcacctcgctcaagtggagcgcggcacaaagctgtgggagcattattttgttcctcgaaagaagactaaagacaaaacaaagaaacttaaaagattcggttctccgttgtacgtcgctgaggatatcggactgatggcgtacatccagaacgattacaagttcatgatgttcggaaagaccactcgcgcctgcgtctaccgcattgccgatctccgcgcgtacaactatgaggaacgcatagagaacagcggcggtgacagcaaaccgcaaaagaaatccttcgtccgcatggcattcatcaacaccgaaggattgagcgaaatctccgtcgagatgagcaacataaaggcgttcgagaagctccagaagtatttcgacacgctcttcggagttcagaagacactcggcaacgcatcaaacgtttggaaggcacaggcagcggcgattaagagtgcggcggcaggtgtcagcgcggcaattcgcggagacgtcgatgcatcggaaaaggttggagaagcaattacatctttggacgccgctatctatggcgaccgtaccgaactcatacgccgtgccgatgaagctttggcggcatttcccggataaagtttcgatctcacattaaaaatgcccgcgatgggcaaggaggaacttgatggatacattacaggagtataaatgcccctgttgcggtggtgcgattgcatttgacagcacactccagaaaatgaagtgtcctttctgcgacaccgaattcgaactggaggcactcaagagctacgacgccgaactcaagggcgagcaggcggacaatatgacctgggatacctctgccggaaccgaatggaatgatggcgagacggatggactgcgatcgtatgtttgcaaatcctgcggcggcgaagtcgtcggggatgcaaatatggcggcgacttcctgtcccttctgcggtaatcccgtagtaatgatggggcaatttgcgggttatctcagaccggatctcgtgatccctttccagttggacaaaaatgcggcaaaggcgggacttctgaagcatctgaaaggaaaactgctgcttccaaagatattcaaggatcagaaccacatcgacgagatcaagggtgtgtatgtaccgttctggcttttcgatacagatgtagacgcacaggtgcgataccgtgcaaccaaggtgcgcacatggagctccggcgattataactacacagaaaccagctactacatgatccatcgtggcggaaatctaagctttgaacacgttcccgttgacggctcgtcaaaaatgccggacgatctaatggagtccgtcgagccctaccgttacgagggtgcagtggacttccagactgcgtaccttgccgggtatctcgctgacaaatacgacgttaatgctgagcaaagcatcgatcgcgcaaacgaccgcgtaaagcgttccactgagcttgcgtttgcggctaccgtcgcgggctactcgacggtccaggctgaaagcacacacgttcaatacagcggcggcaaggcaaaatacgcgctctatccggtgtggatcctgaataccacgtggaacggcagtaaatacaccttcgcaatgaacggacagaccggcaaattcgtaggtgaccttccggtcgacaaatcagcggcggcaaaatggacactgcttttgactgctatatacggcgtcgcaacatacgcggcggtctggctgctgcaccttgcagggttattctgaggaggcagagatgaaaaagaacttactaattactattctgaccatatttctctgcctgttcatggtcgtaccggtactcgcggaaggcgaagatgcggagaatggattcgcggacgaatactacagactcctggatatggcgtccctgttatcggacgaggaggtcgactcgctgacctcgagactcgatgaactcagcctgcgccagaaaatggatgtggtcatagcgacgacagatacgctcgacggaaaaagcgtagtcgaatacgcggacgatctctacgactattgcagcttcggttacggcgcgaatcgcgatggactgatacttgtcatcagtatggaggacaacgactggtatatctcgacctgtggctacggaatcaccgtattcactgacgccggaatcgaatatatcgggaagcagatagtaccgtatctgtctgacagtgattttgccggggctttcgcgacgtacatcactctgtgcgacgaattcatcacacaggcaaagaccgataagccttatgacataggtagtctcccgcgcgagcctctgtcgcccgcctggatacttgtcagccttattgtcggtctgatactgtcctgcaccacagttggtaagatgaaagcgaagctcgttaccgtccgcactcaggcagcagctgacagctacatcaaacccggaactttgaatattaacgacagcagggaaatgtttttgtaccgcagtgtcacaagaacgcagaagccgaaaaacaatagctccagcggcggaagcagtacgcacacctcgtcttccgacacaacgcatggcggcggaggaggcaaattctgacataaggaggctgacattatgaaaaaaacagtagcacttatcatcatgatagctgtcatcatctcatgctttaccgggtgcgagaacaaaacggtagcatttgacgactttgaaaacctggcgatatcggcggctctgtcctaccgtacgctcgtgtggaacgggagcatggataccgacacgccagaattcgcgtggaacacggcgggatggtacgcggcatacaaggcgaatcttgaattcgcagacgaagtcgtgctgtccgaggatcagctgaaggaaatccagaatgtgatcctgaccggcgaagctgtcatgactccgccggatgacatagacgcggaggcagaaaccagggacggtaagacctactggaaatttccgaaaattaacgatgatctccattcgtacctcggagtcatctctgaggtaaattgcgagaaagcccaaaataattcatacgtcgtcacaatacgcgaccatctgcgcttcaacgtggtcgaggaaacggtattcaacatcggcttcaaagaggaaaacgacggctacatcctctcggagttcagccgcaatgaattcatcgacctggatttcacaactgatttgctgtatgatgcaaaccatctctcgaacctgttctcgatatatgacaatctcactattacagaggattactcgagcggatacggatcactcgtctattcaaggaaaaccgacaacgggtacactctctggatggatgacgggtcatcggggttctatgatgagttccggttctataccagcgataacgcgaccggcaaagtcagcgttatgcctgccgacacttcgtccgactggctcgatgattacatagccacaatgcggcttccggatgagggagctgacctgatacggctcacctgcaccgaggaagaagagattttctacgtcgatcacggtgcttcgagcacggtctacactatcgaccgcggaacactcgcgctgaagaaaatcgagttattcgacgagaaagacgagtcttacttcactgcaaagttcagctacggcgacaagcttcccgagccggatacgatcgccgcttggaaaggaccgctgcggaccgtgtctctcaagctgttatactctaacggcgagacacttggactcagcttcacgattccggcagactgggaattcgacgtatatgaatactgcccgtggggaacggcataccttgatgaagactgcaccgaaccgtatgaataccccggagatgagattgattacacgatctttgtctccgaaggggaataataaagtcataaatataattatatttgaaaaggagtttaacaatgggaatcttcgacaaacttaaaagtacggcaaagcaggcggtcaacacagccgcaacctcggcagtgtccgctataggctcaaagcgagaaaccttcactttcacctctcttcccgagagcctggcagagctgcaggcacttccggaggcaagcatggatacgccgttcaagactgccgccctgactgtcctcgcgctctgcgcttatgcagcggataagagtatcggcaccgagatgctgaatttcctgcgcggtccgcgtcctctgaacggacaggagatctccttcctgaacgaccgcttccgcgacggaaagacctatctgccttttacttacttcaccggctcgacgcctgacaacaactatacgccgacccagccctacacgctcgtcatcgagtcgaaccacgtctcaaacgatgagcccggctacatgaagctcttcatcccctgcggcggagcagattccccacgcccgatcaagctgcgccagcgcggttctgacaacaaatggtttttgtgggagcagtatctgctgacaggtgtccgcacaccgaaatctgaggatccttgggcataatccgcttccggaacctacgataaaacaacgaaaagagaggagatatcgcaatgaacattatcggaaaatggaaagtcaaggagctgctcttccccactcccaacggtatggtgacctacacaccggaaaatctgccggatggtgctcacgctgacgagatcatcatgatgctcatgagcagaaccgaatttactgaggacggcttcatgaacacactgatgcgcgtacccgaggacaaaatcgagcttgcgaagtcgcagggcgctgtgatcgacgaggacggtttcgccgcaatcgagcagaccacatggaaggagaaggacggtaagttctactacgataccaaagtcaatggcgaggttcttggagagacggttgacccattcaccgaaataccggtggatgagaacggctgtctgactatcgcgtatggcacgatgattctcgaacgcatatgagaacgatgcgactcggatggattattatcggaggtgtgctccttatgtctgtactgataactctcggggcttgcggaaaactcaggaaaagccgcacgcagtctgtgcatccgtatgacggtggcgacatgatcaatgtaccgatagatcagagcgtactgtatggcatttggaagaacgatgacatcaatgccgtgatcgaggtttcgggcgataaaccgcatatgatcgtcactgaaaacggaaagcttatctttgagggatacgtacgtctacagaaattcggagatctcgtcttcactgacgggaaaggcggcgatggaaatgaatccaacgggccatacccgacttttacgttcaacaccgacaagaatgtctacaaatatcgtcatctttttgacggcacggtagtcacattcataaagcaagcggaataaaaatcagcaacaccggctttaaccagtggttggaacgggttgtaaaaatcccaaaagcacccagagacggaagacaggaaggcttcggtctctgttttttgtatcaagagcaaaaaacgtattttgaaacctattgcaatttgcggatatgtttcttttgaaaactctttattgcaacttcattttacaatgccccggaaaaacaagttaaaaattggaacaacattacctcgcctgcagttttcaactgccagagcggcgcgaagcgcaggcgtcagcctgtggtagactgccgacggtaacgaaagccgcatcttggcgcggacttgttataacaaatcaaaaaacaaacccaccgcaacttctcaatatgcacagtatatccggtagtcagacgtctgcggattccatccaatttaccatagcagccttcttcatcgctcaagtgcctgccccattccgagggagcgtactgcgtcttgccaaagccttgaagtgcgatataaccgaattactggattaagcctgtccgacctgtccttatcgggcaggtttttgttttagttgagcttagaaatacagacctatgaggtttttcgtcctcataggtctgtacggttcttacttcttgccgaatttcagaccgtaaacggtttttacaacgtcatcgttcaacacgagtgtggcatcataggacttgcctgttttctcggagaagatgcctttaacgaaaatttcgccgtctctcagcaaagccgctgccatcttctttgacagcgtgattttctttccggtgaggaacttgttatcacgccacagaccgaagcggcagtcattggtctcgcagaaaaagccttttttgctctcggtaacatcacctccacagcgagggcatttgccgaccacatcacgatcggatgggaacagcacttccgcacctttgatgacggaatatgttttgacaagctcattcaccataagactgatttcagccatgaacgcatcggcgtccaacccgccgtgttccaccattttcagcttgtgttcccactcggcggtgagtagaggggattgaagctgttccggtaggaccgtaatcaaagagatatctgtgttcgccggcctgttctcataaaacctcatgattttcatggatttttcccagctcttgaaatggaaaagtgctgtgattttttgatggaaacgccccaaacgaagcggagttcattcggctcgcccccatttgaatttttgcgttttttacggctctacacggaaatcagcgtctcgcgtctcttgtggcagttttgtttctgtttcgggagaaatacgaccacagattatttcgggaaatcacgtcctcata

SEQ ID NO: 1199 - DNA, 1881 bp, Unknown
  16S sequences of unknown bacteria
taatgctaagcagcgtattatgtttccatttatagcttattgcagctgctaacacgcctgccatctgcacgattccaatatgctttggatcagtcgttatatcccttaggcaatatacaatcagaactgccataatgagcggcggcagtgcttttcctaactgctctaaccacacaggcattttgcgttttccgcgaaaaacagcaaacggaagtgcacgaagtccaaacgtaataattgcacacattataataattaaaaaaatttcaataggatttctcataatgcacctcgtttttctcttttctctgccataaaagtaaaatgccagatgcaataatcaatgccggcaaaataaaattgctttttccaaaaaagagcagacaaataatccctgttccaagtccaatcaatgctggtatatgactctttgctttctcccattgatccataaaaataataacgaacaaagctgtcatacaaaaatcaatgccatctggaatctgacctaacagctgaccaaataagcctccaagtattgttcctgccatccagtaaattctagaaaacaatgtgacaaagaacattacctgtctgcgatttgtgacttctggtgaaagcgtacaatttaccgcatacgtctcatctgtcatcgtatgtatcatataccattttgccttgcccattgccttaaagtctttcagaaatgtcaggctgtaaaagctttgacggctattcataaggaatgccgtaagcgcaatcgtaacaattgatgcaccactctttagaaatgtgattaatacaaactggaatgcacccgtatatataataaaactcgtgaataatgcatagtaccaagcaaaccctgctttttgcatcaaaagtccatatccaaatgccacacagatatagctaaaaaaaataggaagtgacttcacaagcgcttcccgtatgctgtttttcatttcgcgtaccataccttttcttttctttttctcttttatgatactttgcgaaatgtcttttgtccaatctgaaagcaaaataacctgttataggatttttctatgattgtacacagaaaaccttttctttatttctcaaccaaatgtttaagcagcccttcacagcctctgacaatatcttcatatgtgcgtccaaactcacccgtgtaccatggatctgcaatatcccccggatcatctgcaaacataagaagtttgtagattttgtgcgcaggatcaccacctgcgatacgaatcatattagaaatattccggtcgtccatcccgatcaaatattcatatttttcataatctgcacgacacatctgtactgcccgctttttgtcacaagaaattccatgacgagctaactcctttttagctggcggatatactggatttccaattccattccaaatttcctctgtactagttgctgctgacttaattaaaaattgatcttctaaaccatgttttttgaccatttctttaaaaataaattcagccattgggctgcggcaaatattgccgtggcaaacgaataaaacttttatcataatcttttctcctgatctcttaaaggcgcattatattttttcagttggaatactatctgtagccaccaatctccaactttatagaataatactatcatatcctcggttctttttctacaaattttttatataaatcaccttacttattccagcatattataccataaaactgctatcaagatgcataattagttatattccatccattttgtttaattatttcttgtccaatcatacacttctgaggaaagtgtgaatccaatttgaaaataaaattcttgttcagacacaacgatagctcgtttggcaccaagtgcttt

SEQ ID NO: 1200 - DNA, 14845 bp, Unknown
  16S sequences of unknown bacteria
atatcaagaccctcacgcggcggaaatcgtgtttaaagccggatttgaggactttaccgttgtggatttgcagtgctgcatgaccgcatatcttacaaaggaagaggaggaaaaactcggcgcaaccccgaaaaacaacagcctttgcggtttaatgcaccaagttgtacgccaccgccaagaaaatctgcggaaattaaaaggcacaaaatacaatgatttggcagagcaggaaggaaaaaagatggtgttctgcgacgccgcagcagccgctgtgatgattgaccctacaatatcgaagtatcaagactattacatgatgtgcgaaacaaggggagataaaacctttggacagactgtcatagacagattaggtcttgccggaaccacaaatattcacctggctcttggcgttgacagagacagattccggcagctttactttgattgtcttaaaaaatacgaggtgtgatctatgaataaaaaatatattgtaatggacgttgatacaggctgtgacgacagcatggcgttgatgcttgcaaagtcttgcccggatattgaaattttggctttgacctgtgtttttggcaacaacgatgtgaataccacaacggaaaatacccttaaagtcgcaaaaatgttgggtataaacgccccggtgggcaagggtgcacaaaagccattgattgacccgcccttgcaggcggacggtttgggagttgccatacacggcaaagacggccttggcaatataggcggccgccttaaaaagacagaggaaaatttaagcgacttaaccgctgttgaccttatggcaaaggtgataaaagaggccccggaaaaagttacattagttgccacagggccacttacaaacatcgccacatttttggtaagttacccggagttacaggaaaaaattgagcaaatagcgttgatgggcggcgccgcatacggcggaaatctgacatttaatgtagaggctaacacaggccacgacccggaggccacagcgatagtgtttatgagtggtgtcaaaaaagttatgttcggccttgacgcaactatggctgtgtacattacaaaccgggaaagacagcttttggcggaaaacggtggggaagtaggtgtatttttgaaagactgcctgcaagcctatgcggatacatacaaagccttggcaaattaccccggggctgttttgcacgattctttgcccctggcatggcttattgacgaaagctgtgttcagctgaaagacgcctatgtggaaattgaccttaacggcgccgtaagccgtggctgtaccgttgcggactttatgggcatttgccaaaagccccggaacacaaaaatcgccatgagggcagacagagaaaagattataaaaatgcacaccgagggcgtaaaagcttttgcagatgtaaaaatttaaaatttttaccggataataaattaaacaacctccgcagtttgaaaatctgcggaggttgtttgtcatttttgtgtggaaattatgtatttttatattattacgcctttgcaacggcaatcttaccgtcgatatatgcgccccggctaatgctcaatgtcttagctgaaatatcacctgtaatgtgagccgtggaatcaaatgaggctgtttctttaaccgtaacattacctgtaacgttgccggagcagtagatgctctcccggtttacattgccgttaacccgggagccgtcggcaattttaactttgccggaagcagttacattgccctttaaagccttttgcaaaatttcaacatcgccggcaataatgtcaccctctacatctgtgtaagttttaacattgcctttgctttcgatattgcctttaaatatgccgtaaatttcaacatcgccctgtgctttcaaagtgccttcaaaataagcgccctccgaaataactgtggcctgataattcttttccgcagacggggcagcagatgcgacagtttctttcacaacattttcggtctttgcgggagctttttcgaccttttcttccgttttgccgttagttttacctacgccgaaaagttcgttcatagcctgaccaaaattttcttttgccatgtgtatataatcctcctgagatatatggtgtatataaaatttgtaaaaatttatatcttaataactgtacgaaaaaactatcggcttaatgtccggtgtaagtgtgtcaaattcgtaaccggcctctcgcaacttccgaattatttccggcactgcccgggcggtggtgttgcggtagtgggaatcgtgcataagtacgatgctgcggctgtattttgtcgccccggttacaacattgttaagcacctgctcttttgttaaaccacgctgtgaggcgtccccggaggaaacattccagtcacaggggataaagcccctgcgcagcatttccgatataatttcgtgatttatccgatagttgtaggcatttatactgcccccggccattctgaaatacaccggcgtaaccccggtggcttcttttataagacaaaaaagtttatacatatcgtcaaggtagtcctcaacagactgataaaccttgttgtaatcgtgtgtgtaggagtgcatggcaatagtgtgaccctgtgccacaatatcacgcataatttgctttgagtattcgtcgcttttgcccacaacaaaaaatgtggcttttacatcccgttcggacaaagcgtttaaaacttcataggttctttccgacgggccgtcatcaaatgtaaggtacaccgtgttttcctttacggtgtcagcggttatttcaaccccggagtaaaaatccgggtacaagtccttataaggggaaccctcagggtacaaggcggttttaatttcctcctcaaactgttgttcttcatttgtgatttgggcttgcaactgccgattgtctgccaatgcggatttgtactttgatttgtaaataaaagtggtgcaggtgggtacaattatggcggttacaaccccggccaatattaagtttttgtagaatttaacactaccgatgtaatcgcccattttccactgtctttccgtttttatttacacagcacaggttatatgtgctgccttttagtaaaagtctgtataaataaccaatatatatatatatatatacatcaatattcataatttgtcaataattagcgaaaattgtcaaagtaaagattgactgaattttacacaatactatattgaaaattataaaaagccgaaacccacatgaggtttcggcttttagaggtttggtggacctgaagagattcgaactctcgacctctgcgatgcgaacgtagcgctctaccaactgagccacaggcccaaatctttaatccaaaaattattatagcaaactgttcacataaattcaagatattttgtgaatttctcggtgtgaaacagtcaaaaaactataagttgtttatcccgttttgccacccggtgataaatttgtgaatttgatcaaaaggcatattttgcttaattgacttaataatagatttaggttaatataaataaaaaagaacagggagttggatcaatgaagaagtataccgaaaaaataccgtcccgggacggcaaaaccgatataaatgttgtggtttgggaatcaaagcagccgacagcggttttgcagcttatccacggcatgagcgaatatatagacagatacgatgattttgcaaggtttttaacagataacggctttaatgtaataggccatgaccatttgggccacggctattccgtatcggatgagagaaactacggattttttgcggataaaaacggagatgaaatcattattgaggatattcactcggtgacggagcttgcaaaggagaagtggcagggcttgccgaattatattttggggcacagcatgggctctttctgtttaagacaatatctgacacagtacagccgggaggtttacggtgcggtaatagtaggcacaggctggatacctgcacccttggcaaaattgggtaaaaaggtggcaacaggggtttgcgcttcaaagggggatcactcggtgaattccacgcttgtaaagctgacccttggcagtaacaacaaaaaatttgcccctaacagaacccggttcgattggctttcccgagatgaaaaacaggttgataagtacattgccgacagcctttgcggatttgattttaccgccggggcatacagagatttcttttgtattttggaaaaactgggtgaaaataaaaagcttgcaggggttagaaaatccttgcccgtgcttattacctccggcagcgttgacccggtagggggcaaaaaagcctgcgaaaaattgtacgctcagtggaaaaaatgccatatggaagatgtttccttaaaattgtgggaaaacgacaggcacgaaataatcaacgaaattgacaatcgggaaatatacaggtatatactctcatggttaaaaggcaggataagataagtaagcatccgcctgaaataaatgccggcggcttttgatttaaagctgtcggcgtttttatgtttaaaaaattacaggacaagttttttccattttctgattttagttctgaatgttccgaaaggggctacggtattcacatgaatgaatttgtaaacctcccacaccgccgtttttgtggcgctgtctgcccattttctcatatggggcataaataattcttcctcgctcattgaatcaatcatcgtacatatggaaaccacattttcggttagcgtttctttcagctgtgctaatgataggtgagagtaggtgtccgtaaaccactgatataaatcccccaaccggttccatttaaacatctcagagggggtttttaccgaaattccgtttttttcatccctctcccattttaaaagcaaggttgtccagcctacctgatatgcaaggttttccgcaggtgttctgtctacatcgtctgctctcttgtcctttaaaatctccggaatatcgtcaaattccgagatgtatttctcaaagctcttgattatttcgccttttaattcttccttgtccttatatgttctcaaattaaactgtcctcaaatccttgttttgaagtattatatcacagaaaaatcgacttttccaccgagaagtaaggggcaacagacggcgggtagaaattttcatatttatgatgtataattgtgatattaaagattgatagatcggaatttgtaacggaggtatttgctatgaaaggaattaagattgagttattgggaattgcaacaatacttttaggaattgctgtgacaacaaataatttctttggatatgtccttggtgttcttggatttggcatcgctgtagccggctgttttctaaaagataagcactgataacttcgcatttgtgggactaaaacacaagaccgcttacaaaggtgtaggcggtcttttttgtgtccggatatatttctttgagctttcttctcttggcagaaagcaccttacagagaacatcgtcaacttcgtcggtgtatctgccttgtctgttagcagaggtcaaatttgctgatgaaaatttgtgattttcccgtttctgctgtttcttcgcaaaaataaaaaagccgaaaacccttgattttacacaggttttcggcaaagttttggcgttcccgaggtgatttgaacacccgacctaccgcttaggaggcggtcgctctatccagctgagctacggaaacaaaattactcttattattttactatcaaataccgtaaaaatcaagtgtttttaaaaaccggcaaggaacaattttaaaaaagggggaaaaataaaaaatcccttgtactttaaataaaaaacagcctcaaaaatgaggacagctttttatttatttgaaggattttccatgaaagtgaattttattactctgccttagtgagaggcaggttgatctctcaacagttgatattatatcgcattgttaaataaatatcaatacttgaatgttacaaatatagtagttaaaaaattgtcaaaactatgtattttgtctaaaaaacaaagaaaatatagtattttggcataaaaacgggctttataaaatcgggcatatatcacaaatagggcaaaaggcccgccgaaaacgacgagccttttgcagagaaaaagtatatgaggaaatgcaagatgttaacgccagcctttgcgttatcatctttgtgactgtattatataccggcggggtaaaaaagtatgtcacaatttgtcaacaatatttgtcattacagatagaattttgtcaaaaaagaataatagataaaattttctttatatattgtgcaaatttccaaaaatgtacttttgctattgcattttttgttaatcgtgatatactaaaagcatagatacaaaaattccattgtgtgtaaacacaatattgtacagattttcctctcttaaaaatgaaagaccgatgtttagtcggtcttttgtttttgtgtataaacatattaaaaaagtagtttattttttcaccctgctgtgatataatttttttaatctgtaaggccgttttgcggtgccgaactctatgtttaaaagaggataggctcaggggaagtgcggtgagaatccgccacaacagccattaccgtgtgatttttaaaatttaagtcgggatgcctgtcttgcggaaaattataatttatgtcttgggcaaaagaaggagtattttatggatatcaaaacacctttcagatatgaccatgtgggcagttttttgcgcccggaatatctgaaacaagcaagagccgaattttttgacggcaaaatcacaagagaggagcttacggcggttgagaacaaagctatcaccgagcttgttaaaaagcaaaaggaattgggctaccatgcaatcaccgacggcgagttcagaagaggcagctggcaccttgattttatgtgggcttttgacggcgtaagccacagcgccacagacagaggcttgcctttccatgacgaggccgctatccttgacgacacataccttaccggcaaagtgggtatgacaggggttcacccctttgtggaacactttaaattcttaaagcagtttgaggacgaaaacaccgttgttaagcagacaatacctgcgccggcccagttccttgcacagtttgcaatgcctttcggctggaaagacgcaagcgaattttacgccacaagggaagaactggcaaaggatatcgcagagggctacaaaaaggttatcaaagacttgtacgatgccggttgcagaaacctgcaaattgacgattgcacatggggcatgcttgcggacagacacggctacaaagcatacggcgtgtcttgggaagacacaaagaaagtacaggaaatccacaaagatataaacaatgcggttatcgccgcagtgcctgccgatatggtggtaaacactcatatctgccgtggaaactatcactcaacttatgccaaccggggcgcttatgacccggttgcggacattttgctgggcgaggaaaatgtaaacgctttctaccttgaatttgacgatgagcgctccggcggctttgaaccacttgcaaaggtaagcggagaaaagaaggttgttttgggcttgattacaacaaaatcacctaaacttgaaaacaaggataccgttatcaagagaatacaccaagctgcggaatacattcctcttgacagattgtatttgtctccacagtgcggttttgcatcctgcgaaatcggcaacaaattgaccgaggaagaacagtgggcaaaacttaaacttgtaaaggaaatagccgaagaagtttggggttgattttctttaaaatcgcacataatacaaaaatgccttttgcggttgcaaaaggcatttgtttttagttattctctttttcgtcttccgttgttttttctattatatatcttgggcgggcttttgtctcggagtaaatcttaccgatgtactcgccgattacgcctaagcagaaaagctgaataccccccaaaaatgccattacgcatatcatgcttgtccaaccgctgatggcatggccggcgattttggttatgattgcccacaatatagctataaaacttgcaaggctcataacaacgcccaatcccgttatgtatcttaacggcttaaccgaaaggcttgtgatgccgtttaaggcaagatttaacattttggagaagggatagtggctctcaccggctattctctcaaatctctcgtagtaaaccgatgtggatttgtagcctaccataggcacggtgcctcttaaaaacagatttacctctttaaactgtgcaagaccctccaatgcctctttgctcataaggcgatagtccgcatggttaaacactgtatcggcacccataagggtcataaatttgtagaagccttcggcagtgacacgcttaaagaaggtgtccgtgtcacgcttactgcgaacgccgtaaaccacatggcagccgtcccgatagtttttcatcatttcatccatggcgtttatatcatcctggccgtcacagtcaatggaaatggtaacatcgcatctgtcctttgcccacataagccctgcaagaagtgcattttgatgacctctgttgcgggtgagggttactcctgcatatttgtcattttcctttgccaaattttgaataatatcccatgtgccgtcttttgagccgtcgtttacaaatacaaccttggacttatcgttgcaaagtccttggtctataaggctgttgattttgtttaaaaacatgggggctgtaatgggcaaaaccgcctcctcattgtaacatggtattactatgtataatgatttatccacattgtatttttccatattatcctccgttaatatattttatatatggttaccgtaccggtagcaaatactttttcaaaacattcaaggtttgtgttgtccccgtcaaattgtgatgaatacacaacatattttacacctatacccctgcaaatatcaagtatatgttgatttatgcagacaaaatatatattaagattttaataagaattttactataaaccctgttgtaaatcaatttgaattttgatatactgtcaattatattaaaacttttatagaggggaaaaggtatggatttcacaacacaacttttgataatatgtccgctggtgtttcttgccggctttgtggacgccgtggcagggggcggcggtttgctttctacaccggcgtatatgatggcgggcttgcctatgcacaatgtacttgccactaataaggttatgtcatctgtcggcacaagcatggctgccgcaaagtatgtaaaaagcggtaaagtggaatggaaaaccgcaattatcagcgcagttttaagttttgcaggcagttttacaggcagtaaaatcgcccttgttatagaccagacaatgcttaaaaaggcgtttactctgcttttgccttttatagcaatttttgttttgttcaacaaaaaggacgacaacccggtacaaaaactatatggtacaaagttatatatcgccgccggtttgataggttttgtcataggcatttacgacggtttaataggccccggcacaggtacatttttaatttttgcctacactattttcataggttttgattatatcaccgccggcggcaatgcaaaggtggtaaatttggcctccaatgtggcggcggccgcaaactatataatagccggcaaggttatttgggcaatagcgttgcctgcggctctctgcaatcttttgggcaattatttaggctctgcctacgccataaaaaacggcgcaaaagtaatcaaaaaaatgcttatcgtagtgctggtgggcgtgtttataaagctgataggcgatataatttaatctttaagccaaattaaaataaagcataacagcggccgtcggccgttgtttttttgccataaaacataaaatgccggcatagtattaaacagtaaatctcaggcggtgaaatatgtactatccatttttactttgcgcccttgccggactttccacaagtttgggggctgtttttgtgattttaggcggtggaatcaatgatgataaaatgtccttttacgagggctttgccgcaggggtcatgctggcggtgtctcggtttgaccttattccggaaagctataaaagctatctttcttatcttacccggctgcagggggcaagagcagtgtttttgctgtttttatccggggttgccgtgggctttgccatgtcaaaattctgcgatacattcacattcaagtattcttcacggcagggacagattataggcagaacagcatttttgacaactcttataatagttttgcacaacctgccggagggaatgcttacgatttttaccgcggcgaaaaatgcaaggttcggtttaaaagtatcccgggcggtggctttgcacaatattccggagggcatggcggtggcagggccggttttgtatctttccaaaagcaagaaaaaagcctttatgcaagccttttggcggggcatggcggaacttttcggcggctttgtatcctattttttgcttttctcatttataaacacggcttttttaaacgggattatgccatttatagcaggaataatgtgccagacggcgatttttgaacttgtgccctcttcaatgaaaatatcaaagaatatacacacaatttgtggtataatcagcggtataattgtaatgtctattggaatattcctgttttaatgttaaaatagagtatcacctaaattataaggaattattatgagaaaaatagccgctattattttgtcgattttaatgcttacaggctgcgccgtggcagacaaaaacgatataatgaatttgctgtcgtcgccgcaactttccaagagggaaagccggattgtggcgtctttaaacgaatatttgcaaagcaaaattttgcttaaatacccaaagcggggcaacagtatatctccggtgcaaatcgtggatttaaacggagacggaaaaaaacaagcagtggttctttacagcgatccaaacaccggcggaaatttgagacttgcggttttggggcaggccgatgatggctggcaggttatatccgacagagagggctacggcaccgaactttacaaaatcgactttgcaaacataaccggcgacggccgcaaacggattgtggtaggctatacattttccgacggcagcaacaagtttttgtcggtgtatttaggcggcagtgaggatatagacaacagcgtcacttactcatgccgggattttaccgtaggggatataaccggcgacggcataagcgatatagtgtatgccggtgcaagcggcgacaatcggcacacaacgataactttgctgacttgtgaaaacggagaacttgtgcaaaaagcacgggcggaaataccctttaaaaatcggaaggttacatctatcgctcttactaaaaacgagtacagcgaaaacaacggccttgtggtggactgttcaaccccggatcacgtagttcacaccgtgtactattactacggattgtctgccgcccggcagccggaagaaacccgggataacacaaccgatggagaaaacagggagaatgacccggccgcagaagaaaccgaatctgccgaaaacgaaaatcaaaccgaggaaatgtgtcttgtggctatgcccaatcgggatattgcaaaatactggaatgaggattacaatttggtaagcatagatttggacatggacaaattttacgaaaccgcaggcattataaaaacatcagaggacggatatgcggctcttatggattggacatgctatcggagtaaaacccctgtgagaaagtatttgggaatatgccgggtaaaagaggggatttttttccctgttccggttgaatgggaaaatcggacggaaatttacggcaccgaagccggcggcagtgtgattgatgcaaagacgggggaaacccttttggattttgccgttgtcacagtccgtgatgaaatcggggataatataatgtattccactgtgggcacattgcaggttaaatttgtgttctcggaacaagtgtccgacacacagcgcagttttataacggaaaatctcacatatttaaagtaacgggagaagaaaaatatggcgaatatacttgttgttgacgacgaagaaagcatcggcgaagttgtggaactcaatttaacattggagggacaccgggtaaaaagatttacatccgccgaaaaagcaatggaagagtttaaccgccccggcgttaaatttgacatcgccattttggatattatgctgccgggcatcagcggcacatctctgtgcgaatacatacgtgccagggacagtgatataggcataataatgctctcggcaaaaagccaggaaaaggacaaggtacattctctgtccgtaggggcggacgattatgtgacaaaaccctttggtgttgcggaacttgtggcaagggttaattcccttttgcgccgagtaaaaaagacggacaagaccgatgagcatgaacaagacattatggtgtccggcccatttaccctggattttaaaagccgtgttatgcacaaaggtgacacggttatagatttaacaagtgtggaattcagcataatggagctgttttttaaaaacgagggcacagcccttgtaagggaaaaaattcttgaaggggtgtggggagaaaactacttcggcgatataaaaatcgtagatgtaaacatacgccgtttgagaatgaaaatcgaagatgacccttcaaacccacagcacatagtaaccgtttggggttacggataccgctggagtgtataatatgaaaggcagtataaccaaaaggtgggtaaagggcagtcttgtaaccaccacccttatcatgataattgcggaagttttaaccgtaatatatctcagaaacagttattactcccgggcggaaaatgccattttaagcagaataagcaccataaacggcacactgaccgcacagtgggatttgtctgaggcacagcgcacagggcttatttacaatttgatagaagatttttccgaaaaggacaagtttgaagttatggttatcggcacaaacggcaaagtgcttacaacctctaccggttttatgcctgcggacagcggccatctgagggatattgcccttgcccggcaatctgccgacggcatagccacaaatatttacagaacttccgtaggggaaaaagtccttaccgccacatgtataatccgtaaaaataccgagagtatatatgcggttcgtcttgttacaagccttgaaaaagtggacacgcaaataaacatcatcatatcaatggcggttgtgtttttctttgtggtaatgggctttgttttaatgtccggtatgtattttataggcagtatcgtaaaaccggtaagggatatagaggccggcgccgcccggataagcaagggcgagtttaatgtgcgtattaaaaacacttacaacgacgaaatcggccagctatgtgacgcaataaacaatatggcggcggagcttggaaaaaccgatgaaataaaaaacgattttatttcaggggtttcccacgaattacgcacccctctcacagccataaagggctgggcggagacaatggaaaattccgtaaatgaccctgcaaccgtgaaaaagggaacaaaagttattttaagcgaaaccgaaaggcttaattccatggtggaaaatctccttgatttttctcgcttgcaacagtccgatttaaaattcacaaaagaaaaactggacttggcggcggaaataagcgatgcggttataatgttcaccccaaggtgcaaacaaaacggaatagaacttatttttgacgagccggaggatataatagccgtttatgcggacaagagcagaataaagcagataatggtaaaccttttggacaacgccgtaaaatacaccccgccgggaggaaaaattcaagttcttatggaaagcgaccgaaagagaaacactgtttccgtaagcgttgtggacaacggacaggggattgccccggaggatatagacaaggtaacccaaaagttttacaagggtaaaaattcaaagcgaggatccggcataggccttgctttggttaaagaaatagttgaagcccacggcggcacttttaatgcggagagccgacagggggaatacacaaaaatgacatttacactgcgcacggtgcgcacaatgaaaggcaaataatggcggaaaaaatttcaataggcggacaggcccttatcgagggcataatgatgaaaggcaaggataaatactctgtggcggtgcgaaagcccgatggcagtataaaaacccaagtacatgatgtacagcctgcaaaatttaataaaatcccgattttgcgtgggattttcagctttgtgcaaagtttggcggtaggctataaatgtttgatgtattcggcagacgaatctatggacggtgcatatgaggaagacaagtttgaaaaatggttaaaaaaacatttcggcgaaaaggcgtcttctgcggttacaactgtggccggtgtggcaggcacaatgcttgcccttgtgctgtttatggttttgcctacggcaattaccggttttatagacaagttcatatctttgggcggttttaaatctctcatagagggtattgtaaaattacttatattctttatttacctctggtcaatttccaaattgcgggaaattcaccgtgt

SEQ ID NO: 1201 - DNA, 14008 bp, Unknown
  16S sequences of unknown bacteria
gggtggtctttgcggtgaaaagctattgtttacctaatctacaggcgggatctgagctttcttttgatgatttttccgaaaagggtctgtgctccggcgcgggctttgccgtctgtaaatttattttgtgtcttttcggcttgagacgaggcggcgcatcccgctcgtccgcatcccgcatttctattatatcacattttcaggccgttgtaaatacccggatgtcaattttgttgaatggagtgattttttcaatgatggtcaaacccacgatgcttggcaagaccgaacgaatgagcttcgccaagataggcgatactctggaaatgcccaatctcatcgaggtgcagaaaaagtcgtataagtggttcctcgacgaagggctcagagaagttcttcacgacgtttcgccgatcaccgactactcgggcaaccttgtcatcgagttcatcgactataccatcgatccgaccccgaagtaccccgaggaggagtgcaaggagcgcgacaccaacttcgcggcgcctctccgagtaactgtccgcctgaccaacaaggccaccggcgaggtcaaggagtccgcggtcttcatgggcgatttcccgctcatgaccgataacggcaccttcatcatcaacggtgcggagcgcgtcatagtttcccagatcgtccgctcccccggcatatactacgaaacctctatcgacaagacgggcaaggtcatctacgcggcgaccgtcatcccgtaccgcggcgcgtggctcgagtacgagaccgacgcgaacgacatattttatgtccgcatagacaagaaccgcaagatcccggtgactatcctcatccgcgcgctcggaatcgagtcggacgaggagataaagaagtatttcggtgaggatccgaagctcgtcgccacgatggagaaggacatgatggcggccgaggcggagaagaaccatacttctctcggcgatgagtcgctcaaggagatctacaagaagctgcgtccgggcgagcctccgctcgttgagtcggctcagctgctgctcaacaacctgttcttcgacccgaagcgttacgacctcgcggctgtcggacgctataagtacgacaagaagctcgctctcggcaagagaatcgcgggcagaaagctctcgagaccggtcgtttccccgatcacgggcgagctgctgttcgaggctgaggaagctctcgatatggagaaggcgatgaccattgagcacgccggcgtcaatgaggtgtgggtatacctcgacgacggcgagaccgaggtcaaggtcttcggcaacggcatgatcgagccggagtatgtcatcggctgcgacctgaaggacatcggcatcaccgagcgcgctaagctctccgtcatgctcgacatcctgcgtgaggtcgacggcgacatcgatgagttcaagaaggtcgccgctaaccgcatcgcggagctcgttccgaagcacatcacgaaggacgatatcttcgcgtcgatcaactacctcacctgcctctcgcacgatatcggcgtgagagacgatatcgaccacctcggaaaccgccgtctgcgttctgtcggagagcttctccagaaccagatgcgcataggcttctcgaagatggacaagaccgtcaaggaacgcatgacgactcaggattccgagacgctcactcctaacactcttatcaacataagacctgtcgtcaccgctatccgcgagttcttcggctcttcgccgctgtcccagttcatggaccagaacaacccgctggcggagctgacgcataagcgccgtctctcggcactcggtccgggcggtctgtcccgtgaccgcgcgtccttcgaggtccgcgacgtacactatacgcattacggtcgtatgtgcccgatcgagacgcctgaaggtcctaacatcggtcttatctcttaccttgcaacatatgcgaggataaataattacggcttcatcgaggcgccgtaccgcaagatagacaaggctaccggcgtcgttaccgacgaggtcgagtacatgaccgcggacgtcgaggataattacacgatcgctcaggcgaacgagccgctcgacgagaacggacgcttcgtcaacaagcgtatttccggacgccgcagaaacgagatcatcgagttcaacgccaccgaggcggattacatggacgtctccccgaagatggtcgtgtcggtcgcgacggcgcatatcccgttccttgagaacgacgacaactcgcgtgctctcatgggatccaacatgcagaagcaggcggtcccgctgctcgtttcgcagcagcctatcgtcgctaccggtatggagtacaaggctgccgtcgactccggcgtcgtcgtctgcgcgaagaacgcgggctacgtcgagaaggtctgcgctgacgagatcgtcatccgcaccgacgccggaacaaaggatgtttatcatctcattaaattcaagcgctccaaccagggcacctgcgtcacccagaagcctatagtcgacgtcggagagcgtgtcgaggtcaagcaggtcatagctgacggccccgctaccgacaagggcgagatttccctcggaaagaacgctctcatcggcttcatgacctgggaaggctacaactacgaggacgcggttcttcttaatgaaaagctcgtccgcgacgacgtttacacctcgatccatatcgaggagtactcgcatgaggcgcgcgacaccaagctcggccccgaggagatcacccgtgagatcccgaacgtcggtgaggacgcgctgaaggatctgaccccggacggtatcatccgcaagggtactgaggtccgcgccggcgatatcctcgtcggtaaggtcactcccaagggagaaaccgagctcaccgcggaggagagactgctccgcgccatcttcggcgagaaggcaagagaagtccgcgacacatcgctgaggctcccgcacggcgagtccggaatcgtcatcgacgtcaaggtgttctcaagagacacctccgacgagctgccgcccggagtcaacaaggtcgtgcgcgtctatatcgctcagaagagaaagatatcggtcggcgacaagatggcaggccgccatggtaacaagggtgtcgtttcgagaatactcccgccggaggatatgccgttcttagctgacggtaccccgctcgacatcgttctcaacccgatgggcgtgccgtcccgaatgaatataggacaggtgctcgaggtacacctcggcatcgcggcgaagaagctcggctggaagataatgacgccggtgttcgacggcgcgaccgagcaggatatctccgagtgcatggtcaaggccggaatggaccgcgaggttctgccgcttgagaacgtcaacggcaagaagctctttgagctctcctacgacgagaacggcgagaagcagctcagacctatagtcggcgaagagagagaggacaaggctcatctcgaggagctgagacttcaggataagctcagggtcgtcgacggaaagacgatactttacgacggacgcaccggcgaacctttcgctaacccggtcactgtcggtattatgtactacctcaagctccaccaccttgtcgatgataagattcacgcgcgctccacaggtccttacggactcgtcacacagcagcctctcggaggcaaggcgcagttcggcggacagcgtttcggcgagatggaggtctgggcgctcgaggcgtacggcgcggcttacacgctccaggagatcctgaccgtgaagtcggacgacgtcaccggacgtgtcaagacttacgaagctatcgtcaagggtcagaatatcccgaccccgggcgttccggaggcgttcaaggtgctcgtcaaggagctccagtcgctggcgctcgacgtcaaggtgctcgacaaggagggcaacgtcatagagctctccagtcttggtgacgacgatgacgatatggctccgaaccttgtgtccgagtcggatgtcggagagaccgtcaccgacgagaacgagatgaaggattcgttcactgaggagcatccggatgacgacgacgatttcggcggcacggatgacgacgatgtgtttgacgatgggatcgaggatgtcgatttcagcgaagagtcgttcgacgacgacgatgaatgagattaggaggatgaggtcttccgggatgacccgggagaccatacctccggtttgtagaagggtttaattgatggaacgaaacgtatttgattcaattaagataggtctcgcatcccctgagatgataagaagctggtcttacggcgaggtcaagaagccggagactatcaactaccgcaccctgaaggctgagcgcgacggacttttctgtgagcgcatctttgggccgaccaaggactgggagtgcctctgcggcaagtacaagcgcgtcagacacaagggcaagatatgcgagaagtgcggcgtcgaagtcacaacgaagaaggtgcgccgtgagcgcatgggtcacatcgagctcgcggctccggtgtcccacatctggtatttccgcgctatcccgtcgagaatgggactgctgctcgacataaccccgagacttctcgagaaggtgctctatttcgcaagctatatcgttctcgacgctggcgagactccgctcgcgaagatgcagctgctcaatgagcacgagtatcaggagaacgtcgagaagtacggcaaggacgctttccgcgtcggcatgggcgccgaggctatcaaggaactccttcagggcatagatataaacgccctgtccgagagtctgcacgccgagctcgagaccgcagctggtcagaagaagctccgcatcataaagagactcgaggtcgtcgaggctttccgcaagtccggaaacaagcccgaatggatgattctcgatgtcgttccggtcattccgccggatatccgcgcgatggtacagctggacggcggacgtttcgcgtcctccgacctcaatgatctctatcgccgcgtcataaacagaaacaaccgtctgagacgtctcatggagctctccgcgccggacatcatcatccgcaacgagaagagaatgctccaggaggcagttgacgccctcatagacaacggccgccgcggcaagccggtcaccggtcctaataaccgcccgctcaagtctctttccgagatgcttcgcggtaagcagggacgtttccgtcagaacctactcggcaagcgtgtcgactattccggacgttcggttattgtcgtcggtcctgacctgaagatctatcagtgcggtctcccgaaggagatggcgcttgagctcttcaagcctttcgtcatgaagaggcttgtcgagacccagaaggcgaccaacatcaaggacgcgaagaagaaagtcgagaaggtcgatgtcgctgtctgggacgctctcgagaacgtcatcaaggagcatccggtccttctgaaccgcgctccgacgctccacagactgtctattcaggctttcgagccgatacttgtcgagggacgcgcaatcaagctgcatccgctcgtctgcaccgcgttcaacgcggacttcgacggcgaccagatgcctgttcacgttccgctttcctccgaggcgcaggcagaggcgagattcctcatgctctccgccaacaacctcctgaagcccgccgacggacgctctgtcacgacccctggtcaggacatggtgcttggtccgtactggctgactatcgaccgcgccggtgaagtcggcgaaggtcacgtgttccgcgacttcaacgaagttgtcatggcataccagaaccaccttgtcggaatgcacgccgcaatcaaggtccgtgttacccgcgagatcgagggcagggagtattccgctataatcgacgcgacgctcggacgtctcatcttcaaccgtccgatcccgcaggatctcggttttgtaaagcgcccgaccatcgccgagctctacgacgatccggagcatcccgacgagccgaaccccgagaaggtgaagcagctcctgtcgctcgagatcgctttcccgacccgtaagaaggatctcggaaagatcatcgatatgtgcatcaagacccacggcttctcgaccaccgcgcaggtgctcgacagcatcaagtctatgggcttcaagtactcgacgctcagctcgctctccatttccatcgcggatatgacgataccgccgaagaagtatgagatcgtcagcaacgccgaggcgaaggttctcgagatcatgaagcacttccagcgcggtcagctctccgaggacgagcgttacagcaacgtcatcaaggtctgggagaaagcgacgaacgacgtcgtcgaagcccttcaggcagagttcgacagatacaacccgatcaagatgatgagcgactccggagcacgaggcaacatcacccagatgcgtcagctcgccggtatgcgcggactcatgttcgcgactaacggtaagacgatggaaatgcctatcaaatcgaacttccgtgaaggtcttaacatacttgaatatttcgtagcggcacgcggagcgcgtaagtcgctttcggacaccgctctgaagaccgcggactccggatatctgaccagacgtctcgtcgacgtctcccaggacgtcatcgtccgcgaggaagactgcggcacgagacacggtatctgggtctccgagatcaaggacggaaacgaagtcatcgagccgctgaaggaccgtctcgtcggacgcttcgtcatcggcgacgtcgtggatcccgcgaccggaaacgtcatcgtgaaggacaacacgatgatcaccgatgaagacgccgacgcaatcgtcaaagccggcatcgaccgcgtcctcatcagaaccatcctcgagtgcaaggcaaagcacggcgtctgcgcgcactgctacggcgccgacctcgcgtcctctagacccgtcaacgtcggcgaagccgtcggtatcatcgccgctcagtcgatcggtgagcccggtacccagcttaccatgcgtaccttccacaccggaggcgtggcaggagccgacatcacacagggtcttccgcgagtcgaagagctcttcgaagcacgccgcccgaagaagaccgccatcatctccgagaccgcaggtatcgcccgcatctcggacaacaaacgtctccgcacgatcaccgtcacctcctccgacaccggagaagaaatggcgtacccgatcccgttcggcgtccgcataatcatcgaagacggtcagatggtaacagccggcaaagccctcaccgaaggctcaatctgcccgaccgacatcctccgcatcaacggtctcgacgccgcgtatgactacatcatccgcgaagtccagaaagtttaccgcctccagtcagttgaagtcaacgacaaacacatcgaagtcatcgcacgtcagatgaccagaaaatgccgcgttgaggacgcgggtgacaccgaactcctctcaggctctgtcgtggatctcatcgaactcgaacgcgaaaacgaagccgtccagaaacggattgacgcaggcgaactcgacctcagactcgccacccattccccggttctcctcggtatcaccaaagcagcactcctcaccgactccttcctctccgccgcttccttccaggaaaccaccaaagtcctcaccgaagccgcaatcaaaggaaaagtcgacaacctcctcggtctcaaagaaaacgtcatcatcggtaaactcatcccggcaggtacaggtatggaatgctaccgcaacatcgaagtcgacaaagtcgacgaaaacggcaacatccaggctacgtctgaggctgtataaaattgttagttatgcgggggagggaaaaccctttgaaaagggttttccctcccccgcaccctctccttttctcaaacttcatacatttttttatcggacattgggcttcatttcaaacgagtgctaattgtttgagagtacggcggcgggatcacaattgcgttttgtattccctgcttgagcacgatggagaatgaatcacctctaaaaaagcatgtcaaaaaatcaagtaacctcctcgatctgaatttaacaatacactagcggcagatagcggcgcggataatcgcccatagccgcgatcagttcgtcatacatctgctttgcgctcaggtcttccggaatgtccatttctgtgtaccgcattgtgattatactatcagccggaacgccgtcgcggatcagctcgtcatggagtatttcaaagatagtcgactatccgcatcgtctgacaccggacaggattttgacaagcggtttgtcgataaatggggtgatctccctgatataatcgggactatttatcatgttatcatctcctcttattaaaatttttcagccgcttgtgatatggatattcagagaaattccaaagtcacgagattgtcgcggttttttgaaattataaagcactatcgcgctcatactccaaacacgatagtgcttatatatcaccgaaactatgctgcttactctgccgaattctttacggtctcaatgaaggtttcaagctttgtcattatcttgtccttcttcttttcagcggcggacgcccatgtgccgtcctttttcgcgtcccagagagtgaacgcccagtcgttctccggctgttctatcgacgccgcgaacattcccgcgaccgacgtgtactccgagtttttcataaggtcaagcatctgcgccgtctcgttgtcatgcgcgtactttatcttcagcgccgtctcaaaatacgccggcgtcgtgtacttgttccccgcgtagcccattgcctcgattacagcgccgacagcctcgtcaccctcgctcgtgacagggacgctgaacgtcacaagtccgttcgacgacatcgtacggtagctcttctgcgcctcgtcaaacttcggataaggaagtataccgtactcaaacggcgtctctctgaaatacatcgtgtcgttcagattgatgagagtgaaaaggacacgcccctcgacaaaagcggaatccgaacggatatcattctcgacattcttcgatatcttcagtgtcgattctttgtcgtgaagcatcgtgaacacttttgaatagatatcgataacccgctctgaaccgaacgaataatcgaagctatctccgtttcttgtgaaaacctcacccgccccggcgatcaggaacgggatgatgaagttcgcgtgaagagcttcaagtccgtactggtccttatcgtcgtactcaccgtttccgttgaggtcgcggtagattctcttcgacatatcatacattttgtcaattgtccacttgccgtcgttcaccaccgaatagacgtcctctatcccgttttctttcgcgagatccttgttcaccgcgatgccgaaaaaaccggttatgaacggcaggacgccgtctcccgccgccatgtatatcttcccgtcgatttcggcgttctgtctgtagccctgcgaccaccattcctttgacatatcaaggtacggcatttcgttcaggtcagccatgattccttccgctatcagcgtcgaagtgaaatatgtcggtatcagcgtgatattgtacggttcggaatcgctcatgaccgatgtgcgcaccgaattatacatcacgtccttgtctccgtaattgaaatcatgctcgatgaagtcgagtgtgacgttcagcagctcctcgacgtacttgttcttctcgtagatcgagtcgtttacgacgtcgccgatcaccgactcgacatacatattgtcaaacgcgcaggtcgcctcataatcggtacagaaaagcgttatcttcctgccatcgaagtcaagcccggagaggtatgtctcagtttccggcgccgaggtgttcgtgctgtctcctgatgtggtcgtgtccttcgcgtcagtctgggtttctccgcaggatatcgtcatcatcaccgccgcgagcaaaagcacacttatcgttcttttcatggtttcatctccttatatctgtcagtcataataatttctcgacaatacttcctcctgccactgcttcgagagcatcacgaacggacaggagaatccggtcacgcggacgactatgtgtctgtatttgtcaggctccttctgagccgcaagaagctcgtcgcggctgacgcagtttatctggatcgcctcaacgccgttcagagcgcaggcgcggataaaggcgccgagactgtcctcatcgagccttgccgccgggagcatcacattcgcgatagaattcgccgcgcacttctcaagcccgatcgcctttaccgatcttaatacgtcagtcgcggatctgatatcatgcagtctcgtcggggtgataccgtgagaaatgtagtacccggaatgccttccgttcggcgtcgcggagatcttctgcccccaccagatcacctcggtgtacatgaaataacctatcttgtactcaccgccgaacagcgtcgggagatttcttgttatcctgtagaggtcgctgttaagcctgcccgccagcgcgtccgactcgtccgagccgtctccgaacgccggagatctcgtcgcgagaatccggagattttcgtccggccagtcgttcacgcactgattcaccatctcgtcaaccgtacatatcttctcgtcaaagcaaagccgctttatcgcgagaagggagtcgacaacatcagggaaacccgcgaaattcatctgttccctcgcgtatccggtaccgccgtttgtcagatcgcggcggtttctcagcggattcatcatgagcgccgaagtgaccggcatcggcgagatatccttccagcatattccgcccgtcgcgttaaggcgcgctttcaggcgtatcagctgctccgcgttcgagagaaacgcggaatagacctcctcgaagctcccggagccggatatcggcttgaaatcaaggtgattcgcgaacaaccgggcttcgggcattgtcacgctccactcgagagcgcgcaggagattcaggtactcaccgcttgacggcttgttataatccccgcagagagcgtcccagcagccggacacgacgtaaccgcgcgcctgctcctccgtatagccggcgttcatcatcgccgggatcatcgtgtcgtcgttctcgaacaggaaaatattcctggagcgtagaagcggcttcgatatcagcgccagatactccttcgacgacttcgagctgaatctgcacatcagcttctggtaaataaggtcaagctcaagcgccgagtcgacgaacatcctcgtgatgtcgttgaagacctcattcccgttctcgtcaaccccgccgatggttatcgagttctcgtactcatagtccgcgtacccgctcataaccttgtcgtggtcaacgtgacagtcccagatcagcatgaaacggcacataagatcgtacatctcgtcgtatgtcatgccgtttttcctgtcgttctccataagcggcgcgatgagcacgtcgggtctgccgaccgagttgtagccatagccctcgatgctgccgatagccttgcgcatgaaggcgagcgtcgccattccctcatagaaggtcttcggagcctcccacggcactcttccggcggtttcagcgatcatggtgaagcagcggatattctcaggatcggtctcgttttcaagtcttctgcgagcctccgcggcgaacttttctccgatgagctttatcgactcaagcccagccatagccgccatgacgaaatctctctcctcgtcattttcacatttcacgagggcttccttcgcctcctcgtaaacgccggaaagtccgaccgagaagatcttcttcattggtatcggcgtgtgctcgatgtcaaagaatggtccgcaggtcagatagagtatatccgatatgttctgcgagaacagccgacggctctctggaaatctgtcgtccacgatatggttgttccggtcgaatatccatccgtcagcgtggcgaccgccgcgcccgtatgagccgtccccgtaagcggctatcgcgccggtctcgtagtagaacggcagatgatcgaacagcttcggctcgaatgtctccgctatcgttctgtactgctgtgccttgagcttcattgagttcagtcccgggttctctctgtcaaagtcgtcgagcttttcgtagaccttccccctcagattctcaacactcacggcaagagtacgcatatagtaatccgtgagctctgagcgtatagaagaataatccataaataatacctttctttcatcagcaatatgtctttttcgcaattaaattataacagatgcgcctgtgttttacaatgaactatatggacaaagatggattatccggacatcatattttccaaaacggcttgaaattgtctccggagtgtggtataatttaatttatcacaggcaaaaagggagaacgacgatgaacgacataagggtaactgatatcttcacaatacaccgcttcatcacaccaagcagcagatgggacgcccccgcgccgagagcgcatcactttcttgcctttgagaaggagggcgtggcgactcattttctgagcggcggaagaattttagtggcgtccgaaaacacgctgcatttcctgaatcgcaacgacccgtacagagttgaggttcagcgtttcggatactccatcgtcgccgaaattgccgctgacaacgcgccggactccttcatcgtcgactgctccggcgacagcaaaatgagcggtctgttcaccgcgctgctgaacgcacgcaacgacaatcttcagagcaaccgttaccgcgcgctcgggctcatctatgagattttcggactgataagccgtcgtcaggaagccgagtatatgacttcctccgctgaaggacgcctcttcgccgtccgcgtctatattcaggaacattattcagacccatcgctcgatatgaacgccctcgcgtcgatctccggcgtcagcgcgcatcagcttagcgggcttttcagaaaaaaattcggcgtgtcggtctggcagtatgtgattgacacgagaatcgacgccgcgtcaaagctgctgcgctctcccggtttttcggtcggcatggtcgctgagcagtgcggcttccgcgacgtgtattatttcagcaggctcttcaagaagcagatgggagtgtcgccaagagaatatcgaaagcattaaatgaaataaaatttcctcggagagtataatacacttgtcaatgaaaattccggtttcatcgctatttgtgtgttttgaaattgaattatcggatattattcgctcacctcattgacaattcgtttattttatgatacagtgattcaacgccatgagtgaaaactttcccctttacccatcaatgaaaatcggtatatcagatctgagagtttttgcggcattcgacacagtgttcgccggcgacgatttcaaaatctccactgatatgcacattcacgcgtactatgaaataatagcggtagtcagcggtgctatgcgcatggacttcaccggacgcgcgtccgagattatggaggccgactcggtctgccttattcctccgggtgtgtatcattgctcggggcttgtcggtaatgtaccgaaaaagctcgccgtgcggttcacgatcagcagagcggctgctgacaccgagtttgctccggtttatgacgcctgtgcggaaatgctcgagaagagcagagagccgattttctttcctgacggcagtgagcttgtcgggcttcttgataaaatgtactccgagatggttacgccggagtttgcttctgacgcgtatatacggctgctgcttgaggagttcttcatagccgttttccggcagctcagaaaaaacgacaggacatccacgcagaatattctgaagcagattgacgtcgaggaacagaattcgcgatatctgaaaatagaaaatttcttcgagtcgcggctggcggaccaggtgaccgagcaggatctt

SEQ ID NO: 1202 - DNA, 9447 bp, Unknown
  16S sequences of unknown bacteria
cccccgccttccccctgcgcaaactccccctgcaccacccctccccttgcacaagccctccccctgtgctatcatcagtggcagaaacgaggtgttcccatgtccttggagatcgaacgcaaattccgcatcaaaatgccgcccaaagcctggctgcgcagccgggaaaatctctccgttaccggcctggtgcagtgttacctcaccgcccgccccggctgggaacgccgcgtgcgccaggccaccaatgccctcactggggaggtacgctgtaccctcaccgaaaaaacggaggaagccggcctcatccgtaccgagctggaaaaggagatctccccaagcgagtacgaagcgctgctgggggagatgcagcccggtacgccgcctctttacaaggtgcgttgggcgttcccctacaaggggcacaccatcgagatcgactgctaccccttttgggaaaacgaagcgatactggaggtggagctttccgcccccgatgagcccatcaccctcccgccggagatcgaggtgctggccgaggtgaccgacgacccgaacctcaaaaaccgtgccctggccctggccatgtcggattgggaaaccaccccgcccggctgtggcaagctcccgtagcacaccgcctgcccatccgttccggcaaaatgcgcccccgcccggctttccggcatccccccaagccctgccacggcggaatgataaaaatttgaccatcccccggcttccctattgacatccgcccaaaagggaatataatggtgtcaagatgtttcggggcggggtgcaattccccaccggcggtgacggagcccatcggctccccagtccgcgaacagcgccacggcgctgccgagagggtgcaattccctcaccgacggttacagtccggatggaagaaacagcgcttttttgcgtgttcggcgccccgctgcggctttttgccgtgccgggcgcttttgttttgcgatgaaacatctgcaaatcaataaaaggagcataaccaccatggcaaacaccaatctcaaactcggccgtctggccaagctcggcctgctggccgccctctccatcgtgctcgtattctttatccacttccccatcttccccaccgccaagtttttggaatacgaccccgccgatattcccatcatgatcgccaccttcgccttcggcccgtggtacggcctgatgaccaccatcgtcgttgcggtggtgcaggggcttaccgtcagcgcctccagcgggatctacggcatcatcatgcacatcatcgccaccggcaccttcgtgctggtcgcgggcttcctctatcaaaagcataagaccaaaaagggcgcactgatcgcactgctttgcggcgtcgtggcgtgggggctcatcatgatgcccgccaacctcatcatcacccccatctttaccggtatgccggtggaggccatccgcggcatcctgctgcccatcatcctgcccttcaatctcatcaaagccggcatcaacgccgttgtgaccttcctcgtctacaaaagcgtttcgccgcttctgcatcggtgattttatgaaagaacagttctcctttaccggccgtgtcatcgagggacaccatctcggccacaccctcggcttccccaccgccaatatcgttgtcacccccggcgaacgggtgcccgccttcggcgtttacgctgcgtgggtcaccctgccggatggcacccgccgtgccgccgtgaccaatctcggcgtccgccccaccgtggaggaggccggcgccctgtgggtggaaagctatctcctcgatttttccggcgacctgtatggccaggaactgaccgtcaccctctgccactttctgcgcccggagcgccgcttccccgatgtggaagccctgcggcaagccatcgcccaaaatgcccgggaagcccgtgccttactgctgggcgaaggtaaggaagaccacaccccctgcgaccaataaaccctgtgcagatcccggatcgggcggcagcccggcgggcttcgcccgccttcggggcgccccctgcgggggcgcccctttcgccggcctgcggccggcggggctgccgcccgatctccgcgccctgcgcaaattccccgcaaaaatcctcctccctaccttgacaaatccccctctcctgcggtaaaataaccgggataacaaaaaacgctttgaagcggaggagtacccgttccccccgacccccagagagcagccgtccggtgcaaaggctgcggcggaaaacggaaaaagtcgccgccgagcggtgccgccgaatttttttaagcggcaacggcgttccccgttaaggaaaatgagtgcgtgccgcttcggcacgaaaccaggtggtaccgcgccaagaaatgcgtcctgctgttttcccttctgtggaaaaatcagcgggcttttttattttccccgcctgccgccgcccggctgttttttcactgccaatcatcggccgcaccaccccaaaagaaaaaaggaggatccccatggcaaaacaactggaaaaggtctatgaccccaagcaggtcgaagaccgcacctaccaattctggctggataaaaactacttccacgccgatgccgaaagcaaaaaggaaccctacaccatcgtcattccgccccccaatatcaccggccagctgcatatgggccacgccctggataataccctccaggatgccctcatccgctggcgccgcatgcagggctacgaggccctgtggctgcccggcaccgatcacgcctccatcgccaccgaggccaagatcgtggaagccatgcgcaaggaaggcgtcaccaaggaggagatcggacgcgacggctttttggagcgcgcctgggaatggcgccgccagtacggcgggcgaatcgtcagccagctcaaaaagctcggctccagctgcgactgggagcgggagcgcttcaccctcgatgagggctgctcccgtgcggtgcagctggtgtttcagcgcctgtacgatcagggcctcatctaccgcggcaaccgcatggtcaactggtgccccacctgcaatacctccatcagcgatgctgaggtagaatacgaggagcaggacggcagcttctggcatctgctctacaccgtcaaggagaccggcgagcagctggagctggccaccacccgtcccgaaaccatgctgggtgataccgccgtggccatcaatggcgaggatccccgctatgcccacctgcacggctgccatgtcatcctgccgctgctgaataaggaaatccccatcgtctgcgatgagcacgccgatatggaaaagggcaccggcgtcgtaaagatcacccccgcccacgaccccaatgacttcgaggtaggcgagcgccataatctgccccgtgtccgtgtattcacctacgatggccgcatgaccggtgccgccgataaagccgccgccgatgagctgttccgcaccggcaaggctgccgccggcgagccggaggtgctggactgcggcaagtacgccggcatgaccacccgggaggcccgcaaagccattctggctgatctggaagcctgcggcgccctcaaatcggtggagccgctgcgccacgatgtaggcacctgctaccgctgccacagcaccatcgagcccatggtctccaagcagtggttcgtctcgatgaaaccccttgcagaacccgccatcaaggctgtccgtgagaaagacatccgcttcgttccggagcgcttcgataaaaactacttccactggatggagaacatccgggactggtgcatcagccgccagctgtggtggggccaccgcatccccgcctactactgcgatgactgcggcgagaccgttgtcaccattcaaggcatcgaaacctgccccaagtgcggcggccacatgacccaggaccccgataccctggatacctggttctccagcgcgctgtggcccttctccaccctgggctggccggatgacactcccgagatgcgcaaattctaccccacctccaccctcgtcaccggctacgatatcatcaccttctgggtctcccgcatgatcttctccggtctggaatacaccggcaaaaagccctttgataccgtcctcattcatggcctggtgcgggatgcccagggccgcaagatgagcaaatccctcggcaacggcgtagacccgctggaggtcatcgaccagtacggcgcggatgccctgcgctttatgctggtgaccggcaacagccccggcaatgatacccgctatatggatgaaaaggtgaaggccgcccgcaacttcgccaataagatctggaacgccacccgcttcatccaaatgaacctctccgatgagatcaccaaaatcgagctgcccgaaaccctcgccaccgaggataagtgggtgctcaccctctacaatgaccttgtgaaggaggtcaccgataacctcgaaaaattcgagctgggcgtcgcttccgcaaagctctacgatttcatctgggatatcctctgtgactggtacatcgagctggtgaagagccgcctgcaggcgggcggcgaaaccgccctcaatgcccaaaaggtactggtgtatgtcatggccaataccctcaagctgctgcaccccttcatgcccttcatcaccgaggagatctggcagagcctgccccacgagggcgaggcggaagccatcatgatctcccagtggcccacctggagtgaggagctttccttccagaaggaggaggccgatttccagaagatcattgatatcatccgggctatccgcaaccagcgcaccgaaatgaacatcccgccctccaaaaaggccaaggtctatatcgaaaccgccgaaaccgagattttcgtaaacggcatcccgttcctgcagcgcctggcctccgcttcggaggtcgaggtcggtgaaaagttcgagctgcccggcgccgttcagatcatcacccatgccgcccgcgccctcatcccgatggacgagctgatcgaccgggaaaaggaactggcccgcctggaaaaagagcgcgaaaagtgccagagcgacattgatttcatcggccgcaagctggataaccccggctttgttgccaaagcacccgcccagctcatcgaaaccgagcgcgccaagctggcccagcacaaggaacgcatggccaagattttggaatccatcgccgccatgcggcagtaatcgctttttctctgcaccgtgccctttgcggcgcggtgcagtccgctgtccgggtgcagggggcaagcgcattttatttggtttccgcaaaccaatcgcagctagtcacgctgccgagactatgggttgaacaagcagctattttcccagacggcccctcccccgccacgggggaggggaacgggaagggggcaaatgctgccgcaggctacctttagagcgcatctgtgcgcagtacggatttgggtttttcgataatgaaaaatctaaattcgtagccagcacagcaaagcgtcaaaggggtttgtcaagggggaagcccagtcccccttgacccgcttttgcctccttttggcgcaaaaggaggcccccgccgggtaggcgtgcaggttttgcccttgcaaaagactccgcggcgccgacaggcaactacaaatttgccgtaaatatcttttgtctgcttttcttcctagaaaagcaacttcccaaattcccccaaaggagggcctaacgatgaattatcccgaaacacttgcctggatccacggcaccgagcgctttggcagccggctggggctgggccgcatgggccgcctgctgcaccgcatgggcgatccccatctcaaggtgccctacatccatgtggccggtaccaacggcaaaggcagcaccaccactatgatcgcctcggcccttaccgccggcggcttcaaaaccggcaaattcatctcccccttcatcctggaattccgggagcggatgcagatcgacggcgaaatgatcccggaggaaacactggcggcactggccacccggctgcgccccatcgctgaggaattcaaagccgcgggcgatccccccactgagtttgaattggtcacggtgctggggcttacctggtttgccgaagccggctgcgatattgccgtattggaagtgggcctgggcggccgcctggatgccaccaatatcatcccgcccccgttggtagcggtcatcacccgcattgattatgaccacaccgccattttgggggatacgctggccgccatcgccggggaaaaatgcggcatcctcaagcggggcagcaccgtcatctgctacccggaccaggaggaggaagcattggcggtcatccgccgccgggccaaggaagaggacgatcccctgatccttcccgaccggaccgcgctttctgtcctctccgccgatttgaccggcagccgtattctttaccgcggccaggagattttcattcccctacccggccctcatcaggtgctgaacaccatcacagcggtggaagcgctaaacgcgctttccagcagccgctttgcgctgccgccttcggccattgccgccggtattgccgcggcgcggttccccgcccggctggaactgctgcggcagtccccgcccgtgctggtggatggcgcccacaatcccaatggcggccgggccctgtgtgaagccctaaaagccctgggcctgcacgacctgacggcggtggtgggcatgctgcgggataaagactgcctgccggtgctgcggatgatggctccctactgcgcccggatgatcgtcaccacggtgcccaacccccgcagttatcccgcggaggaatttgccgagctggcccgcggggtatgccgggatatcaccatatgccccgactgcgaggaagccgcccggctggcgctggctaccgccggggaacatggtgtgctggttttcggctcgctgtacctggcttccgccgtccggccggtgatgatggaagcgctgaagaaaaattaaagcatagcccatattttgacagaatattcgatgccaagcttctattcttttgaataggggcttggtttttttattttatcgtaaaaataattcgaatatcatctcgccttcggcgtcacaccaacccaagggctccccttacacaggggagctgtcagccacgtggctgactgaggggttgccggcacaaactatgacttggttttatttcgcctatccggcgggggccagtttgtgatcgccttcggcgtcgcgcagccttttgcaaaggcataatctgtacggctcgccgccgtggcgttccttttgtgcgtacaaaaggaaccaaaatacggtcaagggggacagattcccccttgacgaacccctttctgtcgcttgcagtgctggatacgaatttagatttttcttgaatgaaaaatctaaatccgtactgcgcacagatacgctcccaaggtagccgcaggcgcatttgcccccaccgccttgcggtgcccgaaaaaatcttcgcgctgctcgcttgctcgattttttcgaccgctacggatgctccgcctcgctgcatccgccactggcggtgctcggctccgcatccccatccaccgcgaccccctctccctccaaactcgcataataaatcccagtttcaatttcccagaaaaatccgatatttgtgcgatcttcgcccaatatcttcccatattgtaaattttccattaaaaaaagtgaaatattaacctttcacatgcaaaaaaggctccattttgccgtattagtgaaaggacttttccatcgaccgtgcttctctgctttgctcggtcaaaaaacgccgtcaggcgaaaaaattacaaacaaattactccaaaggaggctgttaaaatgccggtcacaatagaaaccaacggcgataccatggtggcgcgcctgagcggcgagctggaccaccaccacacccaaaagctgcgggaggagatcgaccgcaatgtgcaaaaagagcgccccgcccggctggcgctggattttgccggggtggaatttatggattccagcgggatagggctggtgctggggcgctaccgcctgatgcaggaaatgaacggaaagctggtgctgcgggccatgccgccgcacatccgccgggtaatgcgggtggccgggatagccagcctggagatagaggaggaaagccgcgtatgaataagccgaaaaacaccatgaaagtcagttttcccagcaggggcgccaatgagggcctggcccggatgctggtcgccgccttcatcacagaggcggaccccaccgtggaggagctgtgcgatatcaaaacggctgtttcggaggcggtgaccaactgcatcgttcacgcctacccggaccgcattggggagatctacatagctgccagcctttcggaaagcaatctcgtcaccatcaaggtacgggaccacgggtgcggcatcgccgatgtgcaaaaggcgatggagccgctgtttaccaccggcggcagcgaacgggccgggctgggctttgcggtgatgcaggagctgatggatgaggtgcgggtcacctcccgcgcggggagcggcaccaccgtgcgtctgcgccgccgcctgagccaaaaagcccggtaacaagggaggtctgaccaaaatgcctgttaccgccgaaccaaaggcgaccgccatacaggataccagcgtggaaaacaacctggggctggtgcacgcctgcgcccatcgctttaaggggcggggcatagaatacgacgacctgtaccaggccgggtgcatggggctggtgaaggcctccgcggcctttgatgccggccgtggggtgatgttttccacctatgccgtgccggtcatcctgggggagatccgccggctgttccgggatgggggcaccgtaaaggtgagccgcagcctgaaggagctgggactggccgccgggcgcacccgagagctgctgggcagcgagctgggccgggaggccaccgtgaatgaggtagccgaacgcatgggccgggccccggaggatgtggcccaggccctggccgccaccacgccgccgctttccctgacggggggtgaggaggatggcagcgggcagatagacctgccggaggagggcccggaggagcggctgagcgatctgctttcgctgcagcagttgctttcctcgctggaggaacgggaccggcagctgatctttctgcgctactatcgcagaaagacccagactgaggtggcccgccgcctggggatgacgcaggtacaggtctcccggcgggaaaagcgcattcttcaatccatgcgtcagcagctccttgactgagccttcgcaaggcgcgggttcgggccgcaggccagccgtccgaaggacggttccgcagcgaaactgcggcgcccgccgcaggtgggcggg

SEQ ID NO: 1203 - DNA, 15228 bp, Unknown
  16S sequences of unknown bacteria
ttccggcatcggcgatgtggtaacggtagatggaaagccttgtgcaaaggtgatgtttgtgatcggtacgggcgaagggaaaacgggagagggctttaaggaacgcccaaaggattgggaagccaacaaaagactggcggacgccatcattgcagaactgaacacctatgcggaaggattgggcaagacgacgcgagtaaaaactggacgatacaatcagcacatggcggagaactgcattttgatcgagatcggccacaaccaaaatacgttggaggaggtcatgaatacggtaccatatattgccaaggcgatgaatacggtttttacccgtgaccttgacatccagccatactccgtgccatgataaaaggcgaaatcaacaaagagtgtgggtagagggatggaaaaaacagcaccgataggggtatttgattccggcgttggcggcctgggaaccctaaaggccctgcaaaagcagctgccgcatgaaaatttcgtgttttatggagacaatgacaatgccccgtatggcacaaaagagacggagcgtattcgtgcgttgagttttgcttgtactgattttttgctggcaaagcgctgcaagaccatcgtgatcgcatgcaacacagcgtcctctgcggccaaggaggagcttcggcaggcgtatgacgtgccatttgtggcgatggagccggccattgcgccggcaggaagggcacggaaagacggatgggtgcttgtgatggctacgccggctacattgcgccagcctttgtttgtatacagagttaaaaaatgcgggctggaggggcatgtgttgccggtaccatgccccaaattggtagagctgatagagcgaggcgctgtattgggagaggaaacctaccatgctatagagcaagcgtttttaccgtatggggataagcaggtagatgcgattgttttgggatgtacgcattttatccatgccaaaaggcagatacgtcagtgtgccgataccatatggcctggcgttcctttgatggatgggaaccaaggcacggcggtacagcttgaacggatcttaaatcaatatgcgatgcgcaatgagcagacaggcccgggaaagatagaattatgcacctcgggtgatccggaaatttatctgccattgtttgaaaccctgatgcggcaaggataagcggtatgaacagagctgaataggctctgtttttttatacggcttttaataacgcgtgcgctgggtgccggcagtggcaaatgcaggagccgtatggaataagagactgggctgggccggtctctttttgtttatggaaacataaaaattaggaaaagcccggcttacgcgtttaaaaaagcgattggaaaaagtgtgggaattacgaaaaaaaactttgctaagtagaaaaattctgctagtattacagtaaaggaacaaaaatgatatttacaaacataaaatatttcaaataaccaaaatgaaacttataaatttacagtgcgcagcactgtgtttggcaatctagtatataagggaggactggaattgaaaatctattccgcagagaacgttcgtaacatcgctgtggtaggccatggcagcgaaggaaagaccacgctggtagaggcggccctgttcaaagctggacatttggaccgtatggggcgtgtagaagatggaactacgaccacggactatgacccggaagaaaccaaacggcatatttctatctctacggctttggcgccggtagaatggaaagaaacaaagatcaacctgatcgatgcgccggggtattttgattttgtgggcgaacagctgcaggcaatgaaattggccgacgccgcgatgatcgtagtaggcgcaacgtccgggattccggtaggagcggaaaaagcgtttaaaatgagcaaggaagcaggcgtatcccagttcttctttatcaaccagatggaccgtgaacatgcagattttgccaagatactggatcagttacagcataaatttggcagcggcgtagtggcgttgacggtccctatcgtggagggcggcaaagtaacgggctatatagacgtgatcgagcaaaaggctatgatggcggatggaaaaggctatcaggcccagcctgtgccggaagagctcgtggactatgtggtagatcgcaggatcgagttggtagaggcggcggcggaaaacgatgatgagttgctggaaaaatattttaacggcgatacgctgagtacagaagaggtatttggcggcctgaaggttggcgttctcaatggcgatattcagctggttttgggcggctctgcgctgcagggagcgctgatagacaatctgttggatgcgattgtcgccctaatgccagatccggagcagcggcctgcgcagacagggaaaacggacggcggcaacgacaaagaagtgccttgccaggtgaacgcaccgtttgccgcgcaggtcatcaagacggtggcggatccgtttgtgggcaagctgtccatcttccgtgtctatgccggcacattaaaagccgggatgatggtgtataataccaaagctgaaaagcaggagaaaatcggtaccgtttatgccatgcggggtaaaaagcaaaacgatgtggtatggctgtccgcaggcgatattggcgctgtggcaaagctgcagtataccaatacaggcgatacgctctgcgatccagcagagcatataaccttcgatagaatagaatttccggaaccctgcatttccatggcgatctctgctaagaaaaaaggagaagaggataaggtattcggcggcctttccagactggaagaggaggacccgactttcaaagtggcaaaggacccggatacaggagaaacgcagatacgaggaatgggagagatgcacctagaggtcatcaccaacaagctgaaacaaaaattcggcgtggaagcagagctaaaagacccacaggtgccatatcgtgaaaccatccgcaaggcggtaaaagcagagggtaagcacaaaaagcaatccggcggccatgggcagtttggccatgtttggattgagtttgagccgctgctggagggggattttgaatttgtagacaaggttgtcggcggcgtagttccgcgcaactttatcccggctgtggaaaaagggttaagggaaaacctatctagaggcgtgttggctggatacccgatggtaggcatccgcgccacgctgtatgatggctcttatcatccggtggatagctccgaaatggcgtttaagaccgctgcacgcttggcgcttagaaagggctgcgcagaggcttctccggtattgctggagcccatcatgcgggcggaggttaccgtcccggatgaatacatgggcgatgttatcggcgatatgaaccgccgtcgcggtcgtatcctgggcatggatccgttgggcaatggagagcaggtagtgctggcggaggtgccgttggcagagatgttcaaatacgcaaccgatctgcgcagcatgacgcatgcgcatggtagctttgtgctgacgtttgatcggtatgaggatgtgccgggcaatattgcgcagaaagtgatcgaggcacgcaagagcatgcagggtgaagaggattgattttcctctgaaagaggccgctttttaggcggcctctttttttgagcgtagaggttctgcgccggctgtggtaaaataaaaaaaacgatgtttggataaaaggagaaataaggatgatcaccatcaaagtaccggcaacatcggccaatctggggccgggatttgactgtttggggctggcagtgtccatatacaacacagtggaggtagagccaagcaaaacgctgaagatagagatttttggggaaggatccgactctattcccaaaaatggttccaacctcatctttaaggcatataggcgtactatgcagcacctggaagagcctgtggtaaacctacacatggtgcagcataataagattccctctacaagggggttgggctcgtcttcgacggccattgtagcgggcattttgattgcttctgaaattagcggcaaggcaatcccgcgtgcagaggcgctgcgcattgcaacggaaatcgaggggcacccggacaatgtggcgcctgcgctgtacggcgggtttacagtatccatgcaaaaggacaagcaggtacgctcgctgtcctttgaagtttccaacgatttggtgccggtggccatggtgccgaattttgaattgtctaccgcgaaggcgcgtaacgtattgccgcagcatgtgccgtataaggatgcggtcttcaataccgcccatgccagctttttggcagcggcgtttgccaagggggatttagagcatctcctttttgcggtggaagataggctgcatcagccttatagggcagggctgattccaggctttgaagaaatcgtagcgtgcggcagggaaatgggcattcctgtttacctgtccggcgcagggccgacgatgatggcgctatgcagccgcagcaacgccaacgagtttgtcgtaaggagcaagccggttttggccaaatttgcagattgggaagtgcatgtcctagaggtggaaaaccacggtgcacaggtaatccgtacatgaaggaccggtatggaagaattgcgcaaagcctgattgcttggtttgaaaaaaacaaacgggatttgccgtttcgaaggaccaaggatccctatcagatttggatcagcgagatcatggctcagcaaacccgcattgcagcgctgattccatattttgaacgctttaccaagcagtttcctacggtagaagcattggctgccgcagaggaagaagaggttctaaaggcatggcagggcttaggatactatgcccgggcgcgtaacctacacaaggccgcgcagaagatggtggcggaatgcggcggaaaggtgccggagaacccggagcagctgcgcaagatgccggggatcggggcctataccgcaggtgcggtgctttccattgcgtatggacaaaaggagccggccgtggacggcaatgccacacgggtttttgcgcggatagaggaaatctatgaggatgtattgaaaccgcagaccatccggcagattacggatatcattcgggatatgatgccggatgggcaggcaggggcgcttactgaggcgattatggagctgggcgctctagtctgtctgccgcagacacctcagtgccaggtatgccctgttcgctgtgaatgcaaggcctatcagcatggcaaaacggagacactgccatttcgcagcgggccaaaaccgaaaaaagaggagcatcgtttaatccttttggctgaggacgaacaagggcgcattctgatgcgcaagcgaagcgaacggttgctgcataatctttgggaatatgtaaatctgcctgtgcagccaacgcagcaggcgctggatgcgctggggctgcaaatgctggaacaaagagaaatcggcaaggcccagcatgtttttacgcatatcatatggcatatgcagggcgtttacgccaaggtgcagaatgccccggttccagaggactatgagtgggtaccgaaggaggaaatagagaccaaggcgctgccgacagcgctgtccgtatttacaaagtggggtagaaaaaatctatggaaccaataaaaaagatccggtcttccagccggatcttttcattcgggaacaggttcgaagaaccatttgttttcatcgagaaacagcagaatttttcgattgcgtacacgacatagatagcggatgccacaaccgccttgttttcggctggcagcacgccggacatccagcacacggtcgatggcaaaggtgcgcccatccggccaaataaaggagaggggaaaaatttgcccagtttcatcaaaccgggcgattacaggcagatattgagccattttttacaaaaccccctttcgaaaggcaacggaatgcaaggagttttcctccagaggatcgatttttagctgcgtatcctgtaaagtgacggcgcgggcaatgctccaatgcccaaagcgatggcgcaaatcatcgatacaacgttccaattcggcgtttttctgctctttttgcgaaaaaatagaaagctgataggcgtctttttcaaaggacagctggctgacctgtacaccgatgctgcgtatgggagcaccgtcccaatgtttgtggataagacgaaaacaggcttttgccaaacgaccgctaacctgcgtgggagcgcccagctgaatctgcctggtttggctgcaaagatcggcatcccgaagccaaagatgaagaacctccgcacgaagatggctgagacgaagccgctctgctacacattcacatagcatatacacaacgggaacaaatgcatcggcatgcgccagattcttaggaagggtggtactgttgccgatggatttgacgggcggagactccccccagtacgccacaggcgcatattcatgccctagcgcatattgacgcagcgtatgtccccatttgcctaaaagggagcgcagtgtagtttcgggagcattggcaagatcgccgatggtatgaatgccgatgcgcgctagctttttttctgtaacagggcctataaacagcagcgcgcgcggagacagaggccagatgatggtttgtagagcagagggcggcaacgccgtaacggcattgggctttttcaattcgctgccaagttttgcaaaaattttattgtaggagactccgatggaaacagttacgcccaattcctgctcgatggtgcgccgtatttcttcggcaacctgtacgcccttggcaaaggagtccacgctgcctgttaagtctacccagctttcatcgatgctaaaaggctctacccgatcggaatatcgccgatagatctgattggccatgtgcgaaatccgatgataccggtcgtaatgcggcggtactaccacaagctgagggcatttttgccgcgattgaaacaagggctctcccgttttcacaccgcgggccttggcccactcattttttgctaaaacaatgccatggcgtttttcttcatcgccgcctacggccaagggcactgtgcgcagatggggctgatacagcatttccacagaagcataaaagctattcatatcacaatgcagaatcacacgcacaaaaaaacctccccaaaaagatataagaacatttgttcgcatatagtataacacacagaaacggggttgtaaagtgtaaaatcatcgtacgggaaaacaacaattgggaaatcgtatgagatgtggtaaaatgctcaggtagaaaaggagagaacacgttgccaaagcaagaatatgaaacctgcctgtacggcgcagagatgggaccaaaggatgccccgcgcatttgcctgcgtgggaagctggatgctttgcacgccaaggcagttttatgcgccacagacatagcggaacaaggagatatgcggctatcagtgcaggttgagcagattgcaaccatggcgctggcattgctggaagcggagtataaaggggaactggcggctttgccgctgctggatggcaagacggaggagcagatccattcggcctcccattttccggaaaaggcatacggcataccgcattttttcccaagcgtgcgcacagggcgtaaaattgcacaaatcaatgtgctgagaacggaaatcagagactgtgaacggcaggcagtatcggtatataaggatggatttccggcctttatccgggcattgaaccgtttatccagctatgcctattgcttgatgtgtgagcagaaagcaaaacaggaggaagaaatatgaaggtagggatttccacttcctgctactttaccaaggtaaatacggaggatacactgccgctgatccgaaacttaggggccgaccgttttgaggcttttctgggcggtatgtacgaatatcaagaggactttgccaagctgatggccaggcgaaaagatgatctagggcttacctgtaccaccatccatacgttgggcagccagtttgaacctcagttgtttgcggggcatccccgtcagcggcaggcagcgctggatgtgtttgaaatggcgctggtatgtgcaagaattctaggcgcccggtactatgtgatgcacggttcgctttttttaaagaaaaaggcgggccgcccaaattatccatacatcggagaacgatttcaaagtctgtgcgcgctggcggattcctatggagtacgcttgacgctggaaaatgtgcactggtgccagtaccatgaagtggggtatgcgaaaaacctgcggccttttttagaggattgctcgctgggttatacgcttgacgtaaagcaggcggctcagtctggttacccgatggagggctatctagaggaaatgggagaccgcctctgtaacctccatctctgtgatattacggagcaggaaggaatggtgtatacctccttgccagggcagggaaactttgattttgtgcatttggcggcgttgttgcgcgaaaagaatttcaatggcgcggtaacgatggaagtttatccagatgactgggaaaaggaaaacgagcttaggcagtcctttgcatttctccgcgctctgtttgagtaaaaataaacaaatttgcccagcatatcacgaacatgatataataaccgcaattcaaaaaggaggtaccaaacgatggtacgatatgaagatccggctttccaagcctcgatgaagatcaaattggatgtttccaatatgatggaagagattttgggagaaaagggattccgggctgagcagttgcaggctccgatttttgcgcagggcgccaaacagatgacggcgcaaaaggagcagatgggtttccgtcagcttccgtatacggacccggcgttgttggatgagattttggagacggcggcagacattcgcgaaaagtttgacgcgtttgtcgtattgggtatcggcggtagcgcgttggggccgattgccgtgcaacaggcactgaaccatatgcgatacaatgagctgcccgcagaaaagcggggcggtccgcgcttctatgtggaggataacattgaccctgctcgcatggatgcgctgtttgacgtcatcgacattaaaaaaacctgctttaacgtcatcacaaaatccggtagcaccagcgagacgatggctcagtttttgattatagcggataagctgaaaaaagcgggcgtgcctcttaaggacaacatgatcgcaaccacggacaaggccaagggcaacctgattaagattgcccagcaggaagggctgaaaacctttgtgattccggatggcgtaggcggccggttctccgagatgacaccggtaggcttgctgggcgcggcggtatgcggcatcgatatcaaggagctgattgcaggggcgcgctacatggacggcttgctgcaaagcgaaaatgtcatggaaaatatggcgtatctggatggcgccttgcagtatctgtgtatggaaaatgggatcaacgtatccgtcatgatgccttatgccgattctctcaaatatatgtcggattggtatgcgcagctttgggcagagtcgcttggcaaaaatattactcgagacggcaaaccggtgcatgtagggcaaacgccggtaaaatcgttgggtgtaacggatcagcattcccaggtgcaactgtatacggaagggccgtttgataaggtcgtaacgttcttggcagtagaggattacggtacgacggtagagattccgcatggatacgagaacattccggatgtatctttcctgggtgggcattcgatgaacgagctcatcagtgccgagcagtttgctacggcctacgcgctcaaccgtgcgggaaggctgaataagaccttcacactgccggcggtcaatgcatttaccattggccagctgttgtatgtattggaggtagaaacggcttatctgggtgaattgtataacatcaacgcttttgaccagccgggtgtagaagagggcaaaaatgctgcttatgcgttgctgggcaagcagggctacgatgaaaaacgcaaggaaatggacagtgcaccgcagcccgttgcaaaatacattttgtaagacgaaaaagccccttcgcaggggctttttttgtacaatgaaaatgcaaaaaaagagttttgattcgcatatacgatggataatatagaaacaggaggaaacaggatgatctcattacagcctgtaacaaaggaaaattatgaggactgttgcagattgcaggtagcaaaggaacaggaggaatatgtggcacccaacgtgttttcattgacacaaagcaaatatttgccggaacgtataccagtggccatttattgggataagacaatgatcgggtttggcttatacggcattgataccgaacgaaacgaaaactggatctttcggtttatgcttggcagacaataccaagggaaaggatggggtaagcaggcctttgccgcgtttttggaaatggtatgtacacgggctgggtatgatgcggtgtatttgagcgtaaacctagaaaatagaacggcgcagcacatgtaccgctccttcggatttgaggatatagggaagatgtattgcccagaagagaagatcatgaagaaaatgataggtgctaaaaaatgacagagtactatgcgtgaaattaacaatgctaagggaatagctatgatataatggagctacccaaagagaaaggtgggtggaaccatgactttgatagactggattgcgctgggcgttatgcttttgggtgtgatccttctgattgtagaggtgtatgcgccggggtttggtttgccgggcttggctggtctgctgttttgcgcggcagggattgcgatgtttgccgatacctgggggcaagctgccgccgcgttcaccatcattgctgtcatcgtggcggctgcgtttggatttaccttgtattctgcctcaaaaggacggctctcaaggtctaaactgatattaaacgacgctgtaacggaaaaagccggatatgcggattttgatgcattgggagactgggtaggaaagcaaggcgttgcaatttctccgctacgtccggcaggcgttgtagagatagaagggaaacggctggatgttgtgacccgcggcgaatttctggcagagggcgaatctgtccgcatcgcacaagtgcagggacggcagattatcgtgtgccgtatataaacacaagaaaggaaagggacatgtatttagaggatatgattgggccgattttgattggcgcggccatcttggttgttttgattctattttttacctttgtgccgctgcggttgtatatcagtgcgctggcagcaggggtaaaggtcaatatttttacgctggtgggcatgaagctgagaaatgtaaagcctgcccgcattatcctgccgatgatcaaggcaacaaaggcggggctggatgtgaccatcaatatgctggaaacgcattatttggcaggcggcaatgtagataaggtcatcgatgcacttattgcggcgcaaagagccaatattcccctggaatttggcaaggcacaggcgatcgatctggctggccgcgatgtgttgcaggcggtacagatgtccgtcaatcctaaggtgattgaaacgccgatcgtggcggccattgcaaaggacggcatagagctcagggccaaagcgcgggttacggtgcgtgccaatatcgataggcttgtcggcggcgccggagaagagacggtgattgcgcgcgtaggcgagggcatcgttaccacagtgggttcgtcagattcccataaggcggtgctagaaaatcccgatttgatttcccgtaccgttttgaacaaaggcttggatgcaggcactgcatttgagattttatccattgacattgcggatgtggatgtggggcgtaacgtaggcgcacagctgcaaatggaccaggcagaggcagaccgccgtattgcgcaggcaaaagcggaagaacgcagggccatggctgtggcaagggagcaggaaatgaaggcatctgtacaggaaatgcgcgctaaggttgtggaggcggaggccgatgttccgaaagcaatggcgcaggcgctgcgggaaggcaagctgggtgtaatggattattaccagatgcaaaatgtcatttccgatacggagatgcggcagtccattgccgatgcgggcaaggatgaaacgccaagtatggagaaataatctatggaagtaatcatcgttctattctttttgtttctggtttccagcttgggagagagcaagaagaaagcgaaacaaaaacgtcaagcagagcagcgggtgttccgccagatgcaggaggagctggagcgtgaacaggcagaggcggcgcggcgtatgagtgcaggcgagggcgaacagcaccaaacagtattggagagcgaagcggccaagcgtgtagcgcaggctgcagcacatcaggccgtagaggcagagatttatcgacaggttgcttttgcccacgccaccgaagagagttctgcctgcacggaagactggcaggaagaggtacgcctgcatgcacgcccgcggcccatgggcaaccggccgatggagaataaaacaccccaaggggccaaacgttataacccatatgccaaactgtttactgcagagggcgtgcgaaacggcatcatcctttcggaagtgctgggcacacgcggcgggcggtttggaaaacgtataggacggtaaaacgaggatccgggatgatttccggatccttttcttttacagcaagggacaaaaagtaggcaaactccgtaaaatatgatatgatgcttgaaattaggaggcccaaaatggcaattacggagattcggccggcggtgtgcatggcatgcgggcataagcagagcgtgttggatgtacgccaaatcaatgtgcagaaaagaccggagatcaaacaaaaaatattgcagggaacgctgtttcccatgcactgccgtgcatgcggcgcggtgctggaaaaggcgcagaattgtttgtatatcgatcctgcgctcccgctgctgttagagttggcagtgccgggagagccatgccgcctgcaagaggtgcaggaagggctgggggacacaaaagcgatcatccgggtggtgcgtacgccggaggatatggcggaaaagctgcgcattttcgactgtggattggatgaccgtgtcgtggagatcgttcgcctgttgatggttacgcagctaacggagcaggcccctgatcttttggagagcagcccgatattttctgcaccgcatggtgaaccgcagctgacctgcctgtgccgtgacggcagcgaacgggtctgcccgattaccagaaagctgcaatctgaaatttatacgcagtatttggcagatagggaggtacaagatacgttggtggtggatagcgcctgggtatatcggcttttgttatcgcagaaaggaagagcatagcaacgatgcaagcaaaagaagaaatggggattgtctgcccccattgcggccgcgtgcaaaaggtaacgcgctggcatttggtaaatttggaatctgaaccgttggcaaagcttagggcgtttaagggaaccctattcaaggtgccgtgcgaagcatgcgggaaaacgatgcagtttcactatccctgtgtatttttagatgaaacgcaccgcgctttgctgtatctctgcccggaggaggtagagcaggatacgcaaacgctttccgcgctccccccccaggaggggtataagctgagactggttcgcacaccggaagagctggcggaaaagctgcagattttggaatgcggcctagaggatacggtgatagagctggtaaaggtgttttattttatgcagttccatgcacaatacccacaagaaacggtagaacgtgtattgtttacgcaacaaccatcgccttgtatccgcatggtttgtaagagcggcaagacgtatgagattcccctgcagcaaacatattataaaaaagtacagacacagtatcaagaacgaatctggaagcgttgcggccagggtatgcagtgtatagatgctgcgtgggccagcggggttttggaactgtaagatgaaaatcattgacgcacatttgcatttttggccgggagagccatactttgatgaaattgcactggctgcagagcaccaaaataccgagaagcatctctatgagcagtaccaagcgcatgagattataatgggcattgttatgggcaatgatacgttggaaaaagaacggcatcgataccctccctatttacggtattgcatcggattggacagcaattttgctgcgcagcattcattgcagagcgcggtggatcaggtagaatggcatttacagcagccaggctgcgttggcatcaagctgtatccgggatattgccgcggttatgtatcggacaaacagtatcggccgtattatgaactggcgcgccaataccgaaaaccggtggcaatccatacgggtgctacagcaggtgcggaagcgtgcctgaaatacagccatccaatgacggtagatgagatcgcaacggaatatgcagacgtgcagttcgtactgtgccattttggcagcccttgggtacaggacgcggctgctgtgatggccaaaaatgaaaatgtggcggcggacctatccggccttttggagggatgcccggatctttctgccctttggaaggaacaaagcgcattttttgcctatctaaaaatgtggatggcttatttaggacggtatgacagcttaatgtttggaacggactggccgctggtgaacctgccattgtatattcgctttattcaaaggctagtgccggagcatgtctggaagaaggtattctttgataatgcaaaccgcatctatcagttgcatcttgataagcaatgagtgccatcgtatggcattgtgataacgcgccagatgcgtaaaagcagcggcgtgtttttgcatagggcccattaaaagatgacaagggaccaccgattcttctgtaaaatcgtattcatattgcttgacaaagcaatgatgaggagtaaaattgagttagaaaaagctaattaaagcataaaagcttactgataaaattcgtagaactagagagttttgctgaatttacgtaaaaatttctaa

SEQ ID NO: 1204 - DNA, 1743 bp, Unknown
  16S sequences of unknown bacteria
tgctggtgcgcaaccaggccgtggacaaccagatcgccgttgaggatgtgcgcagccgcatccgggagaatttccccctggcagcgccgaaatttgaggaggctctggccgagaccggcgtgcgggaagacgaccgcatgaccgtaagccccgcccgcatacgcaagctggaaagccgcagctttaaaaccgaatccggtatcgagatcaaaattccggcagagttatgcagttccgacgatgccgtcgagtttatccattcggccaccggcgggttgagtttgcttatcaaagacgtgctggtgtaaattttgcataggaaaagggagtctcccgtggatgggaggctcccttttttattggaaatttaagagataaacgatgagaacaccgggcagaggatggcggtcatgacgccggcgacggcgacggccaggccgctcatggcgccttcgacttcgcccatctggagggctttgctggtgccgacggcgtgggctgcggtgccgatgccgatgccccgggcgatggggtgggtgatgtggcagaccttgcagaccgtctcggccatgagggcacccaggatgccggtgaggatgacgatggcgccggtcagggctgcgatgccgcccagctccttgctgacatccatgctgatggctgtggtgaccgacttcggcagcagggtgatgtactggctgtggtccagcctcagcagcagggacagcaccagaacactgcccaggctggccagtgtgcctgccaaaatacccatgacgatggcaagtacatttttgcgcagcaggtcccatttttcgtacagggggaccgccaggctgaccgtagccggcagcagcaggtaattgactggcgaggcgctggccttgtaggacgcgtaggggatgccgcagacgcttaaaaacacgatgacaaacaccgtgcccagcagcagcgggttaaaaacagctttacccgttttgtggttgatgagggtacccagggcaaacgctgccagcgtgagcagcacgccccaggtggctgaggtggacagaaaatcattgagcatcgtcatttgctaattcctcctccagttcgggctcggccttggcgaaccgctgggtgacacggcccgccgtggccatgaccaggaaagtgaccggcaccagcgcgatgagcaccggcagcagcatggcgtgaagctccgcccacaggtccatgacgcctgcggcggcggggacgaacagcagcgggaagatgccgatgaggaacagcgccgccgtgcgcacctgttccaatttgacccaccccagtttgagggcggccagcaaaagcagcaggccgtagacgctggccgggatggggaggggcaggaagttatagcagagctcgccggcgaagcagaataccataatgcggagaaattggaaaataagatccattttggataccttctttgtgtggagatgaatgggggaccatcgggaaaaatgggcgcacaaaagccgccatcgggtgtttggaggaagtgagtcccgacagcggcagtggataatttatttgtgaggaacttaataagcagagaacgagaaagcgcgaagtagaggccgcgctaataaaggctaagtagaggtttattcagcggcgggctggtcggggcggaccatctcgcggacggcggagacgatgttttctgccgtcaggccgtagtcacgcaggacttcggcggcggggccggagtgaccg

SEQ ID NO: 1205 - DNA, 22133 bp, Unknown
  16S sequences of unknown bacteria
ggagcgcctgctgtccgagcgtgtgctggagcactgggcgcgcgcggcgagcctgcggggcttgcccgggctgccgggcgccgcggggcggtccggcgcgcggggcgctgcggtgatggagccgccgcggatcgcgcaggtgcggcagggcgacgtgtaccggcagagcgcttaccggacggagctcgcgctggcgcaggaggaaggcggcgaacggccggagggcttcggctccgcgggccgcagccccgccgcatccggcgcaggcggcctgcgcacgaccctgcagcgggcgctggcggcggtggagcggcgggagcggcagctcctgcggcccacgggctatgcgccccttcgcccggcaatgcgggagatgcgcagccgggcaaggcctctgcgcacggcggtggaggggcaggcgggcatgacgcgcctggtccacagccgccaggagcgggccgagcgctcgacgctggaatggatcgccatggcgggcgagggcagcctgcgcccctcgatcctgacctccccggcggagatcgtgatgctcacgccgccgacgcacatgaacgcctacggcgcgcccgcgccgcgcgtgggcaacctgagctgggacgaacagccgggcgatgcggaccgaaacagcggccgcgcggcggtggagctgctgcgccgggcgcagcagaaattcggcgcgcccgcgcgctaccgcccgccggagatggtcctcaaggagaagggcgaggccacgggccggctcgccagccaaagcgccggccaggccccctccatcaaccaggagatgcgggcgcgcaggcgcgtggaggaaaaggtccagacccaggagctgagcaacgcggagatcacgcgcatcgtggaccgcgtctaccgcaagctcgaaagccgcatcgcgacggaataccgccgccggggcatgtaaccggcggacaagggccgcagagtccggcccgcaggagaggagggagcgcccgtgatcgccacgtcgctcgcgctgaaaaaggcgaagctcaagtccgagaccggggacagcgtgaccgtgctgttcaaccccgatgaatacaccatctcgcgctcggtcaactacgccagccacaccgtgccggggctggacatccccatcgcgcagttcgtcaacggcacggcggacacgctcaacatgagcctgttctttgacacgtacgccgcgcccgagggcggggacagcgccacgcagctcaagctcctggccgcaagctccctgcccgagaaccagaagccggacgtgcgcaagtacacgcagaaggtctacggcatgatggccgtcaacggcgacctgcacgccccgccccgcgtgaccttcgagtggggaagcctgaagttcgagggcgtcatcaccaacgtgctgcagcggttcaccaagttcacctacgagggcgtgcccgtgcgcgcggtgctggaggtcaccttccagtcctgcaagtcctcggacgcgcagctccgggagatgccgagaaactccccggaccgcaccaagtacaaggccctgcgcgagggcgaccggctcagcgccatcgccaaagaagaatacggcagctgcggcgcctggcggctcatcgcgcaggagaacgggatcgaaaacccgaggaccctgcgctcgggcaggaccatccggattccggcgatgctgccggaggcagaggaatagggcagcgcaaagaaaaccggagagaaagggggcatgcgcatggcggactacgattccctgcgggagaaataccaggaattccgcgtgccgcaggtggcggtctacgtaaagaatcagaagatcgacctgacggcataccacctggcctccgcgaccgtggacgcgaccgcggagaacgaggccgccggcgtgtgcgagctgctctttaccgggatctacgatctgaagaactcctgcgtggacacaaagctgctcggcgcgctggaggtcaaccagacgctcgaggtgcgcatgggctacggcacgccggtctgcgtgttctacggcaagatcgacggcgtggacatcgacttttcctttggggagagcgggccgacgctgcgcgtcacgggcatcgacgccaagggcctgctcatgaaggcgcgcgaggacgagagcaagaacctcgagtccacaaaggaggtcgtggagtccatcctcaagcagtgcaagaccgacggcgcggcaaagagcgtccgggtcgggaacctgctcaagttcgagacgccgctgcggcaggagaagacctcggacttcgacttcctgtgcgaggtggcgcggctgacgaacgcgaacttcttcgtctcctgcggggaggtccactttgaggacgtgctctccaaggtggacaagtgcatcaccctgaagtggggaaagagcctgatgcgcttctcccagtcggtcgacctctcgcgccaggtgagcaaggtggtcgtcaccggcgcaaagaaggaggagaccgagcccgtcaagggcgaggccacaaaggtgaccatggcgggcagcggaaagctcgccgcggacagctaccagaaggtcaagcccgagcaggaggtcgaaaacgccctggccacgaccgaggccatcgcaaaggccatcgccgaggcggagctcaaccacatcgccatgcactttgtcacctgcacgggcacgtgcatcggcctgccggacatcgaggtcggcaagtggatggccgtggaggggctgagcgagtacgtggactccacctacttcatctacaaagtgcgccacatcttcgacgaaaacgggtacctgaccgagtttacgctgaaaggagcgagaacgccgaaatgagcatggacagaatcttctccggcgcgggccggcccgggggcgagagcgcgggcaacggcaggcgctacggcgtggacatggccaaggtcaccaacatcgacgacccggaaaagctcaaccgcgtcaagtgcaagcgcatcacctcggacccggacgtgggcgagacggactggatgtacgtctgctcccccctggccgggacgaactacggcctgtacatgatgcccaaggtcggggacctggtgctgctgtcctacctcgggggcgacgtgcaccggccctttgtgatcgggtcgctgtggacaaaggacgtcgccgccccctacaagatcgagggcggcaagaacgagacgttttccttccgcctgccctcgggcacggaggtcgtcttttccgaggcgagcggcaaggagagcgtcaccatcaccgcggccaccggcgccaagatggccctggacggcgagggcaagaagatcctcgtcacggacaaggacgggaaaaacgccctgacgatggaccttggctccggcgcggtgaccgtgcaggcggacaagaagctcacgctctcggcggggacgaacgcgagcatcacgctcgacggcgcgtccggcaagatcaccgtaaacggaaagaccggcgtggacatccagaccgcgcagctcaaggccgaggccagcggcacctgccagatcaaggccaacgggcagatgagcgtggaatccagcggcatgacgcaggtcaagggctcgatgctcaagctcaattaggaatgcaaacgggcaaaggagggcgaacatggacagcaagtcgtttctgggaaggggatttggcttccccttccgcgtggaggagggcacgggcaagatcgccatggtctcccacgaggaggacatccgccagagcgtggagctgatcctgcacacctaccgcggggagcgcgtcatgcggccggacttcggcgcgcgggttgcggactacctgttcgccgagaacacgaaggagaccggctttgccctggagagcgagatctgccaggccctgatcgactgggagccgcgcatcgacgaaatcgaggtcgaggcgcaggtggacggcgcgcgcgcggccatcaccgtctccatctcctaccgcgtgcgctccacgaacaacatgttcaacgtggtctatcccttctacacgctggaggggacgggaatggagggatttgacgcatgaggaagacgcccatcctcgacccccgcgacgagcaggccatcctggaggagatccgccgccgcgcgcgcagctacgtgccggagtggagaaacgaccccgacgacatggacggcggcggcgcgctggccgcgatctttgcgcacatgttctcccagaccgtggaccgctacaaccgcgtgctgcacaaggactacatcgagttcctcaacctgctctccgtgcggcagaagcccgtcacgccggcgaccggctacgtcgccgtggagatcgccccgggcacggaggaggccgtggagatcccccgcgacactgcgctcttccacgacggggaggacggcgagcgcgtgaactaccgcacggatgagacgatctttgccacgcccgcgcgcatcgtgggcatggtcaccgtggaccccgcgcaggacgccgtggccgtgcgcgaggcggggcaggaggccttcgacctcttcttcgtgcccgaggagcacaaccgccagcgccatgccttcgtcctccgccaggacgaggcgctgcgcctctcccggccggcgaccatccgcgtgcaggtgggcgacagcgcgttctacctggcccagcagaccgccgggcgcctgagcgaccccgcgttcgccgcctgggaataccgcgcgcaggggcagtggcgcgcctttgacgcggcagcggcggacggggactgcgtggtgctgcgcaaggacaacgcgctggagatcgagccctgcccggaggacgagggcgaggaggtcgccggcggcgcgtgcatccgctgcaccatgcgccgcgccaaggagggcacgcgcatcacggtccgctcgctgcgcgtgcagagcgcctacgccgagggcgagacgctcccctgcaccgaggcctacgccaacgacgtgcgcgtcgacgccgagcggggcggctactgcttttccgacaacatgatgccctacgacgccttctacatcgccgcggacgaggtgctctgcaagcgcggcgcggacgtcgtgctggagatggacatgcacaccctggtgcgcaagtccgaacaggagcaggcgctctacgagttccgggacaagatggtcatcgagaaggagcccaatcccccggagccgccgcggcgctacgtctcggccgtggcctgggagtactggaacggcgtgggctggacgcaccttgcggtcgccggggacgaaaacccctttggcgaaggggcggagggcacaaagcgcgtgaccttttccctgccggaggacgcggcggcgacgaccgtgggcgcggtggagcgcatctgggtccgcgcgcgcgcaaccgccgtggagaacgccttcaacctctacgcgacgcggctgctgccgttcgtgacggggctgcgcctctccttccgctaccgcgcgccgcggcccgtgcaggcgctcgtggcgcagaacaaccttgcgcggacggcctttgcgggcggcgagggcgaggtgggcgccacgctctacgcgccgctgccggacgcgcagcccgcgctctacctctgctttgacgcgccgcccgcgggctaccccgtctccttctactgggagatgcaggggcggacaaagggcgcgcgccgcatcggggtcgaggcgttcctcggccgggacttcgaggaggtcccctttcaggacggcatggaggactgcacgcacagcggcgtgctcaagtgctacctgccccgcctgctgcagcggacggaggtcttcggcctttcggggtactttgtgcgcatcgtggaccgcacgggccgcgcgcgggaggaccacccgcgcatccgccgcatcgtgcccaactgcgcgcacgtcacccagcgcgagcgcgcgccggaggagatcttctccaccgagatccacgagtccggcaagcgcctgcgcctggacgaggggccggtgctggaggccgaggtctgggtcgacgagctgcccgcgctcagcggccaggaggccgaggcgctgcgccgcgaagcgccggagcgcaccgaggcggagtacgcgggcgacgggcggctcgaccgcctcttcgtccggtgggagcgcgtggagtccctggcgctgtgcggcccgcaggaccgcgcctttgcgctggacgcggaggaggcgcgcgtggacttcggcgacggcgtgcacggcgcaatcccgcccgcgggcgaggacaacatccgcgtgcgctactcctttggcggcggccggcgcggcaacatcgccgaggaccagatcaccggcatcaccaccgcggccgcgggcatcacgcgggtctggaacttcctgcccatctgcggcggaaacgacatgcagagcgtggagctggtcgagcgcctgggccccaagcgcctgcgccaccggggccgcgccgtgacaaaggcggactttgaggcgctggtgctggaggcgttctccgaggtgcgggccgtgcgctgcttccccaacacggacgagaccggcgcgcaccgcccgggacacgtggcggtggtgctgctgaccgggaactacgacagcgaggcgcacaccatcgccgtgtgcgagcaggtggagcactacctgcgcgcgctgtgcgacagccgccttgcacgggagggattgcacgtcctgccggcgatggtgatgaccgtaaacgtcaccgcctcggtcgaggtcgacgccccggacaacgccgcgcaggccgagcgcggcgcgcaggaatgcctgcaggcgctcctggaccccttctgcgccgagcggggggagaaccccatcggcgcgctgccgggccttacggacctgtacgccgcgctgcgccgcgtgccgcacatcctggccgtgcgcgacgtgctcctggagggcagctactacgactacaaccggagccgcgtcgtcgccctggacgtgggcagctcctatccctttgccgtgccccgcagcggccggcacgtcctgcgcatctgaaaaattaaccggtaagaaaagcgaggtgagcccatgctccgcaccgaaaacctggacgaccagacctttgccgaaatcgtggaggaggcggtcaagtccatccccacggtctttcccgagtggacggaccacaacgcccacgacccgggcatcacgctcctggagctcttcgcctggtacaaggagatgcagcagtatcacctgaactgtccgacagagcgggcgatgaacatgtatctgaagctgctgggcatggagcgcggggacatcgcgcccgcgcgcgccacggtctgctttccgttcctttcgggcgagatcgccatcacggcgggggacgagatcgcggcgcccggcggggcgaccttcacatttgacgaggacgcgcgcgtgggcggcgaccgcgtggaggccgtctgcttacagcggggcgaggaggtcacggacatcacggagctcatcctgcgcgacgggatgaagatccgcgccttccagggcggcgcggcgctgtggatcggcctgcggcgcgagggcggccgggaccaactggagctgctggtgacgctcgccgacgactacccggttgcgcgcaatccctttgccccgggggaggaggccggccgcagaatccgcgccttcggcggctccgggcgggagctgcccatcctgcgggacgagacgcacgccttttcgggcacgggcgtgctcgcgctggacgcatccggggagggggagacggaccccatcggccgcggcagccgcacctgggtgcgcatcgagcaggagcggcccggctgcgaggaggagccgcagatccaggacgtgtgcgcggcctttgcccgcgccacgcagcgcaaggcgcttgtgcgccgcagcgacctctttgcgcaggggcggcgcgcggccgtgccccggcgcacgctgctggagcggcaggggcggtgcttcctcctggcgcgggacgaatacggctggcgcgcggtggagcagatcgactacgcgcccgacgccgtcacggcgcagctccccttcgaccccgcagacgacgggcagcccaacctgcgcgccgtgttctacgaggcgtggatggccccgcacctgaccgccgacggggaggggcagagcggctttgcctggcccctgcccgtggaccagcaggttccggacgtcgcgcgcgcccgcgtgatgggcaaggcgcgcacaaagggcggggaccgctacgtcgagtggacgtatgcgccggaccggaacgcgctgacgccctttgaccgctgcttttcctttgacccggagcagggcgccttcacctttggggacaacgagcgcggggaggtcgccccgcgcgggcgggacgcgctgctgctgacggacttttccctgacgatgggcgcgcaggggcgctttcccgcggcaaagaccctgctggtcaacgggagcccgaccgcggtgcgcgcgggcgagttccaggaggggtgcgaccgcgagagcgcccagagcgtgcgcgcgcggctcatgcgccggctgcgggagcccgcgcgcgcggtcacggaggcggactacgcggcctttgccaagcagacgccgggcctgcgcgtgatgcaggccggggccgtggcgggctacgaccccgaccggcccatgggcgcggggcggtgcgtgacggtggcggtgctgccctacagcgccgggccccggcccctgccggacgcggacttcctggcaaaggtacaggcgcagctggactcggtccggcccatctgcacgcgcgtcaaggccgtggccccgctctacatccgcatccacatcagcgtcacggtgctcacgcgcgccggcgcgcaggacgtggaggccggcatccgccgggccgtgcaggcctgctttgccagcgacgagaatggctggcgcctgggcgaccgcatcaccgagggcgagatcgccggggcgatcggccaggtgcgcggcgtgctcggggtcaagaccctgctgatgacggccgagagcgcgcgggccgggcgcacggaggcgggggacatcgttctgccgccgcacgcgctgccggagctcggcgcgctggaggtctaccgctagggggagggaggagccatggatacctatcttgtcatcaaccgcaggagcgactttgcgggcgggctgctcgtgaacctgcgcagcgagggcgaggggctgacgctgcgcgacgccgcgggcattgcgcggggctgcgcctaccttccccggctggattccggcaggcgggacttcgcttggacgcgcctgacgctggacctggacgcgttcgagggcatggtgcgcgtcgcggcctttgccgcggacaacgacgtgctgcccgaggcggggatgccggtggaggactacctgcgcgacccctttgtcgcgccgagcgtcaaggcgagcaccgtggacccgctctacaccaccggctttgtcgacgggcgggacgtgctgctgggccttcggggccggtatttgtatctgaaaatcgaaatcgtcctgacgggcgggccgccgcccgtgctgcgggccgtgcgcgcgcgcctggccggcgaccacatgctggactacctgcccgcggtctatgcccgcagcgacaaggacggcttcctgttccggttcctgtcggtctttgacgcgatggtcaaggacctggaggcgcgcatcgaccacttcgaggagaacctggacttcgacaagcagagcggcgagcggctgcaatacctggccggctgggtcggggtcaacgagccggaggcggacgacgaggcgctgcgggaaatcgtgcgcggcgcggtgcgcggctatgagcgcgcgcagacgccggaggggctcaaggcgcgcatcgagcgcatgacggggcaaaggccctacctcgtggagcacttccaggtcgagcccatgcagaagggcggaaaggacgccgcgctctacacgcgcctgttcggcacgcaggagaacgcgttccacatcctgctgccggagcggtgcttccgctccaaggaggcggcaaaggaattcctcgacaagatctcccaggtcattccggcggacacggaggcggagctcgtgccgctcaaggacagcgtgtacctggacacgcacacgtatctcggcgtcaactccgtcatctccggccacaccggcgcggcgatcgaccgcaaggccgccattcagtacgacaccgtgattggaggggaacagaattgaagaacgcaagcatttttccgctggagcgcaaccgctacttctacggcaagctcctgaccgtgcgcgactttgaattggaacagacctatatgaacaacaagcgccgcctgatcaaccgcgcggtgctcggcgcgggggtcgtgtgcggcctgggggtcacgcaggcggacgattacaccctcctggtggagagcggcctggcgctggactatttgggccgggagatcgtggtcgactcccccgtcgtgcgcaggctgcagatgctcgagggctacgaggcgctgggcagcgcgccccagtgctacctctgcctgaagtacgcggagcgggagacggagccggtcggggtcgtggccgccgaggcgcaggagacccagttcaacaagaccgaggagggctaccgcctgtacctggacgtcgaggagccggacatcccgcgcctgctcgccgccgcggggtatgaaaacgtgagcctgctctaccagagcaaggacgtgaccatcgcctttgccatgccgcaggcggtgctggcggacgaggacttctccgcgcgcctgctggtgctcaagtcctccgtcacaacgcccgtgtcgctggacctgacgctggagagcgaattcttcaccggcgaaaatggggacgcgcacatcgcctacagcttcaaggaaaacccgctcgagcagcggcacatccgctccctggagctgaacctgcacgcggcgaacctggcgggcgtctccgcggacctggcgccgggcgggggcctgatcaccgtgcgcctgggcgacgccagcgagcaggtcgccctgcgcctgcccgccaaggcccagatctgcggcagcgaggaggagctgcgcgccttccgcagcgtcaaggacaacctgcgcacccgcctgcaggcggacgacctgccgatgtacctggccaagatccagctgctgcccgcgggcgcgatgaccatgatcgggtcggtgacggccctgccctttgaccagcggctccgccgcgcccaggggcgcgagtccggcgcgggccttgccccgctcgccgtcaccagcgaggtcgaaaccctcaagagctggcaggagccggaggcccaggcccgctacagccacgcgacccagtccctgcacttcaagttcggcatcccgcgggcgcaggactacgactacgccacctcctccggcgtggtggagatccccatgtccagcggcctgcgcgtcaacgcgcgctacatctccgaggagattccccacaacctgggccttggcaacgtggacatccgccttgcggtggagttcgaggagggcggggagaaggcgcagttcttcggcaaccgcgaggtgtttaagtcccgcgccaccgccgcgccgcaggtgcagactgcggccatcctctacccggaaaaggggaccttcaaggtcggcgtgtggctgctggacaacgtggagggctcggtcctgcgcgtgcgctactacgcctccaaggtcacgcgggacctgcgcgcggtccagaaggaggaggccgtctcgatccgcatcgttccggaggtacagcgcgtgcccgcgcgcgggcggctgcacctgaaggccgcggtctacggctgcgacgaccgcgaggtcctctggtccgtcaaggacaagaacggcggctccatcgatcagaacggcctctaccaggcgcccgacgagcgcggaacctatgagatcgtcgccgcgagccgctacaatccggaggtcaaggtcagcgcctttgtcatcgtggaggagtaaagtcaggaagggagcaagcggaagatgcgcaacaacatggcgggcgcggggcgctataagctcatccggcgcctgcgggcagcggaagggtacgaggcgtattccgccctggacatcgaggtttccacccggccgcaggtgctgctgaacatctactccggcgcggaggccatccgccggatggtccccctgttctatggcatggacgcgggcgtctgcccggactttgtccgcgtctacacggaggacgcgcgcttcaccgcggtctttcgcctgcacgagggcgaggcattcggcgcggtctttcctccgcgcggcgcctccctggagggcggggagcgcagggcgctggccgaatccctgctgcacgccgcgctggagtgcgcggccatgccgccggcgctgctcgtccccctgctccgcgaggaaaacctcgccgtccgcaaaaaggagcgccgcatcgccctgaactgcatccttccgcccgcggcgggcggcgcgcccagggagggcgacccgcccagggagggggacgcccccagggagggggacgcccccggggagggcgacgcgccccttgcgctgtcgcccctgctggagcgcgtgctgcgcagaccctggcgcgcgccggacgagcagatcgacttcctggaccgcgccgcgcaaggggagtacccgtcggtcggcgcgctgtactccgcctggcgggcgctgcttccgctgctggaggcggacgaggcgcgcacaaggctcctggagcgggtgttccggttcctcaagcggtccttccgccgctggcgcaagcgccgccgggcggagcgcgcgaggaaaaagcgcctgcgcgaagaggcgctctgaacgaagatggagagaaaacgacccgaaggcccggagcgccgcgcgcgccggcgcagacgaggaggaaataggccgtgaaaaaagttggcgcattcttgctgatcctcttgtgcgtgctgacgtgcgtcgtcacgacgctgggggactacctgtacggggccgtctttgggcagaccaacgaggagacggcgggaactcagtacgccctgtccatggacgaaaacggcatcgtctactacatcgagaacgtggacggcgccaaccacatcgtcaaggtggacgaccagggcaacctgatcgtggacgaggagctccccgtcctgacggacgcggaccgcttcgtcgtgcagaacatctacgtcacaagcgacaattacatctacgtagcgggctttgagatggacctggtcaaccgccaggcctcgcgcgcgatcctgatcgccctggacgagaacggatcgctctacgccacgccctacgaccgcaccatcgtgcccgagggcgtgcgcgccccgcgcgacggcgccatgtttgccgccatgagcgaggacgacgaccgcgtctactttgcctacctcaacgaggggcaggcggaggtgctcgcacacgaaaagtccgacggcagcgtgacgaccctctcctatgtggacgcgggcggggagatcacggccatgtacgtcacggccgaggggcggctcgtcaccgcggacgcgcagggcgcgctgcgcctctcctccgccgacggcgcgcgcatggaggcgctggacgtgggccaggtcttcaccttccgcatgtaccacggcagcgggaacacgttctactatctggacgcgcagaccgggggcgtgggccaggtgaacctggcgcagggcagcgacgccgccatcgtctccggggagatggacttgggcggtggccgcgcgttttcggactttgcggaggtggccgtgggcgcgcgcggacagcttgccggcatgctctacgacgggggctatgcggtcttcaccggcagcgagtcgcgcatgacgcagagcccggccgcgcgccggtcgagctttgacacgggcaagctcgccgcggcggcgatcctggccggcgcgctgctggtcacggtgctgctctgggacgtgtactgcaacgtgctcaagatgcgcgtttcggtcctggtgcgccaggccgtgctcatcggcatctccttaatcatcctggtctatgtgctgctgcagttcatcctgctgccgcagatggagaacaccgtgacagtgcagtacgagcaccaggtgagcaccgcgggccgcgtgctcgcggccgaggcccggaacctggacgaggcgggccgcgcccaggccgtgcgcagcgcggaggtctcggtgctgggctcggacggggcggagatcccggtctacttcagcctcatccgcgcggacggcggcacaaagatgctcgaggcgacgaacgagagcggcatcagcggcgtgacttgcaacgccgttcccttgggcgcggacctgagcgcggcggtggagcaggcgctcgcgggcggcgaggtgctgctgcgcttccgcgacccgctgggcgagaacatgtacgccctggtccccgcgggggagaacctggtggtcgttgcgggcatgagcgccgccaacgtgggcgcgtcgctgacggagctgttccgcagaatccagctcttcctggtcgcggcgtgcgcggtgctgtttgcggcgctgctgggcgtggagagcctgacggtgcgctccctgcagcgcctgcgccgcggcgtggacgcggtcagcgcgggaaactacgacgtgaccatcgacgtcagctccggcgacgaggtggaaaacctcgcccacgcctttacggccatggcgcacaagatccgcgacaacacgcagcgcctggaggacgtctcccgctcctactaccggttcgtcccggagaacctcgtgcagctcctgggggagacgagcatcgagaaggtgggcaagtcctcgagcgtggaaaaggagatgacgctgctgcggatgcacttcaccttcgcggatgcgcgcgtgggcgattccacaaaggagctgttccgcaacatcaataacgtgatcgagcacctctccccggtcgtgacggagaacgggggcacggtctatgactttgacgccgacagcttcgtcgcggtctttgcgcgcagcgacgacgcgctgcgcgcggccctgcgcatccgcgaggcggccgcggcgctggacgcggagcgccgcgcgcagggcatgtgcgccgtggacgtgcgcctggtgctctgcggcggggacgtgatgctcggcatcatcggcgacgaaaagcgcatggccccggccgtggtctcggacgtggtggccctgtccgagcgcctgggcgcgctgcagcggccgagcgccgtctacatcctgtgcacgcaggacgtggtgcagaacgccgcgcgctaccggatgcgctgcatcggcaggtactgcgacggcgggcggcagctcacgctctacgacgtctacgacggcgatccctacgcgctgctcaaggtcaaggagacgatccagccgcagtttgcgcaggcgctggccgcctacgagggcggcgacatggcgcaggcgcgcctgctgttcctgcagatcgtcaaggcggcgttcgacgacggcgtgtcccgcaactacctctattgcgcggacgcgcacctgcacggcaacggcgcgccgggctaccgcacgatgtagcccggcgccgcggctgccctcgagttggtcaaagcggaggaaaagacattgtttaacgcactctatcgctccatcctgatggtctggcggatgctcaagaacgccgtgctgcggccgttccgctcgctctatgcgcgcgcacgcgcagccacgaacctgagccgccaggcctccaagctcgtgcccaaggtggtcaaatccgtcaccaccgtcaaggtcaagcccaagaagcgcgaggactacatcgatgccgggcccgtctacgtggcaaagtcgctcatcttcgtggtgatcggcgtcctggcggcgctctggctgctggtgcagttcctcatctggccctggatggagagccgctggttcaccgcgcgcatctacgagctggacgcaaaggccgagacgtatacgggccgcgtcgagctctactacgacgaggcgctggagaacctttcctttgccggcaggctcgagaacggcgtcaagaccggccgcggcacggagtaccacgaaaacggcgtcgccgccttcgaggggacctttgcggacggcctgtacacgggcgagggcacgctccgggacgaagcgggcaacgtcctgtacgagggcgggttccaggaagggctctacgacgggacgggccgcctgtacgcggacaacgccctggtctatgaaggcgagttcgcccaggggctctacgacggcgagggcaagctctacgagggcggccagctcgtctacgaaggggactttgccgcgggccagcgcacgggccagggcaaggcctacgaggacggcgcgctcgtctacgagggcgggttccaggacggcctgtacagcggctccggcaggctctactatgcggacggcacggtccgcgcggagtgcgcgacctttgcagacggcctgatcgacggcgcgtgcgtgctctattacgagaacggacagacgaagtacgagggcaccttctcccagggcgaggcctcgggccagggaacgctctacgccgaggacggaacgcgcacctactacggcgggttcgaggcgggcctgaagtccggcacgggcacggactactaccccagcggcgccaaggagtacgagggcgccttctcccaagggctctacgacggcgagggcgcgctctacaacgaggacggaaccctccgctaccagggcgggttctcccagggcgtctactccggcgcgggcgcgctgtacctggagggcggcgcgcgcgtcgaggggacctttgccgcaggcgcggtcacgggcacggcgcgctattatgagggcgagacgctcgtctacgagggcgcgctcgcggacggcaacgcgcagggcgcgggcacgctctatgcgggcggcgcggcggtctacaccggcagctttgcgggcgggttcctcgacggcgcgagcctgctggacatggcggtgacggacctccgggagacggtctttgccgggacggaattgacggaatcccgcgcggacacgggctttgtcatcgacaacccgcttctgcaggccgcggtgttctgcaactacggctacaacgacgcggagatcgtggtgcaccgcgtttacctctacggggagagcctgacctcgcgctttgcgggcggcgcgttcgtgccggcggaagggtatgccggcgcgcgggagacgagcgagacgcccctgctcatcccgggcgttgcggccacggcccagacgagccacgccgtcacccgctacgactacggaacctacacgctgcgcgtgtggacggatgcgcagggcgccgtggacctgatcgagtggcgctccatgcgggaccttgcgacggacagcagcgggaccgcgggcgaggccgacgccgaggccaacatgatcgacggcctgctggcggatctgggcctgggcacgagcacggacagcgcgaccacagacgacacaaccgcggacagcacaaccacagacggcacgaccacagacggcacggccgcggacgacagtgtgtatgacggccttgggaccggaggggaggcgatcacgcagtgaagggaacgggaaggcggctggcggcgctgctgctcgcgctgctgatgctcctgccggttcgcgccctggcgaccgggacggacgcggcgggcggaaccgcggaaacggcagaaacggccgactccgcggcaacggccgcggcggaggagacggccggcacggactatgcggacgtttcggcgctgcttgcggcctgcacggaccgtcagctctccagccgcacggcgctcgtggacgccctgcacgaggtggtgctcgcgcagatgaacctgtccatccagcaggacgcgctggagcaggcgcagagccagcttgcggagctggaggagcagtacctgatgggccttgtgcagcaggcggacctggacagcgcgcaggacgcggtggacgacgcgcagggccaggtcgacaccgcgcagctggagcacctcaagctcgtctcccgcgtgcggtccctgaccgggcaggacatcagcggccagagctacaacgcgcaggacttcttcctgacgctcatgcccgcggagatcacgcttgaatccctgcaggacgccatcgtcgcctacggcatggccgaggacgtgcagcaggccgtgcaggacatcgagcaggactacatcgacatcacgatcacctattccgaggtggcaagcgcggccgaggactacgcggacgccaccgccgcgcgcgaggaagcggcccaggccgtcatcatgggcaacgcgacggacgcggactttgcccaggccacgcaggagatgcggcaggcgcggctggcggtgttcaccgcgatctcggactacagccgcctgctctaccggatcaacgagacctgcggcggcgcgctgagcgaccaggcggggctgctgacggaatacctgggaacggaatcctaaaaaaccaaaggggggattgacgtggccgaatacacggccctttacgaggcggcgcaggccgtcgtggagctgctgcggcaggagatgacgccggagccgatctccaagcccgagctcatcgggctgtgcgcgccctatgagccggaggactttcagctcacggtctacctctacgccatggaggaggagccgcccgggcgcgaccctgcccatgggtttgtgcaggaggggcggcagacgcagcgcatggcgcccctggcgctgaacctgcacctggcgctcacggcgcactccaaggcgccggcgatcacgcgcgcggcggacgagtaccgcatcctcggccgggcgatgcaggtcatccgggaccacccggaccttgcgccgtatgcggcggggtcgctcgcggcctccggccagcccatacgcctttcgctggagaaggccctgccgccggagacgctgccccggatctggagcggcagcaacaagccctataagctctcctttggctgcctggtgcaggcggtgcgcatcgactccgagcgcgtgcgcacggttgcgcgcgtgcgccacatccgcatcgaaacggaggacacgtcaagatgatcgctgtcgatgtatcccttgcgctggagctgctggacgacttcaccggccggcgcgtcaagcccgcgcaggtgcgcttttttctggacgggcagccggtgcgccccatcgccaagccggacggctggtttctcctcgtcgaccagcccgcgggcgagcacgcgctcgccatcgagggcgagggctttcagcgggaggagctgcgcttccccggcgggccggagggcgagcgcgaggagacgctgtacctgctgccctcgcccgcgtaccggttcggccggcgcgtgaccacgctgacggtgcgcctcgtggacaggcggcgccgcccgctcgccgggcggacgctctaccgcctcggggacgcgcgccagagcctgcgcctggcgcaggacgacgccgggcccaagagcgcggcgctgcgcctcttccgcgcggagtcgccggcgcgcctgcccgttcccgggctgttttacctggaggacggggaggcgggcgagctcgtccgcctcacgggcatgagcggcgcgctctacgccctggaaaagccgctcgcgtccgcgcaccggcgcgggtgcctgctgcgcccggcccgcgcgctgtcgaccgatgcgcaggggtgcgcgttcctggcgctgccgggcgcggcggaggccgccctcctcgttccggggaaggcgggactgcgcctggagcgcgtgacagcggcggagctcgcccacagcgaggcggagctcgccgccgagtagggaaaggaggcaagggtccatggcgtttcccgtgacgatgggggcgacctgccagtgcacgtttggcatggcgccctgtgttctggccgcaacctcccagcagcaggccgtatccggcgcgatgccgcttgcggtgatcacggacacggtgctgcccacgttcggcatgtgcatgtccctggcaaacccggccgtggccgcgacggtcacgccccttggcacctacgtgccgcagccctgcgtgccggcgatcgtgggcacgtgggtgaccggcagccccacggtgctcatcggcggcaagccggcgctcaactccacctcccagctcacctgcgcctacggcggactgatccgcatcgtgacccccggggtgttcacggtgcaggtgccgtaaggcgcgatccctaggatagaaaggcgggattccaagatgaagacctggatgcgaaacggcctgacgtacgtcctggcctttttgtgcctgttcgcgggcatgcagtggacggtgcgggccaagaaccaggccgtgggcagcgcctaccgcaccgcgcaggagacgctgcgcgccacggagctgacgcagtacatcaccagcttggagttcggcatccgctacggcaagaacctggaaaactatttcaacatggacgaggttctgcagtcgatcctgcgcacgtcgccctatgtcgagggcgcctacatcctcagcaacgagaacgcgctgctctattccgcgggggaggcgctgcccaatcccgcggagatccgcgtgcggcacaacggcgacgagctctacgcctcctcggagcagttcggctacgcgctgatgttcatggacatcgcggacgcggagggcgggcgcgccgggacgctggtgatcctgctcaacgacgacatcatgacgcggctcatcgagagctaccagggcgaggggcgcgtgcagagctgggtgatcctgggggaggtgctgctgctcttcctgctggtgcacacgcggctgacccgggcgggccggcggcggctctccgccctggcgctggcggtcctgctgtcggtgacggtgctctttgcccaggggctggacatcggcatcgagacggccaagctccgcgtggagctggagaccatcacctcccagtccgtgcagaagatcgcgcaggtgctccagcagcaggtcgaaagcgtgctggacaagggcgtgagcgtggacgacctctacgacatctacggctggctggacgacatcgacgccacgctggacatggtctcccgcctggacttcacggaggaggggcgcatccgcgcggtgatggatgaagcgtacctttccggccgcctgcgctcggcctttggcgagatggccgggcagtacggcctgctggccgcggcctgcgccgtaagctgcgggatcgtcgccctcgcgccgcgcggccttgcgcggtggaagcggcggcgcagcgcgcatacggcgaaccggggggcgagcggctatgcggcgggctgaggcgatggccctgcgggtcgacgccccgtacgagggcatggcggagcttgcgggcgacatctgcctgtggctggacgcgctgctcgcccacgcctatgcgcgggatgcctgggtggggcgcaatcccgagatgcgggacctgatgggcctggtcgtgccgcgggaggagttcgaggaaaagctcggccgcgccggggacctctgcgccctggggccggacgatgcggccggcgagatcgacgccgtcctgcgcatccgcctgcagcggccggactgccgcctgccctacgcccgcgcggcgcgcgcgctggcccttgcgccggaggaggagaaggccctgcgctttgccctggccgcgacgctggatgcgaagtatgaaaagctctttgcctacttgcaggacgacgtcacccgcacgcagcccagcctgcggctgtttgcgcggctctgcggggcgccgggcgagctgaccgccgccctggcccgccgcgtcggggagagcgcccgccttgcgcccctgctggacgcggaaaagcgccgcgaaggggtcctcgcgccgagcgccgccctgctgcgcgcgctgctggagggtgaaacggacgctccggcggcggagcccgcgctggacctccacccggcgcagacggaggccctgcgccgcctctgccagggggagagccgcgtcgtcgcgctgctctgcgggccggcggggtgcggccgccgcacggcgctccgccgcgccgccg

SEQ ID NO: 1206 - DNA, 10893 bp, Unknown
  16S sequences of unknown bacteria
cgccgccagcgtttgtcctgagccaggatcaaactctcatatttgatctctatctgctcagctctcgctgtgctcttcgcttcgttgtccatccttggaatcgacttttgtcttttccttgtcattctcaatgtatcgttttcaaggttcgcatgccgcagggccaggagttcgttcccgtcgctgacgacggtgtatatcataccaaatgtcgtccggattgtcaacacctttttggaaacttttttcgcttttttcttcttttctctccgagggcgccgaaagggcggaaatcacgcgatttccgccctttcgatgatgccgccgcccaggcagacggggccgtcgtagagcacgacggactgtcccggcgtcacggcgcgctgcggggaagcaaagcgcacgcacgcttcgtcgccctgcatttccacggtgcaggcctggtccgtctgccggtagcggatcttggccgtgcaggaaaagcgctccgccggcgggcgcccggcgaggaacgtcatgcgcgaggcgtgcagcgcccctgcaaagagcagcgggttgtcctcgccctggcagacgagcaggcggttgcccgcaaggtccttgcccacgacgaaccacggccgcccgtccccgcagccgccgatgcccaggccccgcctctggccgatggtatagaaggtgagcccttcgtgccggccgacgacgcgcccctccgggtcgaccatgtcccccggctccgtgggcaggaactgcttgaggaacgggcggaagcgccgctccccgatgaagcagacgccggtggaatccttcttctgcgcggtggcaaggccgttctcccgcgcgatcgaacggacctcggccttggtcaggccgcccacggggaagagcgcgcgggagagctgctcctgccgcagcgcgtgcaggaagtaggactggtcctttcccggatccgcgccgcgcaggaggcgcacctggtccccttcgcggtccaggcggcagaagtggcccgtcgcgatgcggtccgcgccgctgcgcatggcaaagtccaaaaaggcgcggaacttgatctcctggttgcagagcacgtccgggttgggcgtgcgcccgcggcggtactcctccaggaagtgcgtaaagaccttgtcccagtactgctggctgaagttgacggtatagtaggggatgccgatggcgtcgcagacgtcgcgcacgtccgcgtagtcctgcgtcgccgtgcacaggccgtcctcgtccttctcctcccagttcttcatgaagacgccgagcacgtcatagccctgctgcttgagcagcagcgccgcgacggaggaatccaccccgcccgacatcccgacgaccacgcgctcagccattttcatcctccgcaaacaggggcgtggagaggtagcgctcgcccgtgtccgggagcagggcgacgatgcgcttgcccgcaaactccggccgcttggccaggcgcacggcagcgcacagggccgcgcccgaggagatgccgcacagcagcccctcctcccgcgcgagctcccggccaaaggcataggcctcctcggtggagacggtcaggatctcgtccacgaccgcggggtcgaaattccccggcacgaagttcgcgccgatgccctggatgccgtgcgggccggccttgccgccggagagcagcggggactccgccggctccacgcccacgacatagacacccggcttttcggccttgagcgcgcggcccgtgccggacaccgttccgcccgtgccgacggcggccacgaagacgtccacctgcccgtccgtgtcgcgcaggatctcgcgcgcggtctgcgcgtgggcggcggggttggccgggttgtcgaactgcgagggcatgaaggcccccggcgtctcgcgcaggatctcctccgcgcgcgccacggcgccgcccatgcccgcctgcgcgggcgtgagctcgatgcgcgcgcccagggccttgaggagcttctgccgctcgacggacatggaggcgggcatcgtcagcacgagcgaatagccgcgcagggccgcgaccatggcaaggcccacgcccgtgttgccgctcgtgggctccacgatcgtggcgccggggcgcagcaggcccttctcctccgcgtcgagcaccatggagagggcgacgcggtccttcgcgctgccggcggggttgcacttttcgagtttggcgagcacgggctctatgccgtgccgctgcgcgatgcggcccagccgcacaaggggggtattgccgatcagatccaacgcgctgtccgcgattttcatgccgctgacctccatttcgtcactccacaaaggcgtcgtagatgttctgggcatccgcctcgtccgaaatcaggcggtggaggacctcgccgctgtccatgcccgtctgcacgagcaccaggcccttgtccacctggtagaaggcatagccctcgccgcactcgacgacgacgcagttgctcagttccatgccgccggccgtgccggagtagttcaccgcgacgacgcggctctgccccatctcgccgctgaactccctgcccacggcgcagtttgcgggcaggacgagcacgtccgagccgcccgcctccacggaggcaaagcgcaggttgccgcccgcgtccaggtaatagccgtagacgtcgccctggggcgagcccgtctccgggtcgtaggcgaactgcgcgcagagcatctccggccgcgcgctcggggccgagcccgtgacccaggacaccgtggcgttctcatcctcgatgacgaggatgcgcccggcgcggggcacgaaggcggaaaggctcgcgctcgggaccgcgccctcgtcaaaggggccgaggttcgggtccggcgtgggcgagggcgtgggcgtcgccgactccgcgggcgtctcctgcgcgccggcgtccggcgtgggcgtggcctcggtcagggcggagttctgcggcgactgcagcgaaatgccgcccgggaagggctcgccctccaccgcgctggacaggtagaggaagaacccgaccaccagcgcgatcgccagcgacagcgcgacaaaggtcaccaccaccgccggccgcgggccgcgcgatttcttggcgtggctgcccccgcggtgcggcaggggataggtccggtcgtcctcctcggctgcgcgctgccccgccgacggtcggcccccggccgcgggggtgcggacgccggcggccggctgggcgccggcctggggtctgcccgcgccctgcgcgccctgcaggagcgcggcgcggaactcgtcgaccgtctggaaccggtcctcggcgcgcacggccatggcgcgcaggattgcggcctccgcctggggcgggatggcgatgcccaggcgcgagggcggaacgaggcagtcgttgttcaggcgctcgagcgattcgggggggatcttcccggtcagcgtgcggtacatggtcgcgcccagggcgtagatgtcggtccaggggccctggtgcccgcgggagcggtactgctcctccggcgcatagccgggcttcaggatcacggacatgctcgtctgcgcgcccatggactggcgcgccgcgccaaagtcgatgagcgtcacctggcccgaggtggtcaggaagatgttgtccgggctgacgtcccggtgcagcaggcccgcggcgtgcaccgtgcgcagggcgtccatgaccggcagcaggattccgagcatcttgttgaagggcacgggcttgccgccgctgcgcacgaggtattgcttgagggtgatgccctccaaatagttcatcacgaggtaggccgtgccgttttcggtgaagaagtcgcgcacgcccacgatgttgggcgagccgtcaaaccgcgcgagggtccgcgcctcctgcaggaaggactccaatccgtccgcaaagcgcttagccccctcgccggaaaagggcgtgaccatgttgctgcccggcgcgcgggaggcgcagtcctgcggcatgtattccttgatggccagcttgattcccagcacctggtcccgcgcgatataggtcgtgccaaagccgccgtggccgaggccgcggccgatcagatatttcccggccaggatcgtgcccggcgcgaggtaatgcggcgccgccgggggcgttccctcccggtatccgcagaaagggcagacctccgcctgccccttctcccgcatacatcccagacaaatcgagtacttgcgcaccagcaaaacaccgccttttgctcattttcttctgcgccggcgcgagaagcggcgcgctttagtcgtccttgagatcctcccaggcaaagcgctcgccgcacagcggcacaaagagcagcgccgtttcgctgatctcgatgcagtcgtaggcgttcagctcctggggccccaggagctcctggccgttgacgtagaggatcgccttcccctccccgggaatgaggtggaagctgcggttgcgcgggttgtaggacagaacgccgttcgtatcccgcgaaacgccaaggtcccccttcaggcagatgtccatgctcgaggagcggccgatggtgttgcgctccgcgtggacctcgtaggccttgcccttgttcgcgccggtgatctgcacgagccagcccaccggcgggttgatgcccgtgtcgcgcgcaaggcgcgccaccgtgaccgagtcctccgcctccggcatgggggccggcgcggccggtgcgaccggggcggccggtgcgaccggggcggacgggcgttccgcgggctggggcgccgcctgcgcagccggtgcgaccggtgcggccggtgcgaccggtgcggcggctgcggcgcgcggggagggcgcgggcgcgtcgtaatcgtccagatcgtaggcctgcatcacgcgctcgtccacggggcgcttggccaccgtgtattcggcctccacgccggaggagcgggcgaagcaatgggggcagcggtcgtatttgctcgggtcgtagtagtgcccgaattcacagcgcttgaatttcacagcgatcaatcctcctcatcctgtttttccggggccttgtcgcggacctcgaacatgcagccgcggtccacgaggtagaagatgtccccactgcgcaggtctgcggcgtccccgtcgttcagggggcggtcgccctccaggaatgtgccgttgcgggagtagttctccaggatgaagcacttgcgctccgcgtcgtagcgcacggagcagtgcacacggctgatggtggtatccgacgcgtcaaagacgagctggcagcgctgcggatcgcggccgaagaagatcgtctccccgccaagggcgatgaccgcgccggcgtaggtgcccttcaggcccacgatgtatcccccgtggctgcgcttgctgggcagcacgttctccatcaggttcgcgacgcccccgcgccgctggatcaggatgtaggccagcacgccgatgaaggccagcgccgccaggatgaagatcacgagccagaccgtgcccatcccggaggagccgctgtcctcctgcgtcacaaggggcgtgaccaggatcgagggcgagggcgaaaccgagggcgccggcgtcggcgtcgtggagggcgagggcgtaagcgacgcgctcggcgcctcggacgccgtggtcagcgtcgccatcttggcggacacgcccacggaattgagcagctccagcgcctcctcgatgcggatggcgccgttgatgccctcggtgtcgtccatcttcatcgtggcgatgccgatgacgtagccgtcctcgtgcaggagcggcccgccggagttgcccgcgttgagcgcggcgtcgatctgatagtagcgcacgccgttccaggtcgccttgcgggagacgatgccccggctggcgctgacgtcgctcgggtaggaggtgagggtgttgctgatgtcgttggtgggaaagcccagggcgaaaacgccgtcgccgatggagaccatgtcctccgtgcccaggggcaggggttcggcgtcgatgggcgtctccagtttgagcacggcgatgtccttgtccgccgaggaggctgcgaccgtgcaggggatctccgtatcccggcccacccagacgttgaccccctcctcattcggggagacgacgtggtagttcgtcaaaagataggtgacgggcgcaccctcgcccacgccgaaggccgagccgaaggagaccacggtcccgttttcgtcccgcgtcgccacgcggaagaccgagttggtcgcttcgtccagcgtgaccgttccggccgcaaaggccggcgcagcgctgagcagcagcgcggcgcacagcaacagcgcggcaagccatttcatcttcttcatcgtctgcaccgccttattccaccgggtcgcagtagagcagaaccacggtcacgttgtcctgtttgcgcttggccttctgccggaccgcggcaaggagctcctcctgcgcgccaaagccgcgggaggaggcgagaatctccgtcatctcctgcagggacagggtcttaaacagcccgtccgagcagagcagcacccgatcgcccgggcgcagcggcacgggcgagacgttgtagtccacaagctccagctcctccaggccgacaaagctggtcaggtgcgcgcgctcgggatggctgcgcgcctcctccatggtcatgcggcccgccttgacctcctccaggagctcggagaagtagttgtggtcgcggttgagctgatagagcttgcccttgcggaagagatagatgtggctgtcgcccacggagacgaaccgcagcccgtccggaaggaccgaggccgcgaccagcgtcgtgccagccagctccccggtcttgcccgcaaaggcgttgtagacggattcgttcgcgcggtagacggactccaccagcgtgtcgtcgtccacccggtccgcggcgagataggcacgcatgaactggatcgcgcccaggtttgccgcctcggcaccgttctccatgccgcccatgccgtcgcagaccacggccatgacgccgtggtcccgcacgaccagctcctcctccaggggcgtgatggcaaaggcatcctgctgctgggcgcgcgtgccgatgtcctgcgcgttgccaatggacagggcgatgcggcccaccaccgtgctgccgggcgcggcgggctggaccgcctccggcgcagcgggcgccggccttgcggcgcgctgggtctccggctcgcggtccaggggcgtgaactgcaattcctgccgcgcggcggccgggcgcgcattctccgaaaactgcggcccctccgccgggagcggaccttccgccgggcgcggaccttccgccgggcgcggaccgtccgctgcgagcgggacttccgcagaaagcggagcgtccgcgccgcccagcccgtccgcaaagaacgccgcctcgtcctggggaccgtccgcggccgcgcgctgcagcgaggcattgaagacgagcagcacaatgctccccgcgatgcccgccaccgcgaccagcaacaggatgacaatctctatcggcatgggaaacctcctcgtttcgtacagactccatttccattatagggcaactacccgaaaagtgcaacgactaagccttgccggtctcccgtgtttgcaatttcgcaacatcttcggcaattctgcgcgcaatctcctccgccgtgcccgaggcgtccaccgcgaggatgcgcgccggctcccgctcggccaggcggcaaaacccggcctccacgcggcgcagaaacgcctcgcccgcgctctcgatccggtcgcgctggccgcgcgcgcccacgcgccgggccgccgcctcctccggcacgcgcagcaggtaggttcggtccggcaggcagcccgcaacggcctgcgcgttgatccggcggaccgtctcctcccccaggccccggccgtagccctggtaggcgagggaggaatccaggtaccggtcgcagagcaccgtctccccgcgctgcagcgccgggaggatcacgcggcgcacgtgttccgcgcgcgccgcggcgtagaggtacgcctccgtcaaggggtccatctcgctttccgggtccagcaaaagcgcgcggatcttctccgccagcgcgtttccgcccggctcgcgcgtgacggccacgcgctcccccgccttctccaatctctcctgcaaaagccggatctgcgtggtctttcccgctccatccatgccctcaaaggtgatgaacacgcccgtttcctccttattctgcgtcgaatagcagggcgcgcaggtctgccgcgccgcgcacgaggaaggtcgcgccgctctcgcgcagctccgcctcgctcccaaacccgtgcaggatgcccgccgcgtcgatgccgttcgcccgcgcgccgcggatgtcgaagcaccggtccccgaccatcagcgcgtttcggcccaggcgctccaggaccgcacgcaccatcgcgggcttgctgtccgtcttttcgctcgggtccggcgcgacgagcatctccagcagcggcaggattccctcccgctcgagcaggatgcgggaaaagcgctccggctttcccgtcgccacggccaggcgcacgcccgacgcgtgcaggtcgcgcagcagctccatcatgccgggatagggctcgtactcgagcacgcccttcgtttcgtaccgctcgcggtagaggcgcacggcctccgtggcctgcgcgtcgtccatgccgtagagctcggagaacgccgcgtgcagcggcggcccgatgaagcgccggatgcgcgccaggtcgtcgtccgggaggcgcatcccccgcagcgcgtactgcaccgagcggatgatgcccaccgaggtatccatcagcgtgccgtccaggtcaaagatcacgcagtcatatcgccttgccgccatgggcaattcccccttcccgtttgcgccgaagatcgcttgccccgcgccctgcgccgcgcgcagcgcctccacgacctcctctgtgacgcgctcccccggcgtgcacaggggcacgcccggcggatagatgccgatgctcgcggccgcgatgccgcccgccgcgcgctccatcgggacgtagcgcacgccgccgagcgccgcctcgcgcacgctgcacgcgcgcgcgccgcacaggagagccggcttgcgcgccggctgcgcctccccgcgcgggagcgcctgcagcgccgcgcgcagcgccgcaaagtccgccgcgctggacgcgatcgagggcaggcacacgaggcgccggtcgtccgccatctccacgtccacgcccgcggcccgcaggcgcgcggccgcctcctcgccggacaggcccgtgccgcgcacgtccaggaccaagcgcgtggggtccgcgggatacgcggcgcagaactcccgcgtccgcgcaaagcgcgcgtccgtccacagcgccttccggaagcgcgtgcaggcctgcgccagccgcacgaggtggcccttcccctctgcctccatctcgtccaggcaccgctcgatcgagcgcagcaggagcgaggacgggctggagctctccagcagccggtgcatgcgccggacctccgcctcgcaccgcgggtcccgcgcgtggagcacggcgcagggtgtgagcgcgggcagcgtcttgtgcaggctctgcgtccagaagtccgcgccgagggagccggcggattccatgcccaggaaggagaggtgcgcgccgtgcgcctcgtcgaccagcaccttcatgccgcgcgcgtgcgccgcgcggacgatccccccgatgtccggcaggcggccgtagtagtccggccgcgtcagcaggatcgccccggcctccgggtgcgccgccatgcaggcgagcacgtccgcttcctcgaaataggggatctcgttttgctcgtcataccgaagggggatgggcacggcctcgacgccgcccagcgcgcaggccgaccaggccgaaaggtgcgcattgcgcggcaggagcagcgtctgcccgggccgcagcgcgcagagcaccatcagctgcacgccgcgcgtgctcccgcccacgagcgggaagctcacgcccgccccaaaggcgcgcgccagccgcttgcccagcgcaagataaggtccacccgggtcgtgcaggtcgtccgtgttgggcagttccgtcgtatcgaactccgtttccgcgccccggcgcatcttgtgtccgggcatgtggaagctcacgcgctcccgctgggcggcaagcatctgctcgatggtcatctctcttctccttttctatacacaaaatcaccgccccgatgcgggaaacggtgatgctgcctcattcttcggcggattcggggggcgggaaagcgcgtgcacggatgaggcgcagcatgtgctcgctcggctgcaaaatcacccgccggtcctgcccgtccttttgatatacgatctgcaccgtcgggagcttgcgcgtgcgcagggcgaaccgctgcgtgcgcagggcgctcttcttctcgacggggccgatgctctggatgtccgtgacctcgagcgagaggacgggcttctccttcccgcccacgatccgcgcgacgatgagctcgctgtccatcagcgaataccggtactcgacgatgcgccgggaaaagatcacaaacgcccacaccacgagcacgcccaccgcaaggaagtccacaagcggcagtccaaggctgctcagcagccaggaaagaatgctgaccagaaatacccccagcacgattctcgcgatgtagaaggcattttccgctttcgtgcccgcgggatacttgcagatctcctggtacatgggacgacgatcctccttgcgcatctgcccattagagagatagccccgtcatacgacgaggctatcaaaaatatggaatccggcgatgatctatcctcccgggccgtgtccagccaggtactttcga

SEQ ID NO: 1207 - DNA, 30085 bp, Unknown
  16S sequences of unknown bacteria
aaaaattatacattcaaccatcaactaaataaccaaaatattctccaagttttacattgatttaatggggtacactacatcacttttcagcagccgctgtgcgctccggattgtcgccgagggaatcgaaaaatatccactccaaattttcgggctcgtcagccacgtccgcctcagtccagccgccgccgagagacttatacagcattattatataccctatgaaatccttgcggctcagcacctggttctgcgccgacgacagcatcgacctctgcgcttcaagcaagtcaataaactctatctccccctgcgtgtacagctcgcgcgagagttcaaacgccttgcggtaattctctaccattcggtttaagtgctctattcgcgcgcgctccttttcggcagacaccaatgcgtcttccacttcctttatcgccgtcagcactgcgtcctcccagtttacgccggcctcgcgggtcagcgcctcttgcagctttacgttgtaaaccgtcttgcccgcttgaaatatgttccacgtcacattcggcccgaccgaccagcttccgtactggttttgcactatgttgccaatctttggcgcctcgtacgatatgttgccggttatggaaaacttcggatagtagtcagcgcgggcattgcctatcttggcggttgccgcatgcagtttgtactccgcagctattatgtccggcctcctttcaagcaactcggccggcacagatatcggaatatacttttccagcgccggcagcggcccgacatctgaaagctccttttcaagagcgcccgtcttcaaccccagcagatattcaagcgcatgcctcgtaagctttaattccctctccaatacgggtagctgcgccgaagtgctgtccacctgcgccgccgcgcggactgtgtcgagcttcgacacaaacccggatttttggcgcgcaagcgttgcgcggtaagtccccttctgggtttcgagattgcttcttgttatcagaatctcatgctgcacgcacctatatgtaaagtagttttgcgcaacctccgccgcgacggatatgcgcgccgccgccttgttggcaatcgccgcattgtagtcagcagcggcggactctatcccgcgcctgactccgccaaatacgtctatctcccaagccgccgtcgcgcccattccgtaagacgttgacgtcacgtctatcgggtgcccgttctcagacattccggcgtttacgtccacgctcgggaaaaatccgctctgcgtcactccaagagtcgccctcgcctgcgctatgcgctccgccgcaatgcgtatcgacaaattcccctcaaaagagcgctttataagcgacgtcagcacaggatcgtcaaatatctcccaccaagtggcaagttcctcgggtgtcattttgcgcggaacgcctatgtccgttatgcttttggcatcggcctcgttgctccacttctcgggcatatcggcctccggcgtctcaaaatcaggacccaccatgcagccgctcaaacccgccgccatcgccgcaatcaatgcaaaaattgcgtttgctttcatatttttctttttactcatacctcaacgcctctatcggatctagccgcgccgccttccatgcgggatagtacccgaaaatcaccccaactatcgcggaaactccaaccgacaggcatatagcatagtacgacatcgccgtatgccagcccatttttgccgccatcaaaaccgaaagcccatgcccgagcgctatgcctattattccgcccagtatgcagattactatcgactccaccaaaaattgccggagtatgtcgcgcgcgcgcgccccgaccgccattctaagcccgatttccctcgtgcgctccgtcaccgagacaagcattatgttcataatcccgaccccgccgacaagcagcgacacaaacgcaacgcacatcagcaggttcgtcacgctctctgtctgccttttgagcatatccgcaaactccgccatcgaccttattcggaaatcgtcgtcgtcgccctcgttgagcttgtgcatttcccgcaacaccccgcggactttttctatggtctcgtttacgtcgtctgggtgggctaccgacattatcatgctgtctatgttcgcaaacctaacgggcggaatcgtattgtacgcctgcggatacaggcttacgccgctcgtatagacgtcggacgctgaagttgtcgtgcttgtggatgtatcggtcgtagtaccgaccgcgctaagggaagtctgccccgcgccttttagcctcgctttcattgtagtccacggcaatatcacgcagtcgtccatatccatacccatcatgttcgcaccgcgggatttcaacacacctattactttgaataccacattttgtatgcgcaggtctttgccaactgggttcgccccgtcgtagagctcgcgcactatcgtttgccccacaaggcagactttcgccgcgcgctttacgtggaatgccgatatgggctcgccgtcttctaccttccagctcgagatttccagaaaatcctcgttgccgccgcttatgctgaacgggcgccagttcttgttgccgtatattatttgtccgcggactgaaatttgcggagatatcgcggtgacagtcgggcaatccttctttatcgcctgggtatccgcgacagtcagcgtcgcccaagagcccgagccgctgtttatgccgcttctcgtcactggccccggccacactcgaatcgtatttacacccatctccgagaaattgttttcgagcgcaacttgcgcgccgttgcctatctctataaccgcgatgaccgccgctatgcctatgactatgccgagcgtcgtcaagaacgtcctggtcggatttcgggctattgatttaagcgcccactttaatacgcgaaaccttttcatttccttatcaccgtatcgtcggatatttccccgtccacgagccgaactatgcgtttggcgctgtttgcgacgtccatttcatgcgtgacaagcactatcgtcacaccttccgaagcgtttatctcattaaatatccttagaatctcatcgctcatttttgtgtcgagatttcccgtgggctcgtcagcaaacaatatgcgcggattgttaacaagcgcgcgcgctatcgcaactctctgctgctgcccgccggacagccgcgacggctcgtggtccattctgtcggcaagccccaccctttcgagcatcaacttgccgcgctccaccatctgcttttccgaaaggtggctcgccgtgtacccaaggggcattattacgttttcaagcgccgaagtacgcggcagcaaattaaaattctgaaacacaaagcctatttttcggttgcgcacgtccgcgcggccgtcgttggagagcttagatatttcctcgccgtcaagccagtactctccggaagtcggcctgtccaggcagccaagtatgttcatcaaagtgctcttgcccgagcctgacgcgccggtcaaggcaaccatgtcgcccttttctacggacaatgttatgccttttagcacgggcaattttatgtcgcccatgacataggtcttgtgaatgtcttttagctcaataagccccatcgcccggccctatcgttttttgcgttgcggcatcttaggcataaaaggattttgcgaagtagtcttgccctttgcaatctccccgcccgttatgactttcatgccttcttttatttcgggcgacgaaacctcggaatacgcgccatcgtttatgcctatcgagacagctattggctttaccttgttttcaggagcttgcacccaaaccaatctcttgccttcgggaatttctgtgtttacgccttctgcaagcatcgaaacgtccggcacccaccgcaatgcggaattcgggacagtcaatacccccttgctctgttttactatgaagcttaagttggcggtaagatacggcaagagtttcccgttggaattgtcggtcgaaacctcgactatgtaagtcacgacattttgcgacattgttgcatttagcctaaccttgttgacttttccaaagaacttctcgccggggaaagcgtccacggtaaattcaacgtcctgccccttgaaaatgctgccaatgtcggcctcatttacggaagcccagacttccattcgcttcaagtcctttgctatcaaaaatagagagcttgcgttcatgctcgatacgaccgtctgcccaacgctaactattctgtcgattacaacaccgtcaaccggcgcagttataacgcagtacgaaaggttgcgccgcgcgagctttacgtcggcctcgcaagaaactacttccgcgtcggcctgcaatatttgcgcgcgcgcgacgtctatctgcgccgaagtctgctcccacgccgacaggtacgagtcgtacgaagcctgcgaaagcgcctccgaaaccccaagcgcctttgcgcgcttccagtttctctccgcctgcctcaaattggcctccgcaactttaaggttcgcctgcgcctgcttctgcgacgccttcgccttttcaagattcgcctccgcctgaagaaggttggacttctggatttcgtcgtcaatcagcgcaataaccgttccctcagatatctcggaaccatagtcaacctctttgccggcgttgtccttcccaaaagaaactatttcgccagacacgcgcgcgccgacattgacaagttcctcgggctcaaccgtgccggtcgcatctatcgtcagcaccatatcgcgcttttcgacgtcggcagtccggtactcaacgggggcggacgcctcgccggcaaaataataatacgccccgattccaaccgcggccaatacgcatacccatatcagtacgcgcctgtatttccccattattttcaaaattctatcctccttaatttatagtcttataaaaaacgcccagtttcttttcaaagtttcttcattttatagtttatagcacatcaaatggcttacgttatcggtatttgcgaatactcgctcctataatcgctcggagtggaatcgaatgcctccttgaacttgcggcagaagtacggcaagtcggaaaatccgcatatttcagatatttcgcccgtcgaaaacgacgaagtcgcaagcagccacttggcgtatctcaggcgcgcgccgtttatgtattcggtaggggtgcaattcaaatacttgcgcattgcgcggtttatgtacgacatatccttgccgcatatttcgcggaacttttccagcccaagcgcgagattttcgggattgcgtatgcgctggcatgcgtcggagagccattcaggcatattgccgggcaacgcggacgcaaatacgttttttatctgccaatacaaatttatcaaaaacctgtaaatcgccatgagtgagtcgttctgccataccagctccgacgcggcgcggtcgaggtacgcagtctcaaacgacgacaattttagagacattccgccgaacttttccctaaaaaattcgtcctcctcagacaatacgtcgcgagtaaagcgcgcgagcacgtccttggttatcgcaacgtacgagaaatctatcgtagaattgcgcgaaggctctataacatggacttcgttcgggcgggatataaacagcaaatgcttgttaaaatacctttccttcccgcctgaaatcaacattccctcgcccgacctaatccataaaatctcgacaaaatcgtgcctatgcaggccgacgcaatgagacttgtcggtcttgccgtgcaccaccctaaaatacctgttcccctttaaatgcgactcctcgctaaattcagtcaccccgtttttcatatgtatcaataaaatagccaaagtcaaaatagaacaaaatcccgccgatgcgcaaacaaaatttataatataaacaaatttttacgagtcgccgcccaacctcgcccgtttttccatttatattttgaagtgcttgcaaaattattcaacagcctctggcgcaaaccgcaatagaacagaaaatcgcgcaaaactaaaaccgtacactttcatcaaaagttccctaacctgcggcaagcacgccaactataatttagtataaaagtgcccccccgcatgccgccaagagttcttattgtccatacaggcaatattgcaattatttcacttcataatgtaaactccgctaaaagtattacctgttgaccaagccaattcgcaaaacgtttgacaaataaaacatgcgtatgctacaaaaaaagagaatcagacaacccaataggaataacaaatattataataaaaatattggcaaacgcagatataaaaagagactctggctttgactcgccggatttggccgaattgacagcaaggattgaggctgagttcgatgtcgatatttttgaagacggcattgtatttaaaatatccgatattttggagaaaatatccaaatgaatatagaaaagcttttttatatcgacgatttggataataaaaaaatatcgtataaacgcttcttttcagacctatcgggcataagcgaaatctccgtcttgtgcaaaaaaaattcaatatacgaatacttcctatacatctcagcctccctcatatccaaaacccccattgtactgctcgactccgacctctccgaatccgaaataaaagaactttgcggcaacggcggcttccttcaaaaaaataatgtaaccattccagaaataaaatcttttgaagaatttttaagccttgtaaaggcaggcgcaagctcatggacttgcacgctctttacctccggaactaccggaacccccaaacgcatatcgcactctttgaaatctttggcaaggcaagcgaagatttccccaaaacactctgacgacgtatggggatttgcctacaatccaacacacatcgcagggctgcaggtattcttccaagccctatttaacgcaaacacgatagtacgcctattcgggattcccgcaaaagcgctaatagaaactatacagaaagaggcaatcacccatatctcggcaacgccgacattttttagaatgttgcccgcccccgacaggcctattcaatctgtgcgcgcaatcacatcgggcggggaaaagttcgacgcgcgcgcaatggaaaaactttcgaaagcctttcctgcggcacgcatccacaacatttatgcctccactgaaatggggagcgttttggcttccaaaggagatatattcactccggacgaaaatacaaaaaaactcctgcaaattaaggacggcgaattatggatacataaatctctcgcggggaagtcggaaaacatcgcattgtcgggagaatggtacaataccggagactgcgttgaaattatttcagaaaatcccctctcttttaaatttttatccagaaaaaacgaaataataaatgtcgggggatacaacgtaaacccaaacgaagtcgagcaggctctaatggaaattgacggcattcgggcagcgcgcgtatttgcaaagaaaaacagcatactcggaaatataatctgcgcggaagtcgtatccgaatcgggggaactcgacgaaacctccattagaaagcgcctttcaaaccgcttgcaagcgttcaaaataccgcgcataataaaattcgtagaaactttaaaatccaccaatacgggaaaactatcgagaaaaccatgaagaatattttgataacgggaatttcccgggggctcggctgcgagattgcaaaaaaaatcctctcaggaggaaatacggtatatggcataagccgcacgctctccggagagctcaaaaaactcgacggcgacttccccggaaaattaaaattattgcaattcgatttgtccgacaccgacggcatattaaaaaatattttcaaagactttgtcggcatgggcacccccctgcacggatatgtaaacaacgcggcaatcgcatacgacgacatcgcaacaaatataaaaatgccgccgctcttggaaatgtacaaggtaaacgtattctcgcccatgattatggcaaaatacgccatcaggaacttcattctccacaatacgaaaggcgctattgtccatatttcatcaataagcgtccatacaggatacaaggggctgtcgatgtacgcctcgacaaaaggcgcaatcgaggcattttcaaaaaatatatcgcgcgaatggggaataaggggcattcgctcaaacgcggttgtcgcgggatttatggaaacctctatgagcgcatcgctaactccggagcaaaagcgcaaaatttttaaccgcacttcgctaaaatcccagacgagcgttgaatcagttgcggcgactgtggacttccttctatccgattcggcgcaatccataaccggccagaatatatttgtcgattccggaacgatttaggcaatggataatatagctgtatgccaaagcaatgatatgccagattccgaatggataaaatacgcggaatcgtttaactgcgtttttgaaaaaaaaattttaccgctgaatttttcaaagaaaagcatctcgcgcaaataggaaacaacacgtatcactcataggcaaaaaccagtgccccattccgcctgagtgtgtcgcaacagtttttagaataaactgaaaatgcctttttaatcgcatattccagtgccataaggcaacggtatggtgagaataagactctctgaatctatcacatttaggaaatgcggcaagattcataacatacccattaattttactcttacaaacatgccaataaaccatcgccggactataataaaaagttcgcattgatattttaacaaatgaaaaaataacgcaccccatacccccaaataccgttgacaatcggccgccgcaacatactgtgtcgatttaatacagccccataaaataaaaaaatgaacctgcttaaattcaagcccatatacgaggaacgaatctggggcggacgttcctttaagacgcttttcgagaggattatccccaaaggggtcagaataggagaatctctcgagatttgcgattcccccaaaaaatcgtctgtagtctcgggcggagagtttgacggctacacgctaaggcaactcattgaaaaatatccctccgatgtaataggccccggatggaatccccaaaaatttttcccgataattgtcaagctcctcgacgcaaggcaaaggctctccctgcaagtccacccaaacgaagcttcggaaaagaaatacgggcttccccgcaaaaacgaggcttggtatcttttggactgcggcgtaagatcccgcttcattgcggggttaaagcctggtgtcgagccgaatgacataaaagaggccatatccgcaaaaaatgtcgaaaaacttctcgaattccgcgactctcacgtgggcgactttatgtttgtgcgcgaaggcactgtccattcgctcggcgccgacaacattgccttggaaattcaggaaaattccgacagcacattccgcctttacgattgggataggacggactccgacgggaagtctcgcgctctgcacatagccgaagcgatagactccgtcaacttcgacaatcctatagtcgagccgctctccgaaaatgaaactccgacacgcattctatgcgattacaaaaatttcaaaattattcgccttcgactgaaagccggtgaaagcgcaacattgcccgcccgcgaagaacccaagattatctcgctcgtatcgggtaaaatagactgtagtggaatttgtgtagaggctgtcgaaagcgcgctcgcccccttcggcgcggaaataaagatacgggcggtactcgattccgccatgcttattacagaaaattttgcccggctcggataagagccgcatgggaaatttcccgtttgaagcagccaatggtgtatttcggaaccttgccgcacagaataaaaatactgttccgaagtccgcattaggcacatcattagcattcgatggcaagcggataaggagtgatagtatactcatgtcttgcttcgcactattggaaaatatattggcattcccgcaattgcgatacatcttagcgcaataaattattctacgtccataccgaatctttgactgcttcctaaatagtaaaaattctccttaaccaacaaaacaaaaattccgaaaattaggcatatgccttcttgcaaaactataagtgataagcatactttaacccaacatgaaaaaaaatcttatggcataaaaagaatatttctcccctgctcttttagaattgaagagtggacgtttaggccgtaaattaccaatttgcgaatgaaaatatcgataatcaccgcggcattcaacagcgcagaaaccattgccgatacaatggaaagcgtcctcgcgcaaacttacggagatattgaatacattgtcgtagacggcgcctccaaagaccaaaccatggatatagtaaagtccttcgaaccgcgctttgaagggcgaatgaagtggatatcagaaaccgaccgcggcatttacgacgcaatgaacaaaggcataaaggccgcctcaggcgatattgtaggcactctcaattctgacgacatgctcgcgtcgaacgatgtaatagaaaaggtttccgaaaccatcataacattaggcgcggattgcgtctatggacgattgaacctcgtggatagcaaaaacacctcaaaaattttgagggaatcaaacaccggtcaatacaaaacgggggcattcttaaaggggtggcaccccgcccaccctacattctacacctataaaaaatttttcgaaaaattcggatactaccgcacagacttaaaaatagcggccgatttcgaattgatgatgaggtttattgaaaagaataaaattaccggtgctttcatagacaaacttatggtcaaccaacgcgcaggcggagtaagcacaaagttatctggatatataagaagcaacttggaaataattaacgctttcaaactaaacggcattcgccctccgctactatgcgtacctagaaaagttttgccaaaacttgcaaatactttaaagaatagatttcttagaaaatgatattttacttcaatctcagtaataggaatattgggagtacaaataaaagtatccgtaaacttttattttcgaaattccccccgcctggttcccccaaacatcattcgcatcaatcaatagaaagcttgacaaatatgggaaaatttccgcttttaatactcaacataacgattttatcgaaaggagatataaaatgaacgtccccgtaaaaagaaaacgcgccgtaatgatggaatacgttattatagcagtgctgattgcggcagcagtagtggttgccgtaataatgctcggcaaaaacgtatcctccgaaatgaacgttgcaacccgctctatgagcgacgcaaaggccgcagtaagtgcgcaaaaagatatcaaaacccaggcggaaaaagacgtcaagagcgccgaagaacaccgcaagggcatgcacaactacgaccaatagcccagttgttcgcaatatattcgcccgtttgggtatagattttaatccgtaatatcgaaacgggatttgcgcgtctttcgccagtcccgtttttttgtggaaatggaatcgttgattatcgcaaaattcgtcttggcgactccgtggttgatttaccttggcgtcaaggactaccgcacccgcaagctccccaacgccgcaacgctcgggggcgctgcagttatgtctgcgattgcgctcggtgtcggcacggattattttcttgcatcaataatcacaggctgtctgtgcgcgctgtttttgctgctgccgttttttctgagggcggcaggcgcgggcgacgtaaaaatgctatttgcatcgggcataatcgcaggccccggaaatactctcaacttgatcctgctaatatcgttcgcggggctgattctcgcgctgggaatgctcgctttcaaggcggtaaaccccgcgcgcctaaaacactacgcaaggtgtctgttagacttccggtatgatagggaaaaaggcaaaaagtcgctaccgcccccggattccgaggcatgcagagttccgttcggcgttgcaatcgctgcgggattattcataaacctttcactgcaactgttggccgcgctcgcatcggccgacgccatgtaaaatgataaaatctgcaaaatcagaaagcggagcagtcctcttggaattcgtactgtgctttccaatactgatggttttgtttctttttgcggtgcagttttcatacataatgattgcgtggcaagtagtgcactattcggcgtatatgggcgcgcgttcggctatgacggaaaatgtgtttcaacgaaagagcaaggctgaaaaagtcgtaaagcgcattcttgcagtcgtatcggcatcgcccacagactccaaggacgcaaaagacagggcaaaagacgaatattcaaagctcgacggctggggctggctgccaaacacaaaatttctcgaccaacaggtggacgtcgatatttccatgacaaacctcgacccgcgcggcgtaatttgcacggtaaaattcaaggcgcttttgacagtccccgttgccggcaggctcattagtttttttgcaaaagaggataaatcaaaagacgagcaaaaatgggcggagtcgctcgacaagcaggaatacgccctcaatcccgcgcttttggattactccaacgaaatcgagctcgacggcggggacaaaaaggaaaagcttaaacttccatacataactttaacttccacaagcgcggttgcgattccatactccacgctaaaataccccatagctttggaatgaaaaaatcaccaggcattctgaatgtttttatgtccaagtgcggcagcctttgccgcgactcggatggggcggcgctcgccatcaccctcgcgttcatgctccctgtatgcattctctttgtcggcatttatggaatcggcgaagttgtaaggaataagatagagctgcaaaatgccgcagacgccgcagcgtactctgcggccgtcgtccaggccgactacctaagccgcatggcaaccgtcaataaggctatggcttggacatacgtcgatctccaaaagcgctcgctcgacgccgcaatggatatgttctgcgaatatgtaatcaagcagttcatcgaagacttaaacaattgcaaaaaatgcaacgccccgtgccatatgcacgatccgggcgtaaactataattgcggcacggacgtgcttgtaagcggcatcatattgaacctgaccggatgcggcgtaggcattccatttgttgccaaagatttcaacggtcaaaattttctaagccgcatgctcccatcgcaaatggtgcatgtaattggcgcaaacgcccagggcaaaggcgtattggcaaacctccccaaaatctataagtacagctacgcgatagcaaaaatgacgaaaaagctaaaagacctgtacgacgaatacccaaaaaaaataaaggaaactgcgcggcaggtcgcagtcgccaacatgatggaatgcaaagacgatttcatcgtgaacgtcacaaccggaaacgaaaagctaagcttcttctttatgcccggaaccgacgacaacgaaaaagccttcatctcatttgccgatccaaccttggaagacttttcgcccaagaaagttttcggccccggaaccgacgactggattgtccgcaagggccccctcggattttggcgcgtatataagcagaccaagacacacttgcatgcaaaatgggactggttttggacaagatgggtccacgttcagatcgaagaaatttcactgcaccttccgcctattacgcccggcggagcgtacaaaagaggccaccccgaataccacgggtacgacagcttctttaaaattataaaggaaggcttgccgatagggctgctcgtaatgcccgccgaaccggtaatactcctgcccgaattttttgggaaatcgggctcgattaccgttgcgatagcgcgcaaagtgccgaatccgctctcggccttcacccccgacgggcgttcaatgacggctcccgggatactgtcggccttcaatccgagcgcagcaggcggaaataggccggaatatatgtgcgcaatagcctctgcgcgcgccgcatacaagcaatacgattccgaccccgaaaaaaaattaaatagttccgactacaccgtgggatatgtaatggcggataaggaaaaaacttggaatcttatcgagaccgactgggacgccgtattcctccccgtaaggcacgcatgggatctgtgcgcagggctctccgccgcccagactttcgccccggatccgctcgccggcggaaacatactcaaaacagtcatgctcgacaaggacaactggaccgacaaagacggcaaaaaagttgacaagaaaaatctgccggactgggaaaatttaaaagcccccggaggccttgttaaggacgacaaatcaaaagacgggaaactcgactgggctaagttaagctcgtacttagggcactaatatgaaaaggcttttcaattcgacaagaggctcggtgctgatggagttcgtaatggttctgcccgtttatatggcggctttgggcggaatcgtttgggtaggggaaaagtcgctcgacacaataaacctccgctccgccaaccattggagcgtcatgatggcaggaaacagattctcggtgcgcacacccgcaatgatctcactcacaaaactttttccgcgcgctaccgccgtgtacgactccacgcaaagaagccttgtcgacgaacattcctaccttcaatttatcggctcgaaagttggcatacttcaatccacccccgaatacttggaaaacttaataaacgccccatacaccacaaggggcgaaaacgccccgtcgccgcttatccccgaattttccgtgacatcttcgcgctacggcaacgactacaccctcgccatcgtaatgcggacaaaaggctcttcggcggcaaagaggcattggcattcaagcctcattgccgacaaagatatctggaaatttgaggggaaggaggacgaataccccaaaaaatgggaattgtctctgttaaaagatccaaagcatacagacgatacgaaaactccggaaaaacagccaaaaaaaatcgagttttacaaacgctacaaaaagtacgaagagtggagcaaatccaataaatgaaattgtgcctcacagcttttttggcgactttcgcaatcggaatcgcggcgctgcttacggcggaggccctgtcttccgccccgcccgcaggcggcggaagagctgcgagctccacgccgaagaagaatgttggggtttgcgatagcccaaacccgataaggcttccaaacgccgccttcgcgactccgggcgcaaaagaagggtgggagtattcggggatggtaaacgcaaatttcgtttcctcgcgcgcgcaactggagtcttggtcgctcaaccagggctggactccgcaaaataaaattaccctcgacgaaagtctggatcccaaagtaattcttactttcaagcgcggaaaagaagaaatgacaatgctcgtctggaaaatttcaacaaactctaccggattcgcatacaaacgcgaatccacaaccgaaaagaaacaaaaatgaattcaaacaacgactttctcgtgctgtttctcgccccggtaagagactttctcgcggacgacggcgtgtcggaaatcctcataaacggcgctggacaaatatatgttgagcgttcaggcaaactcgagctcaccaacgcaaagtttgcgagcgaagcgcaacttatggcggcggctgtcaatatcgcaaaatcagtcgatagaatcctcgacgagcgccacccggacctcgacgcaaggctccccgacggctcccgcgtgcatgtcacaatccctccaatcagccgctgcggcacaattatctccattagaaaatttaagaaggatatgctcactctcgaaaagcttgaaaagctttcgagcataccgcacgacggcgtcctattgctaaacgccattgtaaagctgcgcaagaacgtgcttgtctcgggcggaacttcgtcgggcaaaacttccgtcctaaatgcaataagcgggctcattcctgacggcgaccgcattctcgtgttggaggacgcaagcgaactccaacttcaacagcgccactgcgtctattttgaaacccgcaaacccgataaaaacggcgaaggcgaattttccataagagacctcgtaattgcatctcttagaatgcgccccgacaggctggtaatcggggaaatccgcggcggtgaggcgctcgacttgttgcaggcgatgaatacgggccattctggctcgatgtcaactatccatgcaaactcgcccgtggacgctcttagaagaatggaaacttgcgcaattctaagcggcgtggagctcccgctaaacgcggttagaatgcaggttgcttcggcgataaactgcattgtacatacaatgcgcctgccagacggctcaagaaaaatcgtcgatatatcggaagtccttccgttaaaagacggcgagtaccagacaagcccgctcttaaaatggaatacgcgctccattgcccaagacggctccgtatcgggcgatttcagcctatgcaacaaaccgtcgttcgccgaagacgcaaacataatgggcttagagctcccaaagtacgaatagccttatgccacgccttttccgcggcgagattatcggctctctcgaactcctaaaacccgtaaaactttccggagattgcgaggtttggcttgccgcggattcaaacggggattttgcaattttaaaatcggcgccgcgcaattcaagcgaagccgaaaaattattgctctccgcagaaatcataaaaaatataaaatctccgggattagccgaaatattgtcctttggcatatctgaggcggcagacgcgtatgtcgcaacaaaatacgcggcgcgaggaacgcttgcaaaatttataaaaaacaagcggcggctaacacaggcgcaaacagtaaaaatgcttaggggaacgcttgcaggcctcgcggctctccacggcttaggcattgtccaccgcgacgtaaagcccgacaatattttcattttgcaagacggctcggcggtattgggggactttggcgcagcgaagttcccaaatattggcgaaccttcgggcgcggtattcggaagcgcgccgtatatgtcgcccgagcaggcaaaagactccactgatgtttcgccggcatgcgatttattctcgcttggttgcgtggcatacgaatgccttacggggaatcgcagatatgctcaaaaaaattttacccaaactttaaaagcaatactgtcagacagctcttccgccgaacgcgagctccgaaagctctcagagcctccgcttccagccctcgtctcccagatgatgcaacattcaccgtcagcccgccccgcttccgcgcgcgaagtttttgataaaattgcgatgcttagggaagagcctattgaatgaaaagtgccgatataaaacgcgcgcgcccgtaatttttcgcaatacccgccatatttttgcgcctctatagattttaaaatattattttttagcgcattttttttttaaatttttcgcaattaaaaacggctgataactaaaaccgattgttagccagaaccgcttgataactaagccgaaaatctcgccaaaaaaattttccagcgcagcgacttttccgccgcgcgactcacccattccttcgggctttcagactttgcaatcgagaatatttcctcatcgtccattctaaataaaatcggaaggggcgcgagccccgcctctgcaagctttttgcgggcctccgacaagaccgccctattgcgcgcttctatcgcgatagttgctgccattggcacagctgccaccatcccccagagaggcaatcctaccgcgaataagcacaccgccgctattgccgacgcaaagaatattgacgggattttccagtccctaaaaaaatttccaaatattctccgaaacagcgacggctcaacgttccgcggaaaccattcgtcgtaaacagattcgccaaaacccattcttgcggcatggcaaatctcgtgcgcaagaacagccgccgcattccgcccattcggattttttatgaataccaaaggaaggactccgtcaatttcgtacaaaattccctcggacaaaagtccggcacgccgcccagattttaacgccggcacccaatccgctcggaatccgtaggctttttccgcgattccgacagccgcttcgcaaattgaattgtctatgctctccgcacctttgcaaaattccatatacttggatgtccctgccccaagagaatctatctcgcaaatcatgcgctccgcgcgcgccgcaaaggcggcggcggattccccgggaagaataaacattccaatagaatcgaaaaatacggcggcgtcaaatacgtcggccgcattcccggacagcaaattgtcgagatttttacgctgcgtacccgtcatggtatcggcagggaaataatagttattattcgctggtagaggtgaactattccttcgcctatctcgccaaactctcctccaagccaagatgaacggtatatcatagcggacgcgccgaatacgagcggcaatatggagcacaatagcaatgtgtattccagtaaaaccgccccgcgccttcttgccgaaagcctcttttttatatcgcgcgcgccttttcgtttgcagagcatttatagcctcctcgcactctcaaccgcctcagtgcctccaaacgcggtttacaatcgggtcccccggtatgccattcgagagtatccgctcttttacgtcttttattttttcggcatctatcggattgtatttctcccacgccgaatattgcagacgcctaaattccctccatttttttgcaaactcgtctatatcgtcttttgatacgcttccgggaggcgcaaaataaaaatacgccgccttagaaacgaaatattttcgcccattcggattttcgcgcacaatttcattcaacatttttaacaggctttcgcgagtctttaacacgtccgcaatcttcccccgaagctccgatattttgcctttgagcatccatttgttttcgggcatggaaaaccatgctaacgcctcctcggcggctttgtaggtgtcggaaagctctatgcagtccggacggtgctgttctggcaaaagcagatccgtggaaaatatatttgtggacagtgtcggtatttgggaaattatgtcgtaaaaatacttaaaccctaagagcttgtcgtattcgtctgcatatccgccctctgcaatctccgcaggctggcttttcaagcttttgaaggacaataattcgtcccacgtctgccttgaattaaagacttttgctacttctgggacgcccgcgtcgattccatattcgcttatgttggaaattatgtactttatcgcgtcggtgccttttaatatctgcgaatttctatttattatctccgctcgcaactttgatatagaatcgtaattcatgcactcgtcgggcgatataaagtctatctgcctttcgagttcgccgaagcgtagattatagaacttttcctgattgctccttacggactctatattgcccctcatcttttttatcagctcctcggcgtgctgggctttcattcttacgccgcccatcgagtcgcgcttgatgccgtctatctgggatagcaatttttggatatctgcgtcctcccaatttatttccttcaagagcttgtcgagcttctcgaggtttgcaaaattcgccctaagctcgtcaactttctgcgatattgccgcgcaaagcggccgcaaatattccggcgcccccttcccaaaatccgcctttacgtagggcgtcttctctatcttggaaagttcggacttcatattttccgccggcaaatccgtatccgagagcaaatttgaaagcgcatacatctggattaaatgcgatttagcttcacccgcctccttcatgtattcggagacccccgcgccattccagttccagtcagactggttttccaaatgcagctgccctatgcacgacgtcgcctttgcccattcggaattctttaagtactccttaaatttcccgaataccctgtaaactgtctcgtagcgcaccaacgattccttgtattccgggtattcgtcggcaaacttcttaaattccctcgaatacggaagcttcgacagcattccccgcgcgccgtcaaagtcgtcgtttttcaaatattcgtcgtactcgcctattacactttccgaagtcggcgtcagcgcatagaatatgccgaacaccataaacgtcagaactaccgtcgcaaaaaccgccaatatcttttttgcggcgtttgtgcgcgtatggattacattcatatccaaaaagcgcaagtcgtaaaatgctatggaaattatgtcggagtccatcagcattctctcggtgcgccccatcttcgccccgttcacgtacgttccgttttggctgcccgtatccctcagccatgtctgaccgtcgtcggatattttcaattccgcatggtgcgcggacactacgtcgtcgtctataacaatgtcgttgtccttcgcggagccgattcttatcaaagaatgttcaagccttgccattgagcccgcgagggggccgtttaaatattcaagcctatgaacgtcgcacgggcggtcggccgaagactccacgcggcttacggtcagctcgcagtcgcctatcgacacgcggtctccgggaagcagctttttgccggaaatctcgcgccctttatacctgaacttcccgcctttgagcgccgtcagcgacacgtctttcggagttagcgtaagctgcccgcgaaaatcgcccgacgacctgtcctcggcaggtattatccagtcgttttcaggagagcggccgattgttatgcgatctcccaaattgtccgtctttgccgaatatgcgagagtcccgcggcatctaaattcgagcaaataagaatatcccctcaccgcatgttccccggcggcggaatccttccccgcttgcttgcgacgcccgaaaagcgcattgcgcagcctttcggcgattccactcgcgccgcgcggctctggtttgttttcgtcggcagccattattcaacactccaatcgtttttcattatgcgcgtgtagcgatagtcgttcagaggttcaaacttttccagacaatcgttcaaaatccgggttgtttcgtcttttttgccgtccctcagcgagtccgaatattcgaggcattttctcgaataccataccttctgggcggcgcggaatttttccaaaagggattgcgtggcgtctatcagcgggcgctcgttgtttttgtacgcctccacaaaaaggctgctaatcagcaaatcgatatcctcccaagaggctatctctatgtttttgcggagctcgcggttcagcatttgaagcatcttagtagtattttcgcgcaggggcttttcgggaacctcccaatacctcgcaactgtagagttcgccacagacatgcagtcgtagtccttcaacagcgacgaagccctccaatactgcgtttcgggaacctcgcgcataagcactatctgcttgtccagaaaccgcgcatagcaggctaccccgcgccataccatcggccccgccttgcgcgtatagttgattcttatgtacggatagccgttgtcgcgcttattgaaaaaatcctcctgcggctcggacgtaaatttcattccactgtttttttcggcagcggcaagccactcgtcaaaactcttgcgcggcgtctttgcgtagccgtcctttaccggtgtcgcctcaaaagttatgtgaaaaggcacgtcctgattgcgcccaaccgccgtcaacacttcaaaattcgagcctttcgcattctttaccatcgctgggctgttcggataatatatcaaaaacttaccgttgtcgccaaggtcgatacgctgctcgccgtcgtcgtacacacccgtcacttctcccggccacgtcacgggattttcaacgccgctttcggatatgtaatacgccagcccgagtatcgcaatcgatatgaaaattccaacgaccaccgccagcctgcgctgccgctccatcgacttgttcgccgcgcgcaaatccgcaagctcctccgccgacgcgtagcgcgtgtgcgatacgtcttccccgccggaatcggcattcagtccaccgcttgcgggattcacagtggcttcgccgtaaatgtcgatatcgggctcctccgaatgggcgagcgcgccgtattcctcaactacaaatgcgagagactttccaagctttacgtcgtcgccggggcgaagcgcagcgtcggtacccgccgaagcctgcccattgcgcacgagcgcgtcggcggaacaatgcatcactattcctccgccggattgcggaagcagcgtcacgtgctcctcggcgactccggcgtcggagctgcgtatgtcggcgttcatcgacgagcctatgacaacgccggattcctttacagcgaaagaccttccctccaaatctccgtttatgaatcgtattttgtatcgcgccgtttgcattttaccttaaaacagggaaacccccgcctctttcattcttatgtagatgggtgttaaaattattataaataccgcaggcattataaatatcgccataggcagcagcatcagcgaaggcgccctctgcgccttgcattccgcgagggcaaaacgcgccttccgcatttcctccccctgaatttccatcgtttccgtaagcggcgaaccaagctctgttccaagctctatcgccgatacaaacgacgtaaactcctttatctgcacgcgaagcgccatattgcgcagcgccgatatgcgcgtcacaccaagctccatctcatgcagcattctaagaaattcgtcgcgcaaaggccccgcgtccgaaaggttgacgtaaaacctaaccgccgccatgaaatcgagccccccgcgcattgcagagcctatgaggtctattgagtacggcaggctcctcaatatcgccgtgcgcttcttgtccacaatgttgtcaattcctgtcctcggggaaaaccagccgacgaaaaatccgagagccgccccaactgcggcgtacgcctcctcctcggcggcggcaaacgccattccggcaaacaataccgatagtaccgccgccaaaaacacctgcgcgcaatacaccttttttgcgttcgtctttaatccggaaaattctatttttttctccaatgcggcagcgcccgaacggaatatgcggcagaggaaaccgccaaggccaaggcgctccaagacattggtaaacggctcggccatctgaagcgccgcaggaagctcaacttccgcgctgcgcctcggagacttggcgaccttcacggatttgtccgacatacaataaagtattgtcggtattattaccgccataaaagtgaaaatatatacagcatactcgcccattttctacaccttcacgtccactatcttgcgtataacaaaataaccggtcacctcaagggccaacataatccctatcgcgcaccaccctattcccgtcgtcaaaaggggcatcatcagctcgctgtttacaagcagcaacaacaaaaacgccgcaagcggcgcaagcgacatcgccagcgcctcaaacctcccttgggctgtcagagccataagcttctggtggaattcggtgcgcgcgcgtatggtctgggttatccgctggattacgtcggcgaggcttccgcccgactgggttgtcaattttatcgagactatcagaagctggagatcctcgcagggaaccctctcgtacattctctggagagactccgacaactcgagcccgagccgatactcacgaatcactatcatcagctcctccttcatcggcccttcgcaccgcctcgaaaacgcttcgagcgcctgcggaagcgcctgtccggaacgcaacgcactcgtaagccccatcgccaaatcgagaattccggcctcaaactccttcgccctcgccttcgcctttccggagaaataaatccacggagccctaaaccccgccgcgaaaaacataaccccgcctactattaccgcaagcggattgtacaccccgcaaaacaacagtgtgcctacaaaaagccccgccgccaaaatgcctattgacgtctgaagctgccttagcctgatcttgtctatgaaacgatagacgccgactgccgaaggcgacactaaacggctccgcgcccccttctccgcgcgctccacgctaaacgactgtatgaagcgtatgcacatatatatcaacagcgacgccgcaagcatcaccagcagatatattccaacacgctgcatttctgaataaaccatctcagccctccggtacaaatactgacatatccagcttcaagtcgcccgactgtctgagctcctcaataaatctgggtatgttgccagtggctacatgcctgcccaccaccttgaacttttcatcgtagccctcctgctcgtaagtgaaaatatcctgcaacaaaatcgtgttgttttcgcggccgcatacctccgttatcttaacgatttttctcgagccgtcgggcatgcgcgtctgctggactatcagatttatcgcggacgcaatctgctcgcgtattgcggacgacggaagctcgaaccccgccatcatcaccatattttcaagccttgaaagcgcgtcgcgcgggttgttcgcgtggcaggtcgtcatcgagccgtcgtggccggtattcatcgcctgcaacatatcgagcgcctccgctccgcgacactcgccgactatgattctgtcagggcgcattctcagcgtgtttataaccaagtctcttatcgtaatgcgcccctgcccttcaatatttgcgggccgcgcctccaatctgcacagattctcgtgcgtaagcttgagctcggcggagtcctcgaccgttattatgcgctcgcgctccggaatgaactgcgacaatatgttcaagagcgtcgtctttcccgacccggtgccgccggataccaatatgttgcgcctggacctcacagcctcctttaaaaattcggccatcgggcggctgagactcccaaagcgtatcaagtcctcgtcggttagctttttcgccgcaaactttcgtattgtcacaagcgacccgtcgagcgacagcggcggtatgacggcattcactcgcgagccgtcgtcaaggcgcgcgtcaaccatcggagacgccgcgtctatgtgccttccaagcggctccactatgcgctggattatcgactgcaaatgcgcctctccattaaagcgcactcccgtcctatactgaatcccattgctttccacaaaaatattgtcagggccgtttatcattatttccgatatgtctgtcgccctcaatagcggcgacagcggccccaacccgattagatcgtccattagaacggcgcggaacttttctatctgtatgctgccgggtatgcggtgccgtatctcacgcaatgcctggtcgagcgcgtcctcaaccttcgggcgcattccctccgcggatattttgtttgaaggagcccccgttatattgagtatctcgagcacgcgcgattggacaaccctcgcaagctcaagcatttcgtcggaatacatttcagtttccgtctgggcgttgtaaaccggcattccgccccccgacggcggcggcgccttgcggccggctcccccgcccgccgcctgcgcacccgccgaaactgacagctcgaacccgccaatctttatattgtccgacggcgacaccgttctgcgtccgctaatcctctcgccgtttatccatgttccggacgtgctcgaattgtcctctatgaaacagccgttttccgccgcaccaacaactgcgtggcgcctcgaaaccgtcatgtcgtcgaggacgatatccgccgcgtcggagcgcccgattgtcagcactgcgttttcgggaatctcaaaaaatctcgaccgcccgtccgccgatttaactttaacgcgcgctaccatgtaaacattttctctgcgcgcgacttgtttgaattctcgcgaagctcatccgcatcgggcgcaattcccttcgagacgtccccctcgacccccgacgtttccgccgacggctttgaaagcatttcaacaccgttgccggcaatctggggcgacactaaaatcaacaactgcaactcctcgacattctcctcctcgtagccgaaaagcgagctcaatacaggaacgtgcctgaggaaagcgtatccggagtcgctctttgtgcgcgtaatctcgcgctggccggatatgaccgccgtctgcccgagattgcagacaatctcgctcttgcttctggtcttgcgctggaggtagtcgtcgtcctgctttattggcgcgaggctcttttcaacctccaatatcagccgaactttgtcggcctttacaagcccgccgctgacttttatcgtaagcccaaaatttatctctttgagatcggcaacgtccctgccgtgtatctccacattcaaagttccgccgttttcatacactgcctgctgcacgccctttgaattgctcgtaatagtcacatggccgccgtccctgaaatcggagacgccgttttcgccaaaaaattgtatggcgccttgaatgccagtattcatgtacgcaagcccgccgaatccggatttctgaggcgcgtcggaaccaagccccgggggaagctcgcccgcaagatacctaaaccagctctgtaaatctacggaaagcaccgtgccgttcgccccggaatttcccatgcgcgcaagctgcgagcgcgtgacgcccactattacaacattgacgtcaagctgagtgtcgtcgacttccaaattgtaaaccacctccgtcggattggggcccgcggaaagccatttctgcgacgacactattttcttaatctcctcaatatcgttgtcgcacagcattcttccgtaaaatgtgagaatgcccgacgaaattttcatgccgacagtcccggcctttttcgggatgtcgttctcgaccttgaatcccgcgtcaacaagctgccttctgagggagtcgaacatctcggggccgggcttgtaagcaacatagttgcggtaagaatcgcggtatttgtccaagatattcataaacgcaagatagcgcgagtatttcgatatttcgcccctaagagttatcgcattgtgcgacatttccgccgtcacctcggagaaatccgatatgtctttgcacaagtcgcggtacagcgacgcgagcgaatttgtgacatgcaccttgaatgtctttgacattgagtttgaattcaaagagatgtccgcatagccgggttcaacccccttaatttcaagccttcttccctttggtcttaaaatcttaacactcttggaagacgattcgtacccgattatttcaaatggaacttcaagagtcctgacttcgtcctgagagattgtgacgctttccgtcggcaacgccgcctgcgaacctgcctgcgatggcgcttcgccactctgagcctccgcaaagcccgacgtaggcacggcaacgatagccgccgacaagagcagaagaaacggagaaaatgctgattttaatttatagtatttcatctaacgctttcggttggtgaagaaggcaattcggcagattgcaaacccttgcgaatgccctcgaaagttttttcgtttactacgccaatttccttcctgttaagcgcgctggaatcgttgcgctttctaagcacggggtaaagctcagcctcgcgctgcgctgcaattacaatcattgcctgctgcggcggcagagacacaaatatcgtgccgctcgaagtgccggactccctaaaagagccgttgttgttggcaatcccaataactctcacgcacggcaatagcacggaagtctcgcggctctccgcctctctcacagccggggaaattgcattttcgttttccggaacgcccgggatgcgctcgaccttccgcgaaacgtacgtcgaaacaattccgatttcatcgttgggccttaacattttaacaagagccggatccgaaaacgttatcgggatagtccactctccctctttcgagcaatcgcccaaagatattttcagctgaatgtcgcttattaatatgtagtcgcttctggcgatggaatgctgggcgcgctgcccgtaaatcatagcgacattttcccataataacgcgccgtgcggaagaacggatttgggaatgtcgcggtatgtaagggacccctcaacaagttcttcgtcggagtcaatatcccttgcggcgacaattatagaaattgtcgcttcgtccttagtttcctttctatcgaacagagtcttacttacgacaaaaaccgcagcgaggccaagaacgaccgatacaaccaaaggtattatgtttttcattgtatttttttctcaataaacgatgcggttttgtcaaacttttaatcccataccgcataggtattaatgcaattttaatatcggagaaatgcctttaaacaaaatagccttcaagccattttgcagatagaaaattgtgatattaaaaaaaaggaacaacgccgctataataattcccaagagtctgccgcctaaaataaaagtatagacatttccgatagacagatattttctgccaatataggcaaaacgcgcaaagcatatttgctgacatcttacgaaaaaaataaaataccgaaaggctaggagaaagcatatatgaaaaaagaagaaatcgcattaaagatgaagcaatttgaaacaatgataaatacggctgacaaaagtctggcggacgagttgattgcaagcgacgcttcgttctatacccccgcatctcccgaacccgtattcggcggagacggatatttatcggtagtgtactttatgcgcaaaggtttttccgatgtacagtggaaattggaggaattgatagccggtgacgataaagttgctgtgcgctggacatgttcggggacaaacgacggagattttatggggataaaagccaccggcaaaaaattttccgcctgcatgatgaatttttattattttaataaagacggaaaaatcgtaaacgatgtagccgcagaaggaatgatagcaattgtaagggcaatagggctgatgaaatgagtccgaaaataagtagcttgcatattggcactgattatcgcgttatataaaatatagaagttagattaaaaatttaactatatataaattttttagcatttcggcaagcgctgaaatatattttagatattatataaatagggggaagagaaacaataaatgcggtcgaataaaacggccgcacatagttattatgcgccgtagaaatgagttagttttttaaaaggataattaaagagaattaaagctattacaagaatatcactccgataataaagagataaaaccgcctcatataattttataaaaaatgccaactcgcctcttagtgaaaatattaaatttttgtatctaaacattcgggaagaacaaaatcaatatagtccatagtaaagtctatggagaaaaagattgatgcgaaaaaccactcaataaagggcgcgggaatatcgtagaattgccgctttgcaatatcgtaactatcctgtaaaatcaactcacgcccccacgaggaatcgaacctcgatttggcgtttaggaacaaataaaatattgttaattgcaagcatgttaggggatttttgcccaatggtaaggcaaatccttaccaaagcgcaattttgacaggaaaggattttgtatgaagaacagatctcc

SEQ ID NO: 1208 - DNA, 3058 bp, Unknown
  16S sequences of unknown bacteria
tatggattctatcttggccatctgaacgcgtataaccgtgacgcatggtcagacacgagcgcaaatggatacaaaaagtgggagatcaagggcaatggcgcttataacgaagagggaacttctcgttatgagaacggcggaactggtttcatgatccaggccaatcagcaggaagagacgctgaatggctatggcccgagcgtcgcgaccgacaatgtgccggatggcgtgacgtatccgtataagtattccgcacgcgcggtattggatgaatataagaactatgacattccgctcggattcttcctgcccaacgatggttatggcgcaggctatggtcagaatggctacaacatgaccggcggcgtaaatccggatggcaccagcagtgaagcgcgtctggcagcggtagcggccaacgtcgccaacctgaaggacttcgtcgagttcgctgatgagaacggcgtggccaccggtctgtggacacagagcaacctgacaccagattccaacaataacacgtactggcatatcctgcgagacttcaatgcagaggtaaaagcaggtgtgacgacgctgaagaccgatgtcatgtgggtaggttatggttattccttccagctgagcggcgtgaagcaggcttatgatatcatcacgacgatgacgtatgaggatggccgaaacaacacccgtccgaacatcatctcactggatggctgggccgggtcacagcgttacaattcggtatggaccggagaccagacgggcggaaactgggagtacatccgtttccatattccgacattcatcggacagtcgatgagcggaaacccgaacatcggcagtgacatggatggtatccatggcggtgcgccgatcatcgcgacccgtgattatcagtggaagagctttgcgccgcagatgctcgacatggatggctggggcacatacgcaaagatgccgtacgcgcatggcgatccatatactggcatcagccgcatgtatctgaagctgaaggcacagatgatgccttatacatacacgaacgcctatgcagcagcgaacatcgatacgggcaatggcgatcagggcctgccgatggtgcgcgcgatgctgctggagtatccggaagaagcggcagcatatacagcagcttccatgtatcagtacatgtggggcgagaacctgctcgtcgcgccggtatatcaggataccaacatcgatgagatgggcaatgatgtacgtgacggcatctatctgccgggcggagaagatcagatctggatcgattacttcaccggcgaacagtaccgcggcggacagacgctgaacaacttcgacgcgccgatctggaagctgccgctgttcgtgaagaacggcgcgatcatcccgatgtacgctgagcacaattcggcggacatggacgcggaagatggcgtggacaagacgcagcgcctgatcgagttctggccggcaggcgatacgtatttcaatacgatcgaagatgacggcgagtacatcgagaacaacacagatgattccgataaggaatatggcgtgatcgacaacatcagctatggaccgcatgtagagacgaagtatacatccagcgtggatggcacgacagctaccctgacggcagagaagtcgacgggaagctatgaaggttatgatcagaataaggatacgaccttcatcgtacacgcaagcgagaagccggcggcattggcagcgtacaatggcgatgcggagctggaagaagtcgtggcagaaagcaaggaagcgttcgatgcggcagaaccagctgaaggaacatttgtttcttactatgacgcatcaccggcgatcgagacctatgcatccgcagaggagacgaaccttgcggagatggtgaaagatgtgcgttctaccggaaagctgtatgtgaagtttgcgaatacggattcacaggcgaacgcgcagaagctggtcatcagcggctttgtcaacgacggcaagctcagttccacagagctcaatccggatcttgaggcaccggtgctgagcgagaacgaggaagcgaagacggcgacgagcatcacggtacagtgggacgcagtagaagacgcggactactatcaggtgctcgtagacggacagccgagcgatgacattccggctgaaaagctgaatacggtgatcaatggagcgacgagcttcatcaacactggtctggaattcaagtctacgcatacatacagcgtacgcgcggtgaatgcggagggctattctgaatggagcaacatgatcacgaccacgacgaaggatgatccgttcctgaatacgccgacgccgcaggatatcgactggaccggaaacatctggggcaatcatggtgcggatctcgcgttcgaccagatcttccagatgggagacggcggattccattccaacaatggcggcatcaatgaaaagctgaccgtagattatggcaatgcttatctgtttgataagatcgagtattatccgcgagatgatgccggcaatggtacggtgaccaagatgctggtcgagaccagcctggacggcgtgcattggatccagcatggaccggataccgacacagatggcagaaaggtgaacaactttgcggcggacaacacgatgaagacgatcgatctgagcgatccgaacacgggaagcgaaacgatcggcgcgcgttatatccgattcacggcgctggcatccgtaggcaccttcttctccgcaagcgagatcaagccgtatgccatcgaaggcgagaagacgccgggaagcgcgttcaatccgttcacagtaggaaacacgccttctatgggaacagctgaagctacgcagacaacattccagcagatctatcagagagcatcttctgcgcatgaatcttacaagaacccaacatggatcgcagaagtacagggtctgtatggcgatatcaatttcaatggcatctctgatgtctatgactatgcgtacactgcattcagagcagatggcggaacgacgaagaccggaagcgtatcgggaaagatcacgctgc

SEQ ID NO: 1209 - DNA, 8175 bp, Unknown
  16S sequences of unknown bacteria
ttccgcagaacaggtcgagcaccctcgcgctctcaccgagaccggcaagctccgccgcgcggtcgagcagtctctccgccgccctccggttcacctgccagaaggaaccgggcgagtattcgaactttctgcccctcagctcgtcggtcagcacgcccttaccgcgtatcagccggaactcacgaccgagcacgatgtttgtcctctcggcgtttatgttcagaaagacaccggaaacaaatggaaattcccgcgtcagtctgtcggcgaagtcttctgtccaatccgtctcccttgtcagcacgagcgtcaccatgacatcaccggtcgtctcggacgcgcgcagatagaggtgtctcgcgatgcccttgccggtcgtctcatcatacggctcgacgcggtgttcagttatatattgtctcgtgaactcacatatctccccgaagctctccggcgcgaggcggcagtcgcactctcccggcagcgggatcagctcatgtgaatggtcggcaaaaaagcctatcgcgggtatgtacgcgtcagatctgaaacgcttgtccttatgactcttcttctgatttgccgcgatcctcagccgtcctatcgggtagagcgccttatttctgtatcttgagtcacttcccgctgtcagtaccggcaggacaccgatatccagccccgcccggcgcatcgccccctcgacgatcgaacgcttaatctccgtctcatactcataagtgatattccggaaaacgcacccgccgcacctgttcgagaccggacactccgacgctatccggtgctcagaagctttcacgagtctcacaatccgcgcgacaaaatagctcgacgtcgccttgatgatctcaacgtcagccacgtccccggtgaccccgccgcgcacaaacacaaccgccccgtcgaccttagctatccccgccccgaggttattcatatcaatgacgtcgaccctgagcgtcgcgcctttcctgagctccggcattattcttcctccaaacaaactccaaaaaaaatttccgcagtcccctgcggaaagcggtcatcccgcctgtaattacacgataataaaagcagtcccgccatggccgtgtgcgcccggtatatgaaaacccttggttcaagggctggtgccctcccggctgtttcgtgctaccagcatccgcgtccgctcgtgatgaatctccgggcaaagccggaaattaaccgaaaggctctccaaaagagaatcaggaaacgggcgggaggtctgcatcccatcagccgaagccgggctccatttaattcattgtgggtctcaatccccgggtgatcacgaacccggcaggaaccgctctggtaaaaaacgacgccatttcaccgatcggcaaacgccaaagtcacaatatttccgtcacttcgacgaatcgcgcgccgctttctgtctatagtataccacgatcagcacaaaattgcaataaacaatttgtgaacatttcgcggacacaatcactcgtcagactcgtccccgtcgtaatcaatctcgccgaacaactcatcctcgaatatatccgcaaccctgtcaaactcctcgtcgtcatcaatagtcaccagcatatcctcgccattctcatccgcctcgcgcttaaggatcacatactcctccttatcctcgtccagcggaaccatagccaggtactcaacaccgtcaagctcacaagaaccaagaagctgaaactgcttctcctccccgtcctcgtcagtaagagttattatatcatcagtctcaaaaatatcgtctgccatatctataaatccttccaaaaaatctcaaattcacaagccctttttcagagcccataatatcataccatcttttgagggatttgtcaagggggtacggtcgctttttgaaaaaagctccgcaaaaactttataaaaataacactactgcgctaaggtggagccagcagaaatcgcagaatggagccacgacaacgccgaagacaagccgcccacctcgtcaatcagaccactctcgaccgcctccacgccgtctataacagttccgacatccgtcgccatctcgtccgtactcataagataacgctcaagccgctccggcgaaatacgactgttcttcagaataaacccgtttatcctctcctgcatccgcctgagatactcaaagctctgctccaccccgacaacaagcccattcgtccgcaccggatgtatagtcatcgtagcgctcggcacaataaacgaccgcctcgccgacaccgccagcggcaccccgatcgaatgccccccgccaagcaccacagacgccgtcggcttcctcatccccgaaatcaactccgcaatagccagccccgcctcgacatccccgccaaccgtattgataagcaccaacaacccgtcaacctccgcgctctcctccaccgccgcgagcagcggtatcacatgctcatacttagtagtcttagcgttgtccccgagcagataatgcccctcaatctgcccgattacagtcaggcactcaatcttccctttcccagagtcagtcagcaccgcgccagtctcgcgtatcgggtcataaggcgcgggctccgtctccttcttatcgttctccgtcttattttcgctcatggtatttcctccgatatttctattttacgcatatattattcgctgctgcgcaaataatattgtatatataaacatattttctgtcacgtgtcatccgccattcccggcggttctccgaatgttcacagaatatttctccgcatgagaatagagtttacaaaaattcatattttgattctttacttttcgcggaaaatatagtataataattgaggaacatagtgaggcgtgccggaatttgctgtcgcgaagtatttcgcggcggtttcctgccgctttatccatgaagtttatctgaaaggacttttagaaaatggataaccagattcttgttgaaacttccgcgagacacgtccatctcaccgatgagcacatcgaaatcctcttcggcaagggacacactctcacccataagaaggatctctcccagcccggtcagttcgcgtgcgaagagcgcgtgaccctcgtcggcccgaagaagcagatcccgaacgtcatcatccttggtccggcaagaccggcaactcaggtcgaggtctccttcaccgacgcgagaacgctcggcgtggatgctcccgtccgtgagagcggcgacataaagggcagcgccggatgtaagatcgtcggtccggagggcgagatagacatcgccgagggcgtaatcgtcgcgaagagacatatccacctgacccccgctgacgctgagaagttcggcgtcgaagacaagcagatcgtgtctgtaaagatcacgaacgactaccgcaccaccacattcggcgacgtcgtgtgccgtgtcagcccgaagttcgctccggcaatgcacatcgacaccgacgaggctaacgcttcctgcgcgttcggtaaggtctacggcgaaataatcaagtaattcctgacgttttccgtcttgaataaacactaaatcaaaggagataagcaaatgacttattcacatgaagtcgaaaatatgtgcacggtcgcgaagggaccgaagcacgggccggctcctattcctgaagagggaagatgggtaaaggcttatgagatcaaggatatttccggtctctcccacggtatcggctggtgcgctcctcagcagggcacctgtaagctcaccctcaacgtcaagaacggcatcatcgaggaagctctcgttgagactgtcggctgctcgggtatgactcattccgctgctatggcggctgagatccttcagggcaagacgattcttgaggcgctgaacactgaccttgtctgcgacgctatcaacgtcgctatgcgtgagatcttcaagcagctcgtttacggacgcacacagaccgcgttctccgaggacggacttccggtcggcgcttctcttgaggacctcggcaagggtcttcgttcccaggtcggcacaatgttcgcgaccaagaagaagggtgtccgctaccttgagatggcagagggctatatcctcgagctcgctctcgacaaggacgatgaggttatcggctacaagtacgtcaacctcggcaagatgatggacgccatcaaggcgggcaaggatccgaaggaagcgtacgagtcgaacatcaagacttacggcagatatgatgaggccgctaagtacatcgacccgagaaagcagtaacaggaaaggaggctaatcacaatgtccaacaatgtatcttttgaaggaaaagaaagaagaatggccggcattgaaaagtgcatggctgaatacgggatcaaggatctcgaagaggcgagagaaatctgcctttcgaagggcgtcaactgcgaagagatcgtaaagggcgttcagggaatcgcgtttgagaacgctgtctgggcttatactctcggctgcgctgtcgctataaagaagaatgtgaagaccgccgctgaggcatccgaggcaatcggcatcggacttcaggcgttctgcgttccgggttctgtcgcacagaaccgtaaggttggtctgggtcacggcaacctcggcgcgatgcttctcagcgaggagacgaagtgcttctgcttcctcgcgggtcacgagtctttcgcagccgcagagggcgctatcggtatcgcgagaaccgctaacaaggtgagaaaagagccgctccgcgtcatcctgaacggtctcggcaaggacgcagcgttcattatttcgagaataaacggcttcacctatgtctgcactgagtatgatcctttcggcgacgagctcaaggtcgtttacgagaaggcatattccgacggcgacaaggcgaaggtcaagtgctacggcgcgaacgacgttctcgagggtgtcgctatcatgaagcatgagggcgtcgacgtctcgatcaccggtaactccactaaccctgttcgtttccagcacctcgttgccggaacctacaagaagtgggctatcgagaacggcaagaagtacttctccgtcgcgtccggcggaggcacgggtcgtaccctgcatccggacaacatgggcgcgggtcctgcatcctacggtcttaccgactcgatgggtcgtatgcacggcgacgctcagttcgccggctcctcctctgtcccggcacacgtcgagatgatgggtctcatcggcatgggcaacaacccgatggtcggcgctaccgtcgcctgcgctgtcgctgtcgctgaaggtatgaacaagtaaaaaatccagtattcacgggcatttctgggttttgttaatatctgggaattagctaagatttcctgatttttccagaaaatgcccgtggacaacgattttgtccaccgtttgtccaccaaaaatttcaggcgtggacaaagcaggtgtttttcctcccggcaaaacgccgggaattcgcggatatggcggaattggcagacgcgccagacttaggatctggtgggtaaccgtgcaggttcgagacctgttatccgcaccagatatgcaacctaaaaattgtccctcgtccactatcatgggcgagggattttcgtgttgtattatttgtgatttttgaaagcttccgtgacctcttcaatgcgctccttcacgagattctcacgcccggcgtagaaggtcgcgaagtcctttgaggatgagcttccgaagcagttgccgaagccgagaccggcgtcccatttgtcgtagcagtaggagaagctgatcgtccgcgcgtttgttatgaggtcgagcatcttgttcgagtcctcgtcgcggaggtacttcgccttcagcgcgatctcgtaatacaccgggatgagctgcttgtagccttccgcggagagcgcctcgatgatcacgcccgtgcgcgagggatctgacgcgagcttcggaaccgcgaacatattggagctgttcgcgccgtagaacacccggtaagacttctgttcttcgttgtatttcgggaaaggcagcattccgtagtcgacatcggttgtgcggtaatatgtgccggaatcgccgacaaatccgaaggtgaaaagtcctctgccgtctatgaacatctgacgcatctcatccttagcgtccgagtagctcttccatgtatacagaccgtcactgtcaaaataccatgacttgattatgtcaaaggcgtcgatcatccggctgctcatcgcgctgatctcgattgaatccgccttcttggtccagacaggtatatcgaatacgaccgcccacgagttgtgcgaaatcgtcgtgagcattccgtagaagtcgcccttgtcgtgctttccgtcgccgttcacgtcctcatagacgtccctggtcagcgaaatcagcttgtcgatcgtccattttccgtcgaacacggtctggtagagatccccgatcttgtattcgtccgccttggtcttgttgaaataatagacctttgaagccgcgaactcctcgtactgcaggttgctcgagcagacaaacatacaattcatgaaggtcagatcctccacgagctgcgacgaccaccacggcttcgtgaaatcgagatgctcgacgtcgtacagattgaggtaatacccggataccgattgtgtcgccagtctttttccgttgtttagcgcgacgtcaaacgcctcgtccccggcgagaaggagcttttccatcgttttcgaatgttcggactcatccaaggctccgctctcgaccgattttatcctgacatcgaaccgttcctcgacagtgcggttgcggcggtaggtcgcgtcgttcacgatgtcgccgtcctcttcggacggagtgtacatactgccgtagtcgccgaaggtgtagaaacggaactcgtagccgtcatacttcacgtcggggagattgtcggtgagcggatcggcggtcgtaccatcgccgccggagttctgaccggctgtggtgtctgtgtttcccattgtctctccgcacgcggataacgagaccgccggaagggtcagtgacagaaccagagcaattaacagaaagcgcttcatgatatttcctcctgtgatattttttgatttttttcaggaacaagctgtttcgcgcgggagcgcgggtttatatgaacggtctgcggtcgagaacgagcttcagcggcttttcggtgatgatacttcccctgagcgctcgctgcaactcggcaaggcagcacacagtcccgaagaccgaatggagatcgttttcattcccgatcctgccgtttccgacgtcaaggatcataccggtcatcctctccgccgcctgttcaagacagattctggcttcttcccacctgtggcaggtctgctgtcccgcccttgtcatgcagaagacccagtcaatgtctatgaaccccatatatctcgcgaaatcattccagttgttcccgtcccatatctcaatgcacgagtcgatcaccttgtcaggatatctcagcggcatatgcgcgtattcgtggttgaaaagataatggaacgagcccgccatatggtgagcgagcggcgccgtgccgtcctgagcgcctttcctccagaaaccggtgtccggatcggtgttctcccacagccactcaaagtaccgctgattgaactcgtcaacgccgtcagagccgccgagattcagcgccacgtacagtcccgcgccctgatgcgactcgctccatggcttgtccacccatccgagcgactcaagaaaagcgcgcatctcagcttcccctctgtacttttcgagcgcaaaggcgcggtgttcaggcgcggcgtcaaacagttcgagcgccgccatgcagtgcgcggtcgtgtgtatcggatgatgtgtcgcctcgtgatagagaccggtatccgggtcctgcatcgacctcagcgacttgacccattccccgcgctcgcgcggacaccggggaaaactgccgattgaatagagaatgttcgccgcgtctgccgtgccgtagggattcggctcacggatttcggagaaccggcagtagactccgtcggacaatctgtggctgtcgacgatctccttgatcttttttatcgcgggggtgatgttgattctgtccatactgacgcttaggctcccgcagtggcggaagctcc

SEQ ID NO: 1210 - DNA, 16393 bp, Unknown
  16S sequences of unknown bacteria
agccttatcatgcaagcatgaacggctttttgaccttttgaccctggcatcattttaccagtttcttctggaaatttgtgtttttgatgagccgtgggatggcatggctgtctggctcgttgcctgcaggaataaaaaatcaacctcctggattcacattcccacatgaatccagaaggctgtatgtttctgtatctttctatcctttgtctagtcttccttttttccggttctggcataattgctgatattcttactcttccgaatctcctcaagctcatcgaatacgacatcattgagcaccttgatgtaggttcctttcataccggaagaccgggactcgataacacctgcactctcaaacttccgcagtgcattgacgatgacagaacgtgtgattccgacccgatccgcgatcttgctcgccacgagaatcccctctgtaccgttcagctcatcaaaaatatgaatgatcgcttccatctctgagaaggacagggtgctgatcgcagactttacgatctgaatcttgcggttctcctctgcattctcctcatttacggaacgcatcatctccagaccgacaactgtcgtgccatactcacttaagataatgtcatcaatctcatactggctgccgctcttgtacataaatacagtaccgagccgctctcctgcaatatcgatcggattgatgatcgcctgatacttccgtacattgtctccttcaaaaccaagggtctccagattgacgttctcctttgtcgaaagaaccccgagaagacgctcattcagcaacggatcaatatatccgcctacacggtctacaatcaattcccggatttcttccacgccgtcacataatccgacgcccagcaccttacctttgcggctgattaccagaatattggaattcagaatccctgtcagcacatcgcagatatcattgaatacaaccttgctcgtgttgttgttatgaaggagctgatttattttcctggtcttgtccagcaattgtacactcatttcaaacctcctctacatcttgcttgttctttcctgcttttttttagtttaacacattgttttcagaaaatcaacgtgtattgtctgtatttcaagaaaaaatgtgtcgattcagtcaaatcaacccggaacattctgcattctgccttcttccggcttatctcgattcattaacagaaatcttaaccatatgctgccatacaaaaatgcgatctccacacctttgaaaatcgcagatggaaatcgcatttttatttattacaacactactcattttcttcctttgcacagacatagccacatgccttatctgcacagacgaggcggttgcccttctcgaccatatagcctccgcactgcggacattttttcgccaccggcttctgccatgacatgaactcacactccggattgccctcgcagccatagtaacggcggccctttttcgtcttgcggatcacgatatccttgccgcagagcggacaggccacgccgatcttctccagatacggcttcgtgttgcgacagtccgggaagcccgggcaggccagaaactttccgtgcggaccatacttgatgaccatatttcttccgcattcctcgcagacgacatccgtctcctcatctgcgatctcgaccttctccagattcttctcggctgcctgtaccgcctcatccagatccgggtaaaagttctctacgactgttttccagtgtaccttgccgtccccgatggagtccagcaacgactccatattcgccgtaaaattcacatccacaatactcgggaaagcatccttcataatattgtttacgatctcgccaagctccgtcatatacaggttcttattttcctttacgacatagcggcgggcgatgatcgtcgtgatcgtcggcgcatatgtgctcggtcggccgatgccaagctcctccagagtccgcacaagcgtcgcctcggtatagtgcgcaggcggctgggtaaagtgctgcttgcagtccagagcctgcaaggcaagttccgtacccggctcaatctttcctgccatcgcattcgtttcttctttttcttcgttactgtcaatatagacactgcggaagccttcaaatgcaatccgtgacgtcgatacattaaagcggtactcacctgcacccacctttacggtaatcgtctcataacgtgccggggtcatacggctcgccgcaaaccgcttccaaatcagctgatacagccgaaactggtcacggctcagagaatcctttacttcctgtggcgtacggctgatgtcagtcggacggatcgcctcatgcgcatcctgaatcttcttgccactattatttgcctcaaccttctccgcaacgtactcagctccgtactgctcctgaatgtatgtgcgcgctgccgcatctgcctcgtcggaaatacgggtcgaatccgtacgcagatatgtgatcagtccgaccgtaccacttcccttgatctccacaccctcatacagctgctgcgccaggcgcatcgttttctgcgtagagaaattcagcgcattagcagcctcctgctgcagggtactcgtcgtaaacggagtcggtgcctttttcgttcgctctccttttttgacttcctctacgatatatttttcatcggaaagcgctgccttgatctcctccagctgggcagaagattcgatcgccagcttcttactgctcccatagaaatgtgcgataagcggctttttctcacccggaatctgcagctcggcatccatcgtccagtactcctgcggaataaatgcattgatctcatcctcgcggtcgccgatgatacgcagtgctactgactgcacacggccagcacttaatccccgcttgacctttttccagagcagcggactgatgagatagccaaccatccggtccagaatccttcgtgtctgctgtgcatcgaccagatccatatcgatcggccgtgcgtgctttaaggattccttcaccgcactctttgtgatctcgttgaacgtgatccgctgctgcttcttttcatcgagcttcagcgcctccgccagatgccacgagatcgcctctccctcgcggtccgggtccgtcgcgagatataccttgtccgcctttttgctggcacggcgcagtgcggcaaggatatccccctttcctcttatcgtaatatacttcggttcataatcatgctcgacatcgacacccagccggctctttggcagatcccgtacatggccgtttgacgcaagcacctcataattcgaaccaagaaatttcttaattgtctttaccttcgcaggtgactctacgatcaccagatattttggcatagcattacctccgatggactacactttcacgtagtaatttcgctccacctctcttgccagtcccttttgctcaagggagagcaggcatccgctaagctcggcaggagaaagcgaggtacactctaaaagctcccacaggctttttgaatgcaaaccgagactactatacactaatttttcggagggcgcaagcgtaatatgcaacgcctttctttttttttgctgccggtaatccggaaaaatctgctcacagaagctctctgcagacaaaatcacgcccgctccctgcgcaatcagcgcgttgcagccacggctcagctcatcgtccagccgccccggaaccgccatgaccgaccttccctgctccagggcataatctgccgtaatcagggaaccactcccgtaccgagcctccacgaccaccacgacatccgaaagcccactgatgatccggttgcgcattgggaaatgagtacgaatcggctgcgtccccggcgggaattcggagatcacaccgccttcctgctccagacgctgaaatagtcctgaatgcttcttcggataataaatctccacgctgctcccgacgatggcgcagctcgttccgcccgtctccagcgctttccactgtgccgctccgtcaactccgtaggccgccccgctgattacggtgcccccggcaaatgcaatctgctccgccagctgctctgcaatctgtctgccgtaatgcgtacatacccttgagccgacaatcgccaccgccgggtgctcctcatccggcagttccccccggtaaaacaatccatgcggagcatcctgtaacgtacgcagccgtttcggatagtctgtatgctcacggctgataaattttattccaagcgcttcccgtttatgcaccagctgagcaatctgctccgggctgcgcagctttatgagctgtgcgatcacatttccggcacctgtcattgaaggtacagactccgcaaagcagcgaagcgctttttcagatgcatcatatatattccccgggtcgccaaactgttccaaaagaagggcacgcagtggatagtacagcctgggaacgctgcacagccactcccagtaacgttcctctgtgcacgctgtcgcttcctgttccttctttttattctgatctacttctctttccatcgaaacttctattgcatcgcctgcttttttctgacattccatctttttctgatttctttccatgtcacactgttttctgtcatctgtcctttgtttatctgtcgcatccttttacaaaaagccggtaaagcggacattcgcaatccatccctgcagctctgctgacagggcctagcttcgctacttgctcatgaacgcagtcgcttcgcgcacttgaagcgggggaatgcttatctgcgttcatgctacatcattccatccgatgcccggtacagtatcgcctcatccagatgccgctcctgaatctgcctacagccttccagatccgcgatcgtccgcgctaccttcagcatccggtgatacgaacgggcggtcagctgcttccgcacatagacatcccgcatcttcgcttctccctcccgtgtcagactgcaatagcgctccagcaggctggccggaagctgggcattaaagtgaaaggcctcctgtctgtaccgcgtctgctgaatctgctgtgccatctccacccgtctccggatatccgctgaacactcagatactccttttccggtcagctcctcataccgcaccggctccgcctccacgtacagatcaatccgatccagaagcggacggctgatcctgccaagatagctccggatatcccgctccctgcaatggcagcggctccgatccggaaagtacccgcatttacagggatttcgtgatgccacaagcataaaatctgccggaaaaacatactgtcccagatttctggaaatacgcacaacaccatcctccagcggttgtcgcaatacctccagggtctcctgctgaaactccggaagctcatccagataaagaacgccgcgatgcgccaggctgatctccccgggacgtggcactgccccgccgccggtcagcgcgaccgccgagatcgtgtggtgtggcatccgaaacgggcgctccgtcagtatcccgtcctccggaagtgtacctgcgatgctgtggatcccggatacttccagagactcctccagcgtaagcggtggaaggatcgacggaatccgctttgcgatcattgatttcccggctcccggagggccactgatgagaagattgtgcatccctgcggcagcaatctccgccgcccgctttcccatctgctgcccgcagatatctgcaaagtccaaaagctttgctctgaccggattctgaaatttttcttctatattaatagtcactttctccagtctctgctctgccttcagatgcgcctcaagctcccttaaatgccgcacgccatataccgcaatcccctgcacggcagcgccctccttccggttcgcccaggggatcatacaagcaatacagcctgcccgacgggcctcgatcaccatactcagaatcccgtggatcccctgcacacttccgtccagccccagctctcctgcaaaaaatataccgtccagacttttctgcggaagataaccataagaagccatcactgccgccgcaatcggaaggtcgaaccgcgttccggactttcggatatcacccggagccagattcaccgtaatatgctttggcggaagagcatagccggaatttctcagtgccgtccgtacacggtcctgcgcctcccgcacctctgatgccagataaccgaccattgaaaacatcggaagtccatcactcacatccgcctccacaagcacgcatttactctctatcccatttactgccgcagatatcactctattgaacactctttttgttttactcctttaatatgttgttttatatactatcatatgtgttcttctttttcaagcaacgttctgtgacacaaatacctttcaagaatgccacggcattcttgcggagcgtttttgctttgccggacgaaccaaatacctcacgactctgcagcaaagcagcagggatgcactatccatgcaagcatagccgcctggctcgttacttacaaagaaaggtggcagatatccgctcttgatatctgccacctgctgcttctctttttctatacttttatacacacaaccgctagtaaagcggacattcgcagtcgctccgtgcacttgaagcgggggaatgcttatctgcgttcactttatgccagatgcaaggcatagctcaccccatcagccgccatccgttctctgtaagccatgccttcctcttacggtaatccggaagcacctgcgccacctcctgccagaactgtgtggaatggttcatctgcctgcgatgacacaattcgtgtacaacaacgtagtccaacacttctaaaggtgcaagaataagccggaaattgaaattcagattcccggtctgactgcagctgccccagcgggtcttctggtcacgcacggtaatccttccatatgtcacaccgacctgccgcgcaaaatacgctgttctctgcgccagcacagattttgccctttcacgaagctccttttcctgtgccgcatccagatggatacgtgcctgctgccgcattttttcccgttcctgcattttcccctgctgcatgcgaatccatgacgccttttcagacagaaagcacagaatgcggtcctttggcatacgcacgtgcaatgaccgttccatctgtacggatctgtaccgctagcgtctttctgctgctgcgcaccagcaatacagaaagccccgcaattttcacaagctcctcttttggcatgaaagctccttactgtggaagccagccgcaggccatcggcgacggagatgccagatttacccacggcatccagccgccctccatgcgatgctcgccggtcgctgccggaaatgccgggatgcgctcctcctccagctccggaagagatgggatcgttccatttacataggcaaggacccgttcgcagacactctccatacgtccgctcattgcacggaaacggatatccagaacttcccagccaaatacctttccttcccgcatccagatcagctcacgcaatctgcggcatttttctacccagaccgcaagctccggaatttctttttctgcgagccgctttaatgtatccagatccttcttctgatatgcctcaagaatccgaagtcccatatcagccttctttgcaagcgctaccgcaaatacgtgatagtattccagaagcttcgccatctcgctgccccagaagccgacgcctccttttacctgctccggaagcgcatttgcgatctccgcataatacgggccgtaatgtacgccctcggtctgtccgtcgaaaatgccaagcagcagatcctgctggaacagacattttgccggatcgcttccgaccttcttattgttcatgccctcggtcagaacctcaaacctgccgagctgctgatatacctcatagtcacagccggtcagaaactcaaagcgctcctttatgcgttctgtatccggcgtctcaccaaatccgtactctgcgcacagaagtaccggcccaagtgcggaaaacagcggtgtctccgtgctgtcatccccccacagcgtatagatcacatcacgaatctgctctttgcggcaggcatttaatgccgggacggtcacagcctctgccaccttcagatccggggtaaagcccttccacgtccagccgccgcctgcaaatacgaccctgtccgtcaggtcacggtgcatcctcatataattgcagtaatagtcctcatcgagatgatagtaatcccagtatacaagcgccatcccctccggcggacgctctccgctcttcatatccgtgtcaaacggcacatcgtaatactgctcatttttcgaatgcacacggaaatacatatctgaccagatcatcggctccagtccctcttcccggcagatatccatgacccgtgccatatgcttccggatgatctcacgcttcggtgtgtaaccatttttcagaaggtatcttccaagtccgagtgaccatgcctcgtccattccaagatgtacctttctcgtggaaaagcactgtgcgacctgatgaatgcaggcacggataaaagcatacaccttctcatcacccacacatacgatatcgctcgtatcgcgcagctcgctcataccggcccagagaagcggctgctgcagatgtcccagtgactggatacatggaatcagctccacaccgagcgcgacaccgtacgcatccatctccttcagctcctctgcggtatagcggccccttaaagctccgaaatacggatagcccggcacctcatacgtatcctccgtatacagcatcaacgtattcatgccgaccgacgcctgcatacggatccatgcctttaccgcctccacgctcatgacacagttgcgggagctgtcgaccatgctgccgttgtggtcaaactgcaccgtctcctcttctgtaaacgccgcctcaccattcttctccagcttcatcacaagcgtcatcagcccacggaacagaaatgccttttctgatgccgtaatctctgcctttccatccgcatatgcaatgcggatcgtctctgtagctgcctcctgcaaggtaacttcaatgccgccttcgcaatgatagcctctctcctttaaaagctccgtaaatccgaacccgtatccttccggagcctgtaccagtctgaaatccatggtgttcccccttgtagtttgtcattttctgctgtttgttccaagatgccaggcagtaaaaaagcctagtctgctacagccagtatttttcattttaccttccggtgaggcaaattacaactcttttccactatttattttgaaatctatccctgctttttataaatttcttcactttctgcaaatttttattgactttttcgctttaaagcgctatgtttttaaatagatgaattttacgaggagggacctttttatgaaaaagaaacttgtatccacaatccttgcagcgactgcagtcggcagcatgcttgtcaccggagtcagtgcagaagaggcaaaaacgtacaatatcggtatctgccagctcgtgcagcacgtagcgcttgacgcagcgaccgagggcttcaaggatgccctgaccgataagttcggcgatgccgttaactttgatgagcagaacgcacagggcgattccaatacctgctccacgattatcaacggcttcgtctccaacggcgttgacctgatccttgcaaacgcgactccggcccttcaggccgcacaggcaggtacagctgagattccgatccttggtacctctgttaccgaatatggtgtggcacttggcctgaaggattttgatggtaccgtcggcggcaatatctccggtacttctgatctggctccgctcgatcagcaggcagcaatgctgaatgagctgttcccggatgcaaaaacggtcggactgctttactgttctgcagagccgaactcccagtatcaggtcgatacggtaaaagcagcacttgaggagctcggatacacctgcgaatattacgcattctccgattcgaatgatctttcttctgtcacaacgaccgctgcttccgagtcagatgtcatctacgtgccgaccgataacaccgtcgcttccaacactgagatcatcaacaacatctgccttccggaaaaggttccggtaattacaggtgaggaaggtatctgtgccggatgtggcgtggcaacgctctccatcagttactacgacctcggatatgcaaccggtgagatggctgtcagaattctcgcagacggtgaggatatttccaccatgccggtcgagtacgctccgaacttcacaaaggaatacaatgctgaaatctgcgaagagctcggcatcacggttccggatgattacgtagctatcggtgcagaggcagaggatacgactgaggcttctaccgaagctgctaccgaagctgtcacagaggcagttaccgagtaagtacaccggttttgaattcatcgttaactgtccggatggcctgcagactctgtgttcaggaatgcttcggcaggctgacaggatggctaacgaatcagcttacatattaagaccacatacagcgggaaaggatgcttcctctcccgccgttttgtctatcaggaggactttcactatgaatattataaacctgatcaatgcactgccaggagcagctgcacagggacttatctggggcatcatggcgatcggcgtctacctgacgttccgaattctggatgtcgcagatctgaccgtcgacgggacaatgtgtaccggcggcgctgtatgtattatgatgatgcaggccggcttcggcgtctggccttccatgctggctgcgaccggagccggaatgcttgccggactcgcgacaggcattttccacaccttcatgggtatcccggcgatcctcgccggaatcctgacacagctttccctctattcggtaaatctgaaggtcatgggaaaggcaaatcaggcgatcaacgtcagccagtacgatctgctcgtctcgcttcgttatattaaaggcgttgcattttataaaaatacgatctttgtcgttgccatcttcatcctcgtgctgatcgcggtcctctactggttcttcggcacagagcttggctgtgcgatccgtgcgaccggctgcaatgccagcatgtcccgcgcacagggcatcaatacaaatttcaataaagtgctcggactgatggtctccaacggactggtagctctctcaagtgcgctgctcgcacagtatcagggctttgcagatgtcaatatggggcgtggcgcgatcgtcatcggactggccgctgtcatcatcggtgaagcgattttcggacgtattttcaaaaattttgctctgcgccttctggctgttgcgctcggctcgatcctgtactacctggttctgcagaccgtcatctggctcggcatcgataccgatctgctgaagctgctctccgcacttgtggtggctgtattcctcgccatcccatactggaagggacattatttttcaaagcctgtaaaacggggagggaacagacatgcttgaactgaaaaacattcacaaaacctttaatcctggaactattaatgaaaaggtagccttaaacggcctgaacctgtctctggacgatggcgattttgtaaccgtcatcggtggaaacggagccggaaaatcgaccatgctcaatgcggtcgccggaacatggatggtcgacgagggacaaattctcatcgacggcgaggatgtcacaaagctcccggagcacaagcgtgccatctaccttggccgcgtctttcaggatccgatgaccggaaccgccgccacgatggagattcaggaaaatctggcactcgccaagcgacgcggcaagcgccgtctgctcgctcccggcatcacaaaggcagagcgggaagaatatgtctccttgcttgcaccgctcggtctcggccttgagacacgactgacctccaaggtcggcctgctctccggcggacagcgacaggcgctcaccctgctcatggcaacactgaaaaagccaaagcttctgctgctcgacgagcacacggccgctctggacccgaagaccgcagcaaaggtactcgatctgaccgaaacgatcgtaaaccgcgatcgtctcacgacaatcatgatcacccacaacatgcgcgatgccatcctgcacggcaatcgcctgatcatgatgtgggagggccgcgtcgttctcgatatccgcggagaggaaaagaagcatctgaccgtaaacgatctgctgcagcagtttgagaaggccagcggcgagcagtttgcaaatgaccaggcactgcttggatagctatcctgtatattattttgctctacacgacgcagtttcctgtaaagcaaaaacagaaaaggacatccgatttccgaaatatatcattttgatatatctccggaaatcggatgtcctttttgataagattcgattgttccggtttctacgacactctctcattctccatctcatatacgatatcttccacgtttattgtggacagccggtgtgatacgagcacgaccgccttatgtttacatgactcctggatggatttcaatttactgtgacaagtttcatcgcaagtatttcctttctaaaaagggcctgcctttcagcaaacccttcctacacataagtaatattgtatcaggagtggtgcaagccactcctgataagctgcgaagcagcattcggttataagcaagtagcgaagcggattgcgaatatccgcttgaccgtgtcgagagcgtcgaatcagccctttacaccaccagacgtaaggcctccgaccagattcttctcaataccgaggaacagtattacaaccggaactatggcatacagtgaagctgcaaatagatactgccattcaaccatattataaccgttgaaaatattgataccgaccgtcagaggtttaaacgtatctgtagaaatcagtgtcaacgctaccgtatattcattccatgcattgataaatacgaaaatcagtgcagtcacgataccaggcgcagcaaccgggagcaaaatcctgatcagagcctgaacacgattgcagccatcaatcgtagccgcctgttccatttcagcagaaatacttataaaggtaccgcgcagcaaccagatggcaaatgcctggttaaatgcggcatttataaaaatcagtcccaaaatactgttggtcaggtgcagaaacatcatgaccttgtagatacctatcaggagaaccaccggagcaaacatctgggagacaatgacaaatccaagaaagactgtctggcctttgaatttcattctggataatgcatatgcagcaggaatcccgcagagcatggccagaagtgtagatcccccggcaatcagaacagagttcagcatatagctgcccatcggtgctttagaccagacatctgtcagatttgaccagatcggatgaaccgggaatacagtaccagaagcagcaaagatctcagcacggctctttaatgctgtgcagatggttacgaaatatggatatagtgtaatcaggcagatgatgatgacagccagatacaaaaatatacgtaagactaattttttcccggattttgtatttctcatatcagctatcccctttccttaatacggatatcatataaatacttgcacagataaacaggatcaggaaaccaatgacagaaactgccgcagcatcgccctgtttgccattgtaaaatgcgagcttatacaggtaagtaaccagtgtatccgtccggtttgccggatctcctttggtgatggtccagataatcggaaaagagttaaatacatagataatgttcaataccgtacttacggtaagagacggacgtaccagtggaatcgtgatctggaacatcttctgccagtaatcggcaccatctaccgtagctgcttcataaaatccatcatcaatactctgcagaccggacaggaccgtaaaggtgacaaatggaatcgttacaaagataccacaggctatctcccacgcaaagtaagcgcctgcagtcggcgtccagttgatggcatggtcaatgatccctaatttcaagagaagcgtatttaaagtaccatagtccgtatcaataataaacttccagatactggcctgaataatcagtgtagtagcccacgggaaaacgataacagcacgggcaatctttcgacctttaaaattattattcaggacaatcgccagaataaatccaagaatcgtagatagccctacaacagcaaccgtccagacaatcgtatttttcagaaccatagaaaaagccggactgcccaggaccttttggaagttgtcaaaaccgcagaagcctttgatcagaccggccttactgattttgctgaaggacatgcgaaatacaaatccaatcggtactacaataaagaccgccatcaacaatacgcttggaagaatccatatatagggttcgatgctacgcaattttttcttcacaagaacacctcgtttctattttgtataattaaggcgcacatacacggaaaatggaccggacctaaacagcccggtccattttctgttttccgaaatatggtatctcttaaccagcaatttctgcctgaaggttatccaactgttcctggacactttcaccgagaagcgcattctgctcagcactgataacaccctgctttacatcagcccattcagcttttgctgtcggatagaacttacagttgccaagaatgtcaatccagcttgccatatccggatcggatgctgcaagggcttcgccacctgtctttgtcgccgggaggaacccttccatagccacccagtcggtgtagcgttcatcgtcatagaagtaatatatttctttcacatctcccgtatcttccttccgaccacctccgcaaagatccggtgattttcggcatccatatgctcctgatcctctgcgctgctcttcacgtagtcagaagcgcgaaggaatgcggctccgtatcggttggcgatcttctcatagacatcgccgagccgctttgattccggtgaaaattcggggtcaaagccgtccttccacacccgctcgcccagatagatcggtgagatgaccagcactctgctctttggtgcacactgcctggcctgttccagaagacgcgccacaccttttccgatcacatccgccgatgcggaaaacaccgtcttacaatcattcgtccccagcatcagtgtgatgaactccggctgtccgtgcgtctcgagcagcaccgggaagagctccgtccctctgcgcccctgtcgcaatggatcctcaaagatcgttgtgcgcccgcacagcccctcttctaaaacgcgaatgccatctccttgcagttccttttgcaaacgcccggtccaccgtatttcccacgaaaagcggctcccatccttcggattatatccccatgtgtttgaatcaccaaagcaaagtacatctgtcatttctgtttctccattcctatctgtttgtatcttttattcctgcgaagcaccacatccctgatcctgttccgacacggcacccatcgtattgttgcttgcagccaaatctttatttcctatacatcatagtaacataataggttaatggagaaaactacctttttctgatagctgattatcagaaaaacagataatgacgaattctttttcctgctatttttctttccggaagttacagttcacgatatatatcccggcgcatacccgatgatttttctgacagtcatccgctcattgcgaaagatcagacaggaaagcaaaatagcaatgaaatttccaagcccgctaataatgccgccctttactccggatgtatgcgccacacctatgtaaaagaagaaatactgtacttacggtctgcgcaaggcacaccggaactgcatatttaaatagcgtccgatccggcagcatcaccttcttttcccggatcgatgcaaaaatcagtaccagaatccccgccaaagtaaatcgaatccccgcaaagacaatctgactcgcaatatcagaggactccacctgcataagacgatatcccgtcttaatcaccggaatcgcacttccccacaggatacagcatacactggcaaggagcgctacgatagcggtttttgtcaattgattttgtttttgtgtcattgttctgtttttctctttcctatttataatccttttacaaactcaactgcattttttatatcttcttcatctgggtgcccttttgcaattccaccaaccagtttaaatggaccaaatgtgtcgtaacccttgcacccgaacttt

SEQ ID NO: 1211 - DNA, 14847 bp, Unknown
  16S sequences of unknown bacteria
tatctcccgtcgtagtatccttcagacctacggcagcagcgatatcgcctgcgtataccttctcgatttcctctctcttattggcgtgcatctgcagaatacggccgattctttctttctttccttttacggaattatatacgtaggaaccggattcgagagtaccggagtacactctgaagaatgccagcttaccgacgaacggatcggccatgatcttaaatgccagtgccgcaaacggagcgttgtcatctgtaggactttccgcttcttcttctgttcccggacgaacgcccttgatcgcagggatgtccagcggagaaggcatataatcgataacggcgtccagcataagctgtactcccttgttcttatatgcagatccgcagagcatcgggatcatctcaccggcgatcgtcgactttctgatcgctttcttaatatccttctcagataacgtatcctcttcgagatactgcatcatgagttcttcatctgtttctgctacagattccaggagagcgtgtctccattcatctgcaagttctttcatgtcttcaggaatctctgtttcttcgatctctttgcccagatcatccttatagatctcagccttcatcttgatgaggtcgatgatgcctgtgaaagtctcttccttgccgatagggagctgaacaggaacggcatttgccttgagtctgtcctttaccatatctacaacgtggaagaagtcagcgcccatgatatccatcttgtttacgaagatcatcctcggaacgccgtatctctctgcctgtctccaaacggtttcggactgaggttccacacctccctttgcacagagaacagtaactgcaccgtccagtacacggagagatctctctacttctacagtaaagtcaacgtgtcccggtgtatcgatgatgttgattctattgcccttccactgagctgtcgtcgcagcggaagtgattgtgatgcctcgttcctgctcctgcgccatccagtccatctgagcagcgccgtcatgagtttcaccgattttatgtgttctgccggtatagaacaggatacgttctgtcgtagtggtcttgccggcatcgatatgagccatgataccaatatttctggtcttttctaacggaaattgtctagccatattcgctcctcctttccggacttcttcagaagtctcaagattatattttaaaattgtggagtaatccgaagatcagattaccatctgtaatgtgcaaacgccttgttggcttctgccatcttgtgagtatcttccttcttctttacagatgcgccggtgttgtttgccgcatccataagttccttcgcaagtctctcatacatatacttttcgcctctgagtctcgtatactttgtaagccatctgagaccgagcgtctgtcttctgtcaggtcttacttcgataggaacctgatagtttgcaccgccgacacgtctcgccttgacttctactacaggcataatgttgttcatcgccttttcgaagacttcaagaggttcttcgccggttgcttctttaatcatatcgaaagcatcatatacgatgctctgtgctactccctttttaccgtccagcatgatgttgtttaccaatttggtcactacaacacttccgtaaactggatcaggaagtacttctctcttaggaacgcttccttttctaggcacttctcttccctccttgtctgttataatccgcctcagcggactacctgctttggccacatgccagagcacaggtactcgacagcctgaagctgccgtggtgcgcagatataattctgattagatatatatcattcctcatcatgcatcgcatgaaatcctccgcagtctgtacgaaacgagatcagcatttacgcggtgagggcgcaaaaataacttacttctttgatgcgggcttatttcttaggcgcttttgcaccatacttggaacgagcctgcattctgcccgatacgcctgcagtatcgagggtacctctgacgatgtgatatcttacacccgggaggtccttaactcttccgcctctgatgagtaccacgctgtgttcctggaggttgtggccgataccaggaatatacgcagtaacttccatgccgtttgtcagacggactctggcaacctttctaagagcagagttcggcttcttaggtgttactgtcttaacagatgtgcacacgcctctcttctgtggagacttcgtgtctgtaggaactctcttaagggaattcatacctcttaagagtgccggtgccgtagattttcttaccgtctttttacgaccttctcttactaactgattaatagtaggcattcttttctcctttcctgcagattgtgccggattcgacgcaaacgcataatgataatgataatatatctaaaccattttggcttaaatcataaggacagcggatctccgccggtgctggaaacatgccctccgccgtactcagcggatcagcacgcctgcaacagcggcgccgatttcgatgccgcagcgcattcccagctgacgcttcgacgctacgcgtatgacttccgtcccgtttttcagagccgcctgttctacgcccttcgtcacgaaggaatcagcatcttctgcgatatagaccacagagactttcctctgctcgatcattcggaatgtctgctttacaccgacgacgatatcgcccgtaatccgctcttcagacatggttcacctcataatctttccggtcttactttacctgtatgaatcaaaatacaactaaaacggtggctgcgcacacagccaccgatcgtttgccgcagaccgaacttcagtatatcattctcatactgacaatgtcaatcatatatttcatcggctttttgttaaatttttattcctgaatttcggaaatttcttctgtttcctcgaagaaaagcatattttcttcgttttccgccgtctcagcagcaggctcgtcgtcaatgacgctttcctccgacgcctcctgaatcatcgatatggactcttctcccatctgcgcggcttccgcttcttcgcgctttctgcgcttgtattcttccatcactccgaggttttcgccgtaatccagatcgatatctttgtagatcttcatgccggtacccgcaggaatcagcttgccgatgatgacattttctttcagacctctcagatgatcgaccttccccttgatcgcagcatcggtgagaacccttgtcgtctcctggaaagatgccgccgacaggaaggaatccgtcgccagggatgcctttgtgataccgagaagcgagacttttccggtcgcaggctgaagaccttcttcttccatagctgcgttcgtctcatcgaattcgcgctgcgtatacagggctccgggaagaagcttcgtatctcccggctcatcgattttcaccttgcccagcatctggcttacgattacttcgatatgcttatcgttgatatctacgccctgcatcttatatacacgctgaacttctttgatgagatactggtatacgccttccacaccgttaattctcagaatatcatgaggattgagaggaccctgagtgataccgtttccagcctggataaagtctccttcttttaccttcagacgcgcgccgtaagggatgacatagaccatctcctcgtcgcccataattttgacttctgttttattgtcttttctcgattcgatggacaccaccgtaccgtcagcttcgcagatttctgcgagacccttcggctttctcgcctcgaaaagttcttctactctcggaagaccctgggtaatatccccgccggctacaccgcccgtatggaacgtacgcatggtgagctgtgtgcccggttctccgatggactgtgccgccatgataccgaccgcctcgccgatattgacagtctccccggtagccagacatcttccataacatttagcgcagacgccgatggtactcttgcaggtgagtaccgaacgaatcttgactgattcgattcccgatttttccaccgtttctgcctgtgcatccgtaatctcttcgtttttcgccaccagaagctttcctgtcttcggatgataaatgtcttcgctggctgttcttcccgcgattctcagcttcagagattcgataacctctttgccgtcggcgaatgcccgcacttcaatcccctcatctgtgccgcagtcgatctcccttacgatcacattgtggctgacatctacgagacgtctcgtcaggtatccggaatcggctgttctcagagccgtatctgacagccccttccgggcgccgttggaggagatgaagtagtccagaatagaaagaccttcgcggaaattcgccgtgatcggaatctcgatcgtcttaccggaagcgttagccatgagacctcgcataccgccgacctgcttgatctggttcttgcttccccgggctcccgagtgagccatgatgaacaggttgttcagggaaccgagggaatccatcagttcgtctgcgatcttctctgtggtagtattccacgtctggataactttttcgtatctttcttcatctgacatcagaccgcgtctgtaagctgtctgatatttatcgacgacttcattcgccttagcgataatctccggcttagaatccggaatctccatatcggatacgctgatcgtcaccgcagcgatagtggaataatggtaacccatagacttgatgtgatccagcatctccgccgttccggtgttgccgtgagctttgtaacacttgtcgatgatctgccccagctttttcttatcgcacaggaaatcgacttccaggctgtacggatcctgagttctgtccacaaatcccagatcctgaggaatgttctggttgaaaataaatctgccaaccgtggattccaccagtctgcccggatcgtcttccgatcctttgatccggacctttacgcgggcatgaatacccaccacatgtgtgctgtaagccatgatcagttcgtcgaaatcggcgaaaattttaccatcgccccgctccgcataggtatctctgttttcagaacccgggtgcgtcagataataacttcccaggatcatatcctgtgtcggcgttgtaatcggagaaccgtccttcggcgcgaggatattgtttacggagagcatcagatatctggcttccgcctgagcttccactgagagagggagatgcactgccatctgatccccgtcaaagtccgcattgtacgccgtacataccagcggatgcagtttgatcgccttgccttccaccagcaccggctcaaatgcctgaatacccagacggtgaagggtcggagcacggttgagcagtacaggatgttctttaatgacttcatcgagcacatcccatacttccggctttaccttttccaccatgcgcttagcgctcttgatgttatgagcgatatcattttccaccagtttcttcatgataaacggcttaaagagctccaaagccattttcttaggcaggccgcactgatagaatttgagttccggacctacgacgattactgaacggccggaatagtccactctcttgcccagcagattctgacggaaacgtccctgcttgcccttgagcatatcggaaagagacttcagcggtcttccgcccggccccgttacaggacgtcctcttctgccgttgtcgatcagagcgtctaccgcttcctgaagcatgcgcttttcatttctgacgatgatgtcaggcgcacccagatccagcaatcgctttaatctgttgtttctgttgatgactcttctgtacagatcgtttaaatcggaagtggcaaatctgccgccgtctaactgtaccataggtctcagatccggcggaatgaccggaatgacttccaggatcatccactccggcttgtttccggaaattctcagagcctcgatgacttcgagacgtctgacgattctgatctttttctgaccgctggcgtccttcagcttctctctcagatccgtggagagatcatccagatcgatctgcgtcaggagttcgcgaaccgcttccgcgcccatgcctgctttaaaggaatcgccgtacatgtcccgcgcttctctgtactgagtttccgtcagaatttctttgtacgccagattggtgccttttcccggatctgtgacgatatatgccgcgaaatacagcaccctttccagattcctcggagaaatgtcgagaatgaggcccattctgctcgggatccccttaaaataccaaatgtgagatacaggcgccgcgagttcgatgtgccccatacgctcacgtctgactttagattttgtgatttctacgccgcaccggtcgcagacgatacccttgtatctgattcttttatattttccgcagtgacattcccagtctttctgcggtccgaaaatcctttcacaataaaggccgtctttttcaggctttaaggttctgtaattgatcgtttccggtttcgtaacctcgcctctcgaccagctcctgatcttttcggtagatgcgagacttatctgtaatgcttcaaaattattcagttcgtgcaaggagtgtccccccttttctgttctcatcaaaatagtggttacgttttttattccccgatgcggtcaccggactccgcggaaagtatcctgcggagttttggccgatgttccggagaatctttactcttcgcctgaaaattcttcgaagtcttcctcgaaagtatccggttcttcttccgccgcttccgtgaaaacctcttcgttttcatcctcttccggattcttttccgaaaagcccgagccttcttcgaaatattcttcagcggctgtcgttttgtcgacgtcgctggcgatgatcttttccaattcaggaagcagttctgtatcgtaggaatctttcagttccacttcctctcctctgtcgttgaacatctttacatcgagggccagactctgcatttccttgatgagcaccttgaaagattcaggaatacccggttccggtatattctcacctttaacgatagcttcgtacgtcttcacacgacctacgacatcgtctgactttaccgtcaggatttcctgcagcgtgtacgctgcaccgtaagcctccaaagcccatacttccatctctccgaaacgctggccgccgaactgagcttttccgcccaaaggctgctgtgtaaccatggaatacggaccagtacttctcgcgtgaatcttatcatctacgaggtggtgaagcttcagcatatacatgatacctacggttaccggattatcgaaatattcgccggtcctgccgtctcgcatccagagttttcctgtcggaggaatatccgcttctttgaagagatcctggatgtcctcttccatcgcaccgtcgaataccggcgtagcgatgaaccatccctttcgtctcgccgccagaccgatgtgcgtctccagcacctgtccgacattcattcgcgaaggtacgcccagcggattcagcatgacctcgagggttgtgccgtcttctgtaaaaggcatatcctcctgcggaaggatacgggagataacgcccttatttccgtgacgtcccgccatcttgtcgcccacattgatctttctcttcgtagcgacatagcatcttactaatttatttacacccggcggcagttcgtcgccgttttctctcgagaaaatcttcacgtccacaacgattcccgtttcgccgtgaggcagccggagagaagtgtctctcacttctctggctttttcaccgaaaatcgcccggagaaggcgttcctccgcggtcagttcagtctcccccttaggagtgaccttacccaccagaatatcggaagcgtttacctccgcaccgatacggatgataccttcttcatccagatctctcagcgcgtcctcgcctacgttcggaatatctctcgtgatctcttccggtcccagcttcgtatctctggactcggattcgtactcttcgatatgaatcgacgtcagggcgtcgtccatgagaagtctttcgtttaaaatgatcgcgtcttcgtaattatagccttcccatgtcatgaagcctaccagcatatttctgccgagggccagatcaccattgtccgtggacggaccgtctgcgataatctcaccttcttcaatgcgttcatttttgcttacgatcggcgtctgattgagacaggtgccctggttggatcttttgaacttcagcaggttatatacatccttgccaccgtcgctgtcacggcggatgataatcttttttgcatctacgtattctacggttcctgcattttcagcgatgacgacgacacgggaatcgtgtgcggcgatcgcttccatcccggtaccgacgatcggagcgtccgcgatgagaagcggaaccgcctgtctctgcatgtttgctcccatcagcgcacggttcgcatcatcgtgctcgaggaacggaatgagcgctgtcgccagagaaactacctgcttcggagaaacgtccatatagtcgatcttttctctcggaaccaggtcgatctcgccgccgacacctctcgacgctactttcgcattgacaaatctgtgatcctcatccaaaggctcattcgcctgagcgataatcataggttcttcttcatctgccgtcagataatggatcgtatctgtgacgatgcctgtctccttatcgacaagacgatacggcgtttcgataaaaccgtactcgttcacacggccgtatgtggtgagagaaccgatcagaccgatattcggaccttccggagtctcgatcggacacattcttccataatgggaatgatgtacatcccgcacctcaaaacccgctctctctctggaaagaccgcccggaccgagagccgacaatcttctcttgtgagtcagttcgctcagcggattgttctggtccatgaactgagagagctgcgagctgccgaaaaattctttgatagccgccgtgactggccggatattcatcagagcctgcggagttgccgcttccacatcctgaatcgtcattctctccttgacgactctttccatcctggcaaggccgatacggaactgattctgcaggagttctcctacggttctcaggcggcggttgcccaggtggtcgatatcatccacagtgccgatattgtgattgagattgaggatatagctcaccgaagcgataatatcttcaattaatatatgttttggagaaagctcatgacgtttttcatggagaattctcttgagttccgattcgctgactccttcgttttctctgaggagtttcatcagggcagggtaaaacaccttgttcgccacttttgtgtcggacaagtcatattccacatatgcgccgatgtctacgaaattatttccgataaccttgacttttttcccagtgtcgtgcatatcgtatacccatacgaaaacgatgccggcattttcgatctggaccgcagtatctctggaaatgatctgatcagcttccaccagaagttcccctgtgttcggatctacgatatcctcaaccgctctgcatccggtgatcctgttggaaagtcccagcttcttgttatatttatatctgcctacctttgcaaggtcatatcttttcgggtcaaaaaataacgaatccagcagcgacttggcgctctccaccgtaggaggctcacctggacgcagcttcttatagatttctttcagaccttcttcataattatttgtagtatctctttcgagagttttcagaagacgatcgtcttctccgaaaagttcgatgatttcttcatccgtaccgaaaccgaatgctcgaagaagcgtcgtaaccggctgtttacgggtacggtccactcttactgaaataatctcgttggagtccgtttcatattcgagccacgcacctctgttcggaatgatggttgtggagtagagactattgttcgatttatcgatcgcgaccgcataatacggtcccggagatctgaccagctgtgtgacgacaactctctccgcaccgttataaataaacgtgcccttttcggtcatgagaggaaaatctcccatgaacacttcctgttctttcacttctcccgtctctttattcacaagacgtgcctttacgcgaagaggcgcagcataagtcacatcgcgttccttacactcctcctggccatactttggagaatcgctgagcgaataatcgataaattccaataccagattacccgcgtaatcattgatcggagagatatcttcaaatacttctttcagtccttcttcgataaaccacttataggaattattctggatttccagaagatgtggcatctgagctacttctttgatcttggcatagctcattctcgtctttttgcctattttgacaggctgtggcatattcatcactccttgcatgcaaacaaatacataagtgtagtggcgtagcagtattgtatgataccatatttttaatagttagtcaatcttactttccaaaaaaactatattttgtatacttcattccttttacacaaaaacacataccatcggctacggcgccgcgaaaaagaaacgaagaaagaactccgccaaagatgcggctcaaagcggaataaaaagaaaaaaggcactgcctgtgcagtgccttttgaaaattcagattaccggttaaactatttaacttcgacaacagcgccgacagcttccagcttagccttgatatcgtcagcttcagccttctcaacattttccttgaggttggaaggagctccgtctacgacttccttcgcttccttcagacccaggcctgtgatttctcttacagccttgataaccttgatcttttcgccgcctgcttccttgagaactactgtgaattcagtctgttccgcagcgccgccttccgcagctcctgcagctcctgcaactgctacaggtgcagcagcggatacgccgaattcttcttcacaagccttaaccaattcgttaagctctaatactgacatagcttttatagcttcaatgatctgatccttattcattacgatttcctcctttattgtccgtcttttatatcatctctctatatgaaaggatgacgaaccgatttaaaaaatgcttccgtatgaaactactctgcaggcgtttccgcaggagcttcttccgctgcaggcgtttcttccgcaggagctgctgcaggttcttctgctgccggtgccgactcgccgccttcggctttctgatctgcgatcgcctgtaataagtatgcaaacttggatacaggggacttgatgctgcccataaacttcgcgatcaattcgtctctggacggtaacttcgcgattgcgaggataccctcctgatcgtaaaattcaccttccacgatacctgctttgaaggtcattttatttaactttttgataacgctgttaagctctctcgcaggtgccgtagcatcctcataaccgaacgcaaacgcgctcggaccgcttaacacctgtgcaagggattcgaattctgttccctgaatcgcacggttaaccagcgtattcttataaacagtatagtcgattccggcctcacggagctgttttctcatggaatcagcttcttctacagtgatgcccatatagtcgacgactacagcagactttgctctctcgaacttgtctttgatctcatcaatgacagcctgctttgcctgtaaactttctactgacatatattctcctttccgacacgtccgacgcgtctatttgcatttctgtttcccgcgcccatagcccggaaatttcgtgcatgaagcgtataacgcttccattcggtcaaggttttgcatataagcaaagcctttcccgcagacagaaaaggctcttaatttataaataagacctcggcaggaaattaagcttattcgcacctgctgtctacggcttttgtattcaattttttgtgatgatgtccgcgcaaaacagccgtgatccgcactgtttctgcgaaccgccggactgtaagatccgatcgccggtcactccgctgtgaattaggaaattttgagcggattgatcttaatacccgggctcatcgtcgctgaaatcgtaacgcttctgagatactgtccctttgctgccgccggcttagccttgacgatagcttcgaggagagtattgaagttgtccttcagcttttccggaccgaatgatgctttgccgatcggagtgtggatgatatttgtcttatcaagtctgtactccaccttaccggccttgatttcgcttaatgcctgagcgacattcatcgtcaccgtaccggatttcgggtttggcatgagtcctttaggacctaagatcttaccgagacgacctacgacgcccatcatatcaggtgttgctacgactacgtcgaaatcgaaccagttctctgtctggatcttttttgccatctcttcagcgcctacataatctgcgccggcttcttcagcttccttcgctttatcgcccttcgcaaatacgagaacctttttcgtcttaccggttccatgcgggagcacgatagcgcctctgacctgctggtcagcatgtctggagtccacaccgagtctgatgtgtacttcaacagtctcatcaaatttcgcttttggcatcttttccaggatgtcgaaagcttctgctgtctcataataagtctgcttgtcaaataaagcgactgcttctttgtagcttttgcctctctttggcataatttcctccttgtggtacggacggcttcacgcctcccactcgttaaccttcgactacgattcccatacttctcgcagtacctttgatcatagatgttgctgcatccaaatccgctgcgttgagatccggcatcttcgtctgtgcgatttctctcacctgagcttctgttaaagtagctaccttcgtcttattcggttctgcagatgcggaatcgagaccggctgccttcttcagaagaactgctgcaggaggagtcttcgtgataaaagtaaatgatctgtcagaataaacagtgattactacaggaatgatcattcccggctgatctgctgtcttagcgttgaactgcttacagaagtccatgatatttacgcccttctgaccgagcgcaggacctaccggtggagccggtgttgcgccgcctgcagggatctgcagtttgattaagccttctaccttctttgccattattgtcacctcccttatgtgccgaaacggcaaattcgcaatctatatcaaaaattgcttacgatattttctcgacctgtccgaattccagctctaccggagtctctctgccgaacatagagatgagaactttcatgatctgtttctccatgttgatctcttcgatcacacccatgaaattgtcaaacggaccgtcgatgaccttgaccgtatcgcctacagccacatcaatcgatacgagcaccttttcgattcccatacgccgcacttcgtcgctggtgagaggaatcggatcggaaccgtgacctacaaatccggtaacgccctgcgtattccggatgagataccatgattcactcgtaacgatcattttgatgatgacataaccgggaaacatcttgtgagtcttcaccttgcgctggccgttcttgatctcgaccacatcttccgtcggaacgatgaccgactgaatcagatcctgcattcccctgttttccaccatcttttcaatattcacttttactttattttcgtgtcccgaataagtgtgaactacgtaccatttcgccttatcggaatcggatgaatcgccggctatctcctgaaaggatgccgtctcctcttcctcaggcgtctcttcggcttcgattatttcgtcttcttcgctctgcggaagatctttttcttctaatacatccgcctccgcgtatccttcgtaatcatcgtcgtcgtagaattcgtcatcgtcgtagaattcgtctgtctccaggaactcgttttttatatttttatcgaattttgccattgtttcttttatttataatccgaaacggcttccgccgtcacccttcccggctttatgcctgcgataaattttatacggtcagttcgattccgagaagtttctgtatgataagagcacatcccgaatccacggcccagaaacccagcgcgcagacagcacatacaccgataaccacaccggtatacgagatgagttcaccttttgtcggccatataactttcttcagttcgatttttatgccgcgaaaatattctttaatgctgaactttttcttagcgttttcatttttatttgccatatggttcacttccttaaatcagcttatttggtttctttatgaagtgtgtgcttcttgcagaacgggcagtacttactcaattcaatacgctctgcattatttttcttgttcttcatagtagtgtaatttctctgcttgcattcctggcatgccatagttacttttactctcatgttcacacctccttcggatgactgtaatgttgtatatttcagctgaccagacaaaggaaccgaaaaccggacttcgtctaaagctttacgacacaacaagcggaggtatgtcattcagcatcagcatatatactatctattgatttttgtgcacactaaaaccttgcgcacgtattagaatcgcttagtcatactaccactctttaccgtcaatgtcaagaattttatgatctccatttaaaaatcaccggaacaggcattccgcccgctccggtgatctctgtctcttacgcg

SEQ ID NO: 1212 - DNA, 8387 bp, Unknown
  16S sequences of unknown bacteria
gggcagcaccgccagatgctggactctgttatggagatcttccatctccggggcgactatgacctggatatcatggaaaagagccagaccctctcgaccatcacgacgaagaccctgctggggatggaccacgtcatcgacgaggcccagccggatatgatcctcgtccacggcgatacgtctacgacgtttgccggggcactggcggcgttttatcacaagatcccggtgggccacgtcgaggcgggcctgcggacgtgggacaaatactcccccttcccggaggagatgaaccggacgctggtcggcgatattgccacgctgcatttttcccccacccgggccaacgcggaaaacctgcgccgggaggccatcgccggggaaatcttcatcaccggcaacaccgccatcgacgcaatgaagacgacggtccggcctgatttccagtttacgacgccggaattaaacgcactggactttgccgggcggcgtatcatcacgctgacctgccaccggcgggagaattacggcaagccgatggaggacatcatgcaggcggtccgcgagatcgccgcggcgcacgcagatgtgacgtttgtctatccggtgcatctgagccccgtcgtccgggagtgcgccgggcggaatctggggggcctccccaatgtctgcctcatcgaccccatcaatgtcgaggagatgcacaatctcatggcccggtcctaccttgtgatgacggattccggcggcctgcaggaggaggcgcctgccctgggcaagcctgtcctcgtcatgcgccgggagacggagcgccccgaggccatcgccgccgggacagcgaagctggcgggcgtcgagacagaacgcatcgtctccatggccaataccctgctggacgatccgacggcctatgagaaaatggccaaagccgtcaacccctacggagacggcaacgcctgcagccgcatcgccgacgccattgcctggcatttcggcgtccaaccccagcgcccggcagacttttccgcagaataacacgcgccgcgcctgaggatcctaggatcataaaccataggcatcctaccccaaaagcctcgcagagtttgcgccgcgcacggcgcaaataaagttaaatccgttttttccggcggcaagtgggtgagactccaaacgcgcaagctttgcgcagcgcgtttggtcaagtcgaacccatgcagcgcatacgtcgggaaaaactctttacgccctgcaagtgtggaatttctgcgctgaaagcgcagaatttatgcgcgcagcagggtgcagctccttcaaatgcgagcccagcgcagcgggtcgcatttgagagcgtgtcaaaaagaatttttgacacgctcaggtcacacccccgcgtctgcagctccggctggcaggcggcgggggtgtgtgttacagcagcagaaaaaacgcaatggtcaggtaggtggcgagccggtcctcctggctgtcctgcaggatgagcagcaggatggccaggatcagcagatcgcctgcatcaaagccccgggccaggcgctggcgcagcaggccgggcaggccgctgccaggcttttgcggcttttgcggcggcgcaggcggccgagccggccgggccggtcgttccggcaattccggcttgggcggtacaggcggcatgggcggcggcccgggctgcgggagcaccggcgtccggtcatatccgccgccgccatttggtgtgtaccggctatacatgagatcccccgctttcacgtgtcattttcttgctccagcgtctggagggcaaggcctgccattttggagagctgcgccagctgcagcgcccgggccaggcgcttctggtgcgctgggctgacaaagggcttgagggcctccagcagcgcctgctgcttgggcgcgccggcctttgccgattgcagctgctgggccagctgtagcagctggcccgggtccggcgcgggcggcggggcgttgcccggggcctcagggcctttgggtccgctggattcgccggggccgttgtggctgctggtgccgtcggcgctggcggggccgctgcccaggaagctctgggccagctggaagagcgcattcatttgggccgggtccgcgagcagctgatcgagttgttccgccagctccatggcctcacctctgggcgctgcggttgatctgctgcaacagggcggcggcctcctcggaggataggaacggggcgagggcagcctgggcccctgcggtatcgcccgccttgagccgcgccgcggcctgctgcagcgccgcgccgccatcctgggtaagaagctgcagcagcttcttgcccgccgggctgcccagcacctgccgcacctgctccggctgaaagggcaaattctgattttctgcaaacatgttattgcctcctgtcgcaaggattgctataatagacgaataagatggggcgcggaaagggccgcgccgcggtgcgggcatccggccgcggcgggaagatcccgccatgccatggtatgaccgcacggaggaaagtgtgagcgcagtgaaaattttggttttttcggattcccacgggcgcgtcggcccgatgcagcgggccattgacgcagaggtaccggacctcgtctgccacttgggcgactgcgagcgcgactgccgccagctcgtctgggacgggcccctctgccaggtctgcggcaactgcgatcttgcgccggcgcagcccggtgtctacagtgcagcgtatgcgggctaccggttttttatgacccatgggcatctctacggcgtcaaatacggtctgctgcggctgtcgttggcggcgcaggaggcgggggcggatgtggtgctgttcgggcacacgcatgtgccgtattgcagctgcgaggggggccgctggtttttaaaccctggcagctgcggccagagcgcccagccgacctatggcatcatcgagctcacagacggcgcgctggcctgccgcatcgcagcggcaccgggcaaataaaaaagcactgcggcctataaacggggccgctgggaggaaacatgtatggttttaggcattgacattggcaataccaatatcgtcctgggcggcttttccggccgcaggatcaaatttgaagcgcggatggcgacggatcttctcaagacgtccgaccagtactgcgtagagttaaagagtatgctggggctgtttgatgtccgggtgcaggatgtggaggatgtcatcatctcctccgtcgtgccgccggttctaaactcgtttaagacggctatccgcaagctgacggggctggagtgcatgatcgttggccccgggctcaagacggggctggatatccgcatcgacaacccccgccaggcgggcagcgacctcatcgtcgccgcggtggcggcgatccaggagtacggcgcgccgctgctcatcgtcgatatgggcacggcaacgacgatttccgccatcagtgccgatggtgcgtatcttggcggctgcatctgcccaggagtcaggatctccctggacgccctcatcagccggacagcccagctgccgggcatcagcttgggcgagccccagcgggccatcgggcacaacaccgtcgactgcatgcagtccggcgtcatgatcggtgcggcggcgatgctggacggcatggtagagcggatggaggaggagctgggcgcgccggtgaaggtcatcgtgaccgggggcatctcccggtttatcctgccgtactgccgccgggagatgcactacgacaaggacctgctcctcaagggcctcatcaccctctaccacaacaacgcccggcagaagccgaaggcggcccgggattaaacgcccggggtcaaaagcagaggatcaaaaacgccgtcagcccgacgaagctgcagacgccgatggcggcggtgacgatggtctccagccaggcgagcggcgcaatacggctgcgccggggcggcgcggcggcggtctgcgggcagggcaggggaatgatcttggcggtctgtttcatcataatcataacgtcctttctctgagcggcggcgctggcgggcgaaagagaccggccagattcgccgcctgggctttgcttgcttctatttttattatagcacaaggggtgtccaataatttggacagtagaggcgaaacgaaaaaaagtttgtgcaggcccgccggttttgcagatattcctttacaaatcgagaaaaaagtgataaattattgctgtattgcgttgcatccgacaatgagggcggagcgacagcaaggaggaattgcatatgaaacaccgtttgcacgacgtacggtacctggtgcagctggcggtcctgactgcgcttttgctgctgttggagatcaccgggctggggtatatcaagacacctgtcctggaatttaccgtgatgcaggtaccggtcattctcggcgctatcatcctggggccgggcgcgggcgcgctgttagggggcgtgttcgggctgacaagcttctgggagtgcttcggcaaaagcgagttcggcatgcagctgctggccatcaacccttgggcgacggcggtcgtctgtattgtcccgcggcttttgatggggctgtgctgcggcctgatctttcgggcgctggcggcaaagccgcgaaagctgctgccctttgcggcggcgagcctttccggggcgctgctcaataccgtgttctttatgagcgcgctgctgctgttttttggcgcgacgccgtatctcgtcggcctgcgggcgtctttgggtgggaagtccatcctgggctttgtcgcagcgatggtcggtgtccagggcgttctggaggcagtgatctgcggcgtcctggggacggcaatcgcgaaggcggttttcatagcagtcaaaaaaggcggcaacgccacaggggaaaagatgtaaacgcccgcgcactgcaaaaagcgggcgttgctaggaggcagaaagttttatgaagaaaagtgttgtgactgtgctggttatggtgctgctcatcgcgctgtttgtctacacggcattctgcgggatcggcagcgtggtgcccagcacgcaggacggcgttgtgctcggcctggacctcgtcggtggctctgagattacctacgaggcggttattcccgacgggaccggtgccagcgcgatctccgatggcttgaagagcgcgacgacgatgctccgccagcgcctggacgtgctgggttatacggaagcgaacgtgtaccagtccggcgagcggcagatcgtggtcgaaatcccgaacgtggacgacccggagcaggccgtcagccagctggggacgacggctgtcgtcgaattccaggacgccgacggcaaggtctggctctcgggcgcggacattgcgtctgcaaagtatcagtattccgccgtggacgaaacgggaatcgcccagcaccatgtcgtgctggaattcacgaaggaaggccacgataaattcgtcgaggcgacgaaaaccatcgccagccggacggatggcaagaactatctctccatccagatggacggagaggagatctccgccccgacggtcgatacgaaatacgcatccacgggcattgactccgattccgctatcatcacccttggcaacagtgccgacgccgacagcgcgtcgtacctggccaatatcatcgccgccgggcagctgccgtttacgctggactgtgtcaagcttcaggccgtcggtgcgtccctgggcgagcgaagcctgcagtcgagcctgctggcgggcctgattggtattatcctggtcatgctctttatgatgatcatttaccgtgtgatgggcgtcatctcctgcctagcgctgacgctgtacagtgccgtattcgctgttctcatcgcggtgttccatattaacctcagcctgccgggtatcgcgggtatcatcctgaccgtcggcatggcggtcgacgccaatgtcgtcatctttgagcgcatcaaggaagagctgcacctgggcaagacgctgcgctatgccatcgacgcaggctacaagggcgcgctccgggcgatcattgatgccaatatcacgacgatcatcgcagccgtcgtgctgtggatcttcgggacgggcacgatcatcagcttcgcacagacgctgtttatcggcgttatcctctcgatgatcattatgctgtttgtaacgaaactcctgctgaaggccgccgtggggctgcggatcacgaaccccaaggcgtattgcgcgtaacggaaggagggggcaaacatggtaaaaaaatattctaacttcagctttaccggccattttaaaatcttcgcggtgatctcgattatcctgatcgccgtcggcctggtgagcctcctgcttctgccctttggggtgaagctgtttaacttcgatattgacttcctcggcggtacgacgatgcagtatgagctgcatacggacgtcacggccgatgtcacgagcgacatcgagcagatcgtcaaggacaccagcggcagcgcgccgtcgtccgtgacccgggctggcgactccggcacgcaggtcgtcatcaagatgctggaggtcgactccaacacccgcgacgccatcttcaatgccgtcgccgagaaatatgacctgcaggatgccgataatatccgcagcgatttcgtctcgtcctctgtcggcgcggacctgacgagcaaggccatcaaggcgtcgctcatcgccgtgctgctgatcttgctgtatatctccattcggtttgaattccggtcgggcgttgcggcagtcttggcgctgctgcatgacctgttggtaatgctgagcatgtacgtgatcttccagattccgttcaacatgaacttcatcgccgcggcgctgacgatctttggctattccatcaatgcgacaatcgtcgtctttgaccgcgttcgcgagaacaagaagagcgtccaattcagcaaggctcccttctccgaggtcgtggacaagagcatctggcagaccatggcccgtagcctgaacacgacgttcacgaccctggtcgtgatggtcatgctgctgatcctgggcgtcagctccatccgcaattttgccgcgcccatctgtgtcggcgttatcagcggctgctattcgtccgtctgcatctccggtccgctgtggaacctcttcagcggcaagaaggaaaaggcaaaatagtttttcaaatcatttcacgatttacagtaaagagccagggctattcgccctggctcttttgcgcttttctggagggcgccgcgcgtcggaaagacctgcggcgcggttgtcagagcgtacctgctgaattttctcttaagttattaagaatatgtaaatttctgcgaaaaatgggaaataggggttcaaaaattggtgaaaaaggggtatcatgttagggatgacaacggcgctgcgctacggtgcgcgttggcggcgaaaggagtgtgaagtgacgatgccaaaggcgaaatcgggcgattcccgccgggtggccgtccgggagaagctgcgccggacgcaggcggcggcgccggtcaagcggcagacactgccggtcgtctgcgcggacccagcagcagggctgaccagcggccaggtccgggagcgggagcgcgcgggctactgcaatacgccggtgaatccccccagcaaaagcgcaaagcagatcgtactttctaatatatttacctactttaacctggtgttctttatcctggcggcggcgctgatcgctgtggggtcctggcggaatttgacgttcctcttcatcgtctttgccaataccggcatcggcatcgtgcaggagctaaggtcgaaaaagacgctggatagcctctccatcctctcagccccgaaggcgatggtcatccgcaatggagagccgtttaccttggacacggcgcggacggtccgggatgatatcgtgatcttccagaatggcaaccagatctttgccgatgccgaggtcgtcgaggggtcgtgccaggtcaatgaatccctcatcaccggcgaggcggatgaaatcaaaaaggagcccggcgaccaactgctctccggcagcttcttggtcagcggcagctgcaaggcgcggctgacggcgaggattccttcgtctcaaagctgacggtggaggcgaagaaggggcagcacacccgcaaatccgagatgatgcgctctctgacgaagcttgtcaaatggatcggcatcatcgtcatcccatttggcgtggtgctggcggtcaaggaggttttgtggctgcaccgggatgttgccagcggcattacgtcgacggtcgcggcgctcatcggcatgatccccgaggggctgtacctgctgacgagcctggctctcgtagcgggcgtcg

SEQ ID NO: 1213 - DNA, 2595 bp, Unknown
  16S sequences of unknown bacteria
cacggcttacgccgtgccacctcccttttcccttcgggaaaaaggaggcttttggatggtgctgcttcatgcgatagttccacttcccaaaaggctcccttttcgcaaaaagggggcgcacggaggccgccgcctgtggcggaaacaggccgaagtaagcccaatgaagcagggagtgccgcaagcgaacttgtgagcgcagcggaacgaccatgctgaattgaggacgctgtcggcgtcagccgactgagggattccccccttcgctgtcagcgaagctgactgagggcttatcccctttcgccatcagcaaagcctactggcattgcccttgcataaaatcccattttccccgtctcaagcttttccatccgtttctgggaatttgagataccagaagatggcgatatcctcgcaggcgggcgcgggcatgtttttgtagagcatggtgttcaccgcgccgatttccaggccgcacttctggtaaaaccggcaggcgatcaggttcgtatcctgcgtttccagcgccaggccgcccaagccccgttccctggcccagcgcttggctcgctccatcagcgccgtgcccacgccctggcggcgaaacacgcgcttcacgtcaagatcctcgatgaaggcgtagcggttccaggcttcgtgtagcacgatccgccccgcgcattgcccatttagatagcacaggaaaatcgctttgtccggcttgtcgatgtactccgtccaatcccgcgcctcgtcctcatagaccttctcccggggaaccgccaacagttcctccgtccagcgccattttccctccgcgtaagtgggaatcaagcggccaatcatggcaaacggttcgttggttgggttcgcgtcctgaacgcgcttccgattcagtggcaaaatctccatgttgcgttcctcccgttcctcttgctgcgtgcattataccatatcgcacatgcgttcgcaacgccttttccgcgcaatatcacaaaaaattttttgtgcctcgcgcgtgcgcgcgcgccgggtacggtcgtgttcggtgcggtagtgtcaggtacggtcgtgtcttgtgtggttgggttgggtagggtaatgttttgttttgttatgttgggtacggttgggttacggttgggtacggtttggtctggtagccccgcacgctacgcgaacgctgcgcgtacggtacgcgcacggtacgcgtacgtcacgcgcacgtcacgcgaacggtatgcgtacgctgtgaaagagggaaatgcgtacaaaaaatctataaatttgtttctgaattttaaaagtataggcactgaatagatattgacttttttcggttacatagtataataatacataataatggtataaatggactcgcccacttttggccatcgccgcgcgggcaaaggagaagggcgtgttccccataccaaacttacaggaggaaccaacgctagatggagacggccagttatgaatgcgtgcgctgcctgttttgccgcacgggcaaagaagaatccgttgtggcgctggtggaagaaaatggctggggccgcgccctgtttgccaagcggatgaagcggctgcgcaatgggaaagagtggttcttcaaacccgcgcccctgttgccgggctatgtgtttgtgtattccagcggcgaggacattccgcacgaatccttcctgagcctgcaagacgtcatccgcgttttgcaatatggcccgaggatggataagctcgtggggcgcgatctggaattcgcgcattggctgtggaaactcaatggcgaagtgggcgttatgaaggccgtggaagtgggcgaccgggtggaaattgtggatggcgtgttcaagcaattgcagggcaccatcacaaagctggaccggcggcgcaaggtggtgcgcgtgagcctgagcaccgatggcgctatccggcaaatctggctggcatacgagatcgttagcagcgtggaagaactgcgcttgccgcccaccgcccagcaacagaatccagaggcgtagaatgttgaaaaccgcgcccggaattgcgatggattccgggcgcgatggattgttggcaaaggccgatggttgattcgaaattgcaagttttgcgtttcaaattgcataatcttgcggtttttgcgtggcgaacccctcagtcggctaacgccgacagctccccttgcttccaaggggagccttttggatagtggcactaccgtatgaagttgccctgtccaaaagcctcctttttcccgtagggaaaagggaggtggcacggcgtaagccgtgacggagggattgacacccctgttactatataagagccccaagaccgaggtagccagtcacggcgcgggacaactcattgccaaagttgtacaatggaaaggcaatggcctgacggacaattccaagagcttcgcactcgcgactcagtcagcttcgctgacagcattcctcaattcagcatggtcgtcccacgtcttcgcaccgtgccgcctttagcggcccggtgttccgcccctgcggacttcgcttcgctccgtgtccacaattcggcatggtcgttccgcatcgctcgcaa

SEQ ID NO: 1214 - DNA, 7969 bp, Unknown
  16S sequences of unknown bacteria
tgcagcgggcatttgagaaactgaattaccgggaacagaccttgctcgaaaaacggttagcaatttgcatgacctgtgggcgagttggctcatggaagaaccgccccacttttgaagaattggcgattatgtttgagggcagcactgccagcggtgcagagcgagcctaccggaaagcggcggacaaactgacagaactgctggttgccgaaggtgcgctccatgctgtccggctgaaacagaaatccaaaaccaagcgcaaaaagaaaagcgccgccgcaatctacgaataccaagcagactgcgacggcgaatggggcgaagtttcagttgattttgagaacggcacagcagagattatccgacttgctgattgggataccatgaaaacaaatcgctttgcgaacaaggtgatagcgtatcttctgaactgtgaaaacgagaaactgccaacgaaaacaatgctggcatttgaaccataaaaagaaaaaaccgctacaacattcatcccccctttggaatgagaattgcagcggtttatctgcttgaaactaattattcgatatttgtgattttctaatcatcgtttgccagatgggtaaagcctttgtttttctcaataaccttgataccataaacatctgcaatttgtgcaggataggtttcaaggatttcaccagcgtattcaatttcgatcacatctccgatttcaggttccggtgatggatgcacatttctgatcgacacttcaattcggtctgcactactcaattcccagctaccttcaacaggcttcacaagataattgccattatgaatttccagaatttcagcttggaacacctgatgcgcttcgttggaaaaaccttcaatctgaatgcaatgattcttgaaaaccagtcggccggtttctaccagttcatcagtatgatattttgttttatctacatacaagcggccatcttgatgatcctgtctgagagtgaaatcaaaataccctctgtcagacagctcatagcttactccgtttgcatagtcatagataatgacacggttgtcaatcatgcctgagccccaactgattgaagaacacaactcaggcaaaccgtcgccagtgaggtcgcagaaataggcgttccagattggcatccccgtataaagtgaagtgcttttactacccttaacagccagcatctctccgtaagtccaacggaaggtcacatctggaaactcggtgaggctgatttcaagactaccgtcccatttcatttcatcaggggtttcaaggtaatcaaaccactctattacggaatttatctcgtccacaatacgcacttctacattttctacttcaacataaacaataatgtcctcattggtggggttctgcatattcacaccaatcttaaaccacgtatcattttctgcatcaaattccacagacataccatgcgtaagataagtggctgtgtatccggtttctgctgttttattaacggggaacaaaagaacttctgtatcacccaatccatcaccagaccatattttaattgaatttctgactgtgctgacttcctcctccgtatatacaaattcctcttgacttcctgcgggaacaacaattcgcaatgtatagcggtcttgtttaggattcgtcaggaagcaggccgcaacgcccacgcaaataatgactgcaataataataacccagaacgcaggcttcttataattcatcacagacttcacgcgctcctttacacctacctcgccaaaggcaagaggacaagcggcgatcatgcggcggtttacactacaggcaacaagtgcttgcatataatcggctctctgctcattgccaagttccttgatgactttttcatcgcaggcaagctcaatgtcacgacacagcagaacataagccaaccacatgagaggattgaaccaatgaatcgtcagcaggagaaaaccaagaggcttccaccaatggtctttgcggcgaatgtgcgcctgttcgtgggcaacaacgtgctccagatcctgaccattcatgttgaacgggagatagattctcggtttgataatgcccaggacaaacggagaacttacattctcactctggaaaatgttgcccttgtagcgaacagcggtatccactttacgacataggcgccaataactaactgcggtatacaagagaagggcgccgacaccaatcaaccagataatattcaaaatcggaatccaaatctgaagcgggtttgcactcgtcaatacatgctgtggtggggcaaatgaggatagaacaggattgaccacactattgatcgccggaacaccgctgtctattgtgggtttggccgccatttcaatatccaacggaattgtttctgaacttgggataaggcttaatgcgctctcaaaagagagcgggcaaatcaatctgacagccacgataccccaaagcagaacattgacccacttgggagctttcttcaaaacaagcctgagtatcagcacagccaggataagccagcttgcagatatactcatgttgataattttcaaaaagagttcgttcattgtgaacctcctttcctgatgcggtcgatcatgcgctgtacctcatcaagctcatcttcggacatagcctgatgctttgtaaaagcagcgataaaggcaggcagagaaccctcgaattttttctcaaccagttcatcgatctcacacgcctgggcttcatctttggaaacgagagaagtaacagtgccattgtcgttcttcagcacaccacgctctccaagacgcttgataacggtataagtcgtagtccttttccatccgagttgatcctggcacagctttacaagctcgacagcagtaaccggctcatgctcccacataatcaaacaaaaacgatattcactttcgtgaatcttcggaaaatccatattcacgccctccttgtctacaccattagacttcgcacatagtctaccacattagacagccaaaatcaatagagttcacagaaaagatacaaaaaaattgcccgcagaatttttcccacgggcaaagtgttggttagctatcaagcggtttgtattcagttacagttttcaaataggtttcgggattaccgttcagtatcaaatcagcatatccaatcggatcattgtagatcagatagtccagttctgaccgctgatacatattgtcggcaacctcgttctccactgcgatggtatcaatagaaatcatgctgccatcaaggaatttcagctccacacaggcgttatccatgttgaactcacaagaaatcaatctatccataagaaacctccattttgcgggatgttagatcatcccaaaatatttgaatgcttctcggattgctttttccttctccggtgggcattgtggctgtctggaatcctcggacttcggcagattgtagttcttgccgacttccagtccgcattttctctttatctgagaaatataaaggttggaaacctttaacccggtatgctccaaaacatactccttgatctgcggataggttgctccatcttggaactcggacatatccatatcttccaaagagaactcaacccgaacctttttcgagtcgatctctcccttggaaagcaagaccaccgtctccacatgcaccgtcgagcagaacatatccacgcacgtgaccttctccacccgatatccgctcttgatcagcacatccagatcccgcgcgaggctcgtcggcttgcaggagatgtagaccatatggttgacaccgtaagaaatgattttcggcagagcctttgggtggatgccgtcgcgcggtggatcgaggacgatgaaatccggtttctccggaatgtcgtcgagcaccttgagtacatcgcctgcgataaaacggcaattggaaagtccgttgcgcgtggcattttcacgtgcagccacgactgcctcctctacaatctcgactccaatgacttcctttgccacggatgcaaggatctgggcaattgtaccggtaccggaatacaggtcaaaaacagtctgatccctcgtatctccgatatagtcccgcgcagtactgtagagtacctccgcaccgagggaattggtttgaaaaaaggaaaatggcgtgatcttgaaacgcagtccgagaatggtctcataaaaataatcctgaccgtacaaaattctggtctcatcgctttgcactacatccgcaacggaatcattgatcagatgcaggattccgacaatggttcccttaagcgaaagtgaacgtatctgatccgtcaacggagtcagatcatattccttctgactggttgtgacaagatttaccagtatctctcccgttgtctcagcacgccttaacagcaaatgccgtaaataaccctcatgtgacattttatgatagtatggcgcaccgatttcctgaaaatatgcaagcacacacgacagaattttggtcatgtcctcgtgcacgatcttgcagtctgctgtcgtcagaatatcataggtactcccttttttgtgcagtccgagtgtcagagggccgtctttatacgcatctccgaaggaaaattccattttattgcggtaggcaaattccattgggctgcccttgataccttcaaaacagtaatctgcttttccttcctcatctacctgaccggcatctataattgctgcatccagaagagctttgacctgccgcgctttcatcgccagctgatcttcataaagcatcgtctggtacatacacccgccgcaggccggaaaattactgcacaccggatcacgtttttctatcggagatttctccagtacctccagaagtctgccctctgcctgattttttcgtttcttatgaacaacaaagcggatcttctgccccggaattccgtttttcaccgttaccatgccgtcttctgtgtatacccgtcccttgtttgggaaatccacccgctctatgattccttccagtatatcgcctttcttcatcttgttttcctttcttaatttaaatcgggcagatgccgccagacatctgcccgatagtttttctgattgtcagctgcagaaatgactactcctcgtctgcatctgctgattttacttcttcctctgctgccggctcttcttttgcttcctcagcttccggtgctgtctctgcctttttctcctcgtccatctccgggaaatcatcatcctcaaagaagtcgtcgaagtcatcgtcatcctcgaagtcgtcttcaaaatcctcgaggtaatccggtgcaaagtaacggtacactgcatatgcgatacctgcaactgcggccactgcgccgataatggcaagcacccagagcaccgtattcttattcttgtcctcgtctctcttcttcaatgcctcaagaagctcttctacctttaccataactgccatcctttccgatcggtcctgcgaccgtctctgttaacttgcagtcattccaccttgctttcgcattccgtacagaacgaccacttcgttactagtatatcacagtctctgcgtttttactataaaaactttataagagttacccctctaccttcgtcagctttgcaaaggatgcaaacatttttttcacgccgacccggtcaaaattgaccgtcacttcgtagtcacgaccgccttcgcgaatatcggtcacggatcctacaccgaatttgatatgccgtacccgatccccgacgttgtaggaaagccctccttcttttttcgcctcgacctgtggctgcgcaaaagccttcgtcttaaatgtctctcgcatctgccggtaagctgcatgcgctttcgtctccggacgttctttcttctccttcggctgcacatttgctgtctcgttttctgcgagcacttccttcgggatatcctcgataaatcgtgagacgcggttataatgtatttccccacgcaccatccgctgccgtgcgctcgtcagaatcagcgtctccttcgcacgggtaattccaacatagcaaagtctgcgctcctcctccagatctgccggatcttcagaagaaatgctcatgtagctcggaaacatgccgtcctccatgccgaccataaatacgaccggaaactcaagtcctttcgcgctgtgcaaggtcatcattaccacatgatcggcatcttcctctaaattgtcaatgtccgcaacaagcgctacctcttccagaaaaccgccaagtgacggattgtccgcatgctctgcataggaagctgccttattgagcagctcatcgatattggccaggcgatccagtgcttcctccgtcccttctgccatcagctccttgcgatattctgtctgttccagcacatcctcgatcagctccttgacggaataatacggctgcttgctccgcatcgtctgaatcatctgtacgaaaccatccagctttgccacacttttaccgacgcccggaatcgtccctgctacgcgcaatgcatcgtaaaagctcatatcctctgtgttcgcgtactcctgcacccgattgatcgtcgttgctccgatgccacgctttggcacgttaatgattctccgtaccgccaggtcatcccggccattctcaatcgtctttaagtaggccagtacatccttgatctcttttctcccatagaaattaataccgccaacgattttgtacgggacatttgcaaaaagaaatttctcctcaaacatacgcgactgagcattcgtacggtacagcaccgcacagtcaccgtatctccattttcctgcccctaccttgcggctgatcatacccgccacatattcggcctcttcaaatccgttgaggaactggcgaaaacgcaccttatcaccgtcaccgtttgcagtccagagctttttctctttccggccctcattgtggcagatgacttcattcgctgctgtcagaatattctgtgtcgaacggtaattctgctccagacgaatcaccttcgcatccggatagacctcctcgaagctcagtatgttttggatatttgcaccgcggaaccggtaaatcgactgatcgtcatcgccgaccacacagagattccggtacttggctgccagcaggctcaccagcttaaactgcgctgtatttgtatcctgatactcatcgaccatgataaaacggaaacgatcctgatactgttccagtacctccgcatccttctgaaataattctaccgtccgaaatatcagatcatcaaaatccaatgcattgctcgcgcgcagctgcttctgatattcgcggtatacctcagcaaccttctgctttctggtatccccgtgcacctgcttcgcataatcatccggcgagagcagctcatccttcgccgccgagatcgctgccatgaaaaagcgctcacggtacagctttgtatcaatctgaaagcgtttgcagatctcctttatgatcgttttctgatcatctccgtcataaatcgtaaaatttgttccgaagccgattcggtcaatgtatcttctcagaatccgcacacaggtactgtgaaatgtcgccacccatactccgccaagcgctccgccaagcatcgtctccacacggtcacgcatctcccctgccgccttattggtaaacgtaattgccatgatattccatgggttcacctgcttttcctcaatcagccaggcaacgcgatgtgtcagcactctcgtctttccggatccggctcccgccagaataagcaacggtccctcataatggaataccgcctccttctgttccggattcagcaaatcatatttactcatcttctgctcctttattttcaatcctcatcaaaatctacaaatacagtaaatccgctctcatcagtccgtacctcagccactacaccctcgcgtgtcttcagccgttcgcggttaccaaaattggccgacatcgcgactgccggctcgatcgt

SEQ ID NO: 1215 - DNA, 17189 bp, Unknown
  16S sequences of unknown bacteria
ctggattcatttgaatatggactatcctttccgtctgaaagggatcctgtactttcccaaagtcaaaaataaggcggaactggaacgcggacaggtcaaactgttctgcaatcaggtgtttatcgcggacaacatcaaagaagtcattcccgaatttttaacgcttttgaacggcgtcatcgactgtcccgatattccgctcaacgtctcgcgcagttttctgcaaaacgaccgcgaagtacagaaaatttcccgtcatatcaccaaaaaagtggcggacaaactgacgggactgttcaaaaacgaccgcgaaaaattcgtgcagtgctggaacgatatttccgtatttatcaaagtcgggtgcctgaaagacgaagatttctattccaaggtcaaagatattctcatctttaaagacctaaacggcgaatataaaaatctcgacgagtttttgggcgttgtgcccgagagcgaaacggcggaagaaaagagggacgaggagaaaaaacccgtttccgtctactacgtttccgacgaagtaggacagtcccagtatgtgaacatgttcaaaaacgcggggctgaacgccatcgtatgcgatacgttcgtcgatcctcattttatcagttttctcgaatacaaaaatcccgaaaagtggaaattcatgcgtatcgatgcggatatcgattccgcgctcaaagacggcgaagtgaacgccgacgactttaaggacctgacggaatcattcaaaaactcgctgaaaaatacttctattgccgtcaaggcggaaaagttcaagagcgcggacgtgcccgccatcatcaacgtttcggaatttacgcgcagattcagcgaaatgaacgcgttttacgggcttgcgggcggcgatgcggaccgcgacatgactattattctcaataccgaaaatcccgtcgtagcgtcttttacgggcttaaacgacgagatgaaaaagtttgtcgccaatcagatctactatatcgccatgctgtcctataaaaaactcaatcccgaagaactgaaagatttttcggacaacagcatgcaacttctcaaaaattatatcggttaaaccgcggcgcgggcaatcttgcgaattgcccgcgcatttattttgcatgaagttttatacattcgattgcataaaagtataaaatattgtataatgaaactatgaaagtcggaattttttgtaataagtcgctgaaaaaatatttacccgtgcaaaaagaactgtttcgggttttaaaggaacgcggcatacactacgatgtctgcgaaaacgtggacgacgcggaaggcattgacgtcctcatcgtgctcggcggcgacggtacgatgctgaaagtcgctacggcggtcggaaaaaagggcatcaagattttggggatcaattcgggtaatctcggttttttgaccgagttcgaaggagatgagaccgagagcgccgtcgaacttttgcagggcgattaccgttcgcaaaagaggggcgttttgcaagtctgtgtcaacggccaaaactttttcgcgctcaacgaagtatttttccagaggcgttacaacgaggacgcggataacaacgtcgtatccgtgaccgctttgatcgacggaaaaaaagtggacgatttcgtgggggacgggatcatcgtcgcgacgcccacgggctccacggcatactcgctttcggcgggcggtcccatacttacgcccgatatccacgcctttatcctcacgcccgtctgcgcccattcgctgcataaccgtcccatcgtgtattcggacgacagcgtcatgcaggtgcgtctgaccgacgaggaaggaaagatctccctgttttgcgacgggaaattcatcggcgtgatctcgcagaaagatgccgtctttatcaaaaaagcggattttcaggcggaattcgttgcaggtcaaaacaactttttcgataaattattatttaaactcaataaatggagcaactgatttactatgatgagaagcggaaggcataccacgattctggatatcatttccaagatggagatcgaaacgcaggaagaactttgcgcggagctgaataaacaaaattataaagtgacgcaggcgacggtttcccgcgacatcaaagaactgcgcctgtttaaagtggcgggcgtggagaaaaaatataagtacgcctatatcgacgaggggctcaaccgcatttctccgaaaatgcagaacctgttccgcgaatgcgtgctttccatgcgccccgcaatgaatcaggtcgttatcaagacgctgcgcggcaacggcagcaatgcgggcatgatcgtggataaactgaattttcaggagatcgtgggatcgatcgcgggcgacgacactcttttgatcgtaacggagagccccgaacacgccaatgtcgtcgtggagaaactgaacgagtttttgaagtgagcgtatgctgaacagacttacgataaaaaacgtcgcgctgatcgacagcgcggaaatagaattcggcgagggactcaacgtcctttcgggcgaaacgggcgcgggcaaatcggtgttgctggacagcatcaattttgcgctgggcgccaaagcggataaaagcatgatacggcacggcgaaagcgagtgtttcgtttcggcgtgctttctgcttgccgaggacagccccgtattttcggaactcgccgaaatgggcatagagggcgaggaggaaatgatcgtttcccgccgtttccgcgcggacggcaggggcgatatcaaaatcaacggttcacccgtgaatgccaccatgctcaaaaagatcacttcgcatctcgtggacgtacacgggcagagcgagcatttttatctcttaaacgaactcaatcaactcaaagtcgtggataagttcgcaggcgatgcggtcgaggggctgaaaggaaaaatttccgaaattttatcttccctgcgcgagaataaaaagcgtctttttgcgctcggcggcgatgagaaagaacgcggcaggcgcatcgatattttaaaatttcaaatcgacgagatcgaaaacgcacaactgaaagagggggaggaggaagaactcctcgcaaaacggcttttgatccataacatggagcgcatcggccgcgcgttgagcgaggcgcgcgaggcgctcggcggcgaaaacggtgtgatggactgtctgcgtgcggcaggaagatgtcttgcggaggtcttccgtttcggcgaggagtacgcgtcgctttcggagcgcttggaaagcgtatgcctggaagccgaggatatttccgaaacagtcgccgccgcggcggaagatctgtctttcgacgaaaacgaagcggacagggtggaaaaacgcctggacgtaatccgatcggtgcagaaaaaatacggcaattcctttgcggaggtcatgaaattcgaagaggagatcgccgaagaattggatgttttgcagcactgcgacgaagaatcggaaaaactggaaaaatcgacgcgagaactttgcaaacagttatatgccctttgtaacgaactgacaattctccgtaaagccgcggcaaaagacttttgcgccagggtgagcgaggaattaaagacgctcaacattaaaaacgcgaatttctgtgccgaatttgactcctacggcgaagaagatgcgccgcgcgcgacgcagaacggactcgattcgatgcgctttctcttttccgcaaacgcgggcgaacctttaaaacctttgagcaaagtcatcagcggcggcgaaatgagccgattgatgctcgccatcaagacaaaaatgtccgatatcaacgagatcgacacatatattttcgacgagatcgacgccgggatcagcggcaatacggcgcgcgtggtcgcggaaaaattcgcagatatcgctaagaaaaagcagatcatcgcggtttcgcatctggcgcagatctccgcgatggccgacgaaaatttcgtcatttccaagaccgaaaccgaacagggtaaaaccgtgacgagagtttcccgcttacgggaaagtgaaaagattgcggagattgtccgactggtcggaggcgaaaaggacagcgccgccgcgcaaaaccttgcgggggaactgatcaaaacttctttgcgatataaaaaatagaaagataagcccgaactttccgttcggcctcttttttatcctttcatggaaaatttttctccgtatattgcgcccgccttttacgcaaagtaatgatatattaaaacgggggcgattatgcgaaagtttaaattttctacattgacaatcctattgatatttattatcgcctttgccgtcgcgggaacgcctgtgggcgcttcggcagacggcaaagaagtttatataggaggaatccccgccgggtttacgctcgggctgggcggcgctcaggtagtcggtatctgcgaagtattgactgtggacggcgctaaatgccctgctaaagaagcggaaatttacgttggggatattattttgacattaaacggggttaccatcgaatcggcaaaagatctggacaccgtgcttgcaaaagaaaaaaagacggaatataccgtcgagatacagagagacggcgaggagatgacgaaagaaatcaaacccgccaaggacatcacgagcggaaaacgcaaactcggcgtgctcgtgagagacagcgtatcgggcatcgggacggtcacgtacattgaaaaagacacgcttcggttcggttctttgggtcatcccgttatgggcgaaaacggcgcggctatgaaggtcgctggcggcaagatctataattgcagcatcgtgaacgtcgtcaaagggatccgcggcaaagcgggggaactgaaaggcgtatttctgaatgacacgcatatagcgacagccgaaaagaactgcgattgcggcattttcggtcaattcaaaaaggggtatgatttttcccgattcaaatgcgcgaaaacggctgccgtaggggacacgcatcccggcaaggcgagcatttttacgactatcgacggaatcacgccgaaagagtactctgtgagtattgtcaaggtcgataaaaataataagcaaaacaaaaattttgtgatcaaaattacagacgacacgcttctggctcagacgggcggcatcgtgcaggggatgagcggaagcccgatcattcaggacggtaaactcatcggtgcggtcacgcacgtgtttttgaacgatccgacccgcggttacggcatttccgtggataatatgttcgggaattgagcataaacgaatagaaaggttcatataagatttatatgaacctttcttattatttcgaagaaatcaagacgtcctgcaagacgcataaaattatatttttctgttcccttctcgctgtgatcgcgggaatactgtgcgggatcatactcgataaacctctctcattggatctgtattaccgcgaatattgtagcgatctgatctaccgtatcgtcaataaagaccattcggtcttttcgatattcttcacgaggatcttaaactacgcgctggtcttgatcttttgccttccgggaggtatcatcgtttggtgtcttcccgtgcattacgtgataattttttataaaggctttattttcggcaccgcttgtgttataatgataacggtatattcgctgagcggcgtgatcattttgctgttggtattactgcctcagcaagtaattttcagcggaattctggtgatcctcgtatgtcccgcatacgaaaacgcgaacaataacaggcaatcgggatgtatcgcgctgcgaccgtacgcggatatcgttgttctggcgctgattgtatccgtcgctgcggcgattttggaacttcttacgatcgtcgcagtcatccgtcccttgaatttcattttataggatttttatatgagaatatttttacttgtgatcgacagtttcggaatcggcgagatgcccgacgccgacctttttcatgacgaaggctcgaatacgtacggaaatctttacgcgcgcacgggagtcgaccttcccaatcttatacggttcggtctgaataatatcgacggcgtagccaatctttcttttcccgacggaaaaatattgcgcccctgcgcggctcccgttgcggcgtacggcagaatggcggaaaaaacttttgcaaaggacacgacggcagggcactacgaaatcgcgggcgttatgatgaaaaaaccgtacggaatctacaaaacctttccctccgagatcgtatccgagatcgaacaaaaggcgaacgtcgaatttatgggcaacgaggtcgcttccggtaccgagatcatacagcgtttgggcgaagagcatctccgcacgaagcgtcccatactctatacttcgcaggattccgtcatgcagatcgctgcggatatttccgtcgtcccgctttccaggctttatgagatctgcgagatcgcgcgggagatcatggtcggcgactgggcggtcggccgcgtcatcgcgcgtccgttcacgcacgcagacggtaaatttacgcgtacggaggacagaaaagattatgcgcttccgcctccctccgaaacaatgatggaaaaacttgctgcgcacggcgtgcccacttttgccgtcggaaaaataaccgatattttttgcggtagaggcattgcggactcaacgcacacgggcaacaaccgagaggggatcgaagagacgctccgcctcgtgcgagaagccgagagagggcttgttttcgtcaatctcgtcgacaccgatatgctgtacggtcaccgcaacgatgcggagggatatgcgcgggcgctcgaatatctggacgggcatttgcctgctatcgaaagcggaatgcgcggcgacgatattctgatcctgaccgctgatcacggctgcgatccgacaacgccttccaccgaccattcccgcgaatacgtgccgcttttgatctacggacgaaatatcgcaagccggaatctgggcacgctcgacggattcgatcacatttcgcgattcgtcctgtcttctttcggcgtgcgcggcaattctgaaatatccgaaattttacaaggggaacaagcacatggaaagaaaaatctttgaagacgaacgcgtctacgacattgcggaacagatttacgccaggactgacgtcacgccgtccgtcgggctgatattgggcagcggttggggcgccgtctgccgcggacttgaagaaccgattaccatatcttacgcatcgctgcaaaatatgccgacttgcggcgtaaaggggcatagcggtaattttgtattcggaaaactcggctgcaaaaacgtcgtcgttgcgcaggggcgctttcatttgtacgagggaaaagaattttccgacgtgctgatgccaatcaaagtcatgtatgctttgggtatagatactctcatcttgacgaacgccgcaggcggattgaaccgcgcttatcgccgcggcgatctgatggttttgaaagaccacattaattttacctttcgcaatccgctgatcggcgagaaggctacggaagaatatcctgtcttttgcgacatgacaaacgtttatgacgaagcgatccgaaatattatattagaggaatgcgaagcgttggggctttgcgctcatagcggggtgtatatccaggtactcggaccttcctacgaaacgcccgcagaaattcaggcgttttcgaagttgggcgcagacgccgtggggatgagcacggtagtcgaggctgtttttgcgaaatatctccgtctcaaagtcgctgcgatttcgggtataaccaatatgggggcggggatcgaggacgaacggctcgaccatcacgacgtgctttcacaggcgcgaaagaatgaagaaaactattcaatgttgataaaacgggttgttaaacgcatttgaaattattttgcatagtactatgtatgaaatagttcgcgtatgattgaataaattgcagcagaacacaaataataaaggtatcgaaagaaaaacaaacggagagatatctttatgaaaaaagttttaacggcgatattcgcttttctatttttgttttccgccgtcggcggcgcagccgcttatgtgaacgcggaagaagataccgaacttgcaaaaaactgcaaagccgcgtatctatgcgactggcacagcggaacccgtatttattctaaaaacgaaacgcagcatcttcccattgcgagcatgtgtaagatcatgacgctggtgctgatcatggacgaattggaaagcggttccttaaaactggacgaggagatcgccgtcagcgaaaacgcgagcggtatgggcggctcgcaggtgttcttggaatcgggcacgacttataaggcgagcgatctgatcaaaagcatctgtatcgcgtccgcaaacgattcctgcgtggcgatggcggagcgcattgcgggaacggaagatctgttcatttccaaaatgaacgaacgcgcgaagagcctcggtgcggaggataccgtatatgtaaactgtacggggcttcccaaacagggacagtattcctgcgcgaaagacgtcgccctgatcctcggcgaattgctgcgccacgacgtgtattattcgttcagcaaaatctggatggataagatttcgcacccgaaaggccgcgaaacggaaatggcgaacacgaacaaactcatccgcttttataacggctgcgacgcgggcaaaacaggatttaccagcgaagcgggattctgcctggcagcctccgcaaagcgcggcaatatgcgcgtcgtgtccgtcgtcatcggcggcagcgacagcaaagcccgtttcggagcggtctccaccatgttcgattttgctttcgcgacctgcgagaacaaagtagcggtcgacagcgaacgagtgcttgacgaaaagtgcgaagtgagcggcggcaaaaccgactgcgtgagcgtaaaacccgaacgcagttcctacgtctttgtcaacaagacggaaaatcccgaaatcgttctggacgtcaatctcacagggctgaaagcgcccgtgaagatcggcgacgttgcgggcgaagtgatcgtctataaaaacggcgtggaaaccgaccgcgtgacgctgcgggcaaacgaagaaatcgctaaaaatacgttatgggatgcgatcggcaatatcgcgaaaaactggaacgtataaaatttgaaaagcagtccgaaacaaacagtttcggactgctttactttacaccgaattttcagataaaatatttgcaatccgagcgcatttttggtacaatagaacggtaaagaaaaagtgaggtgaggtagtcaaaacatgaacacacgtccgaccttgaaagtgaatgacaaagggcatctggaaatcggcggatgcgataccgtagaacttgtcgccagattccccacgcccgtctatgtattcgacgaacagtacatacgcgatatgtgcgccgtctaccgcgaaacgatcgaaaacgaatacggcgggaacggactggtcctgtatgcctcgaaggccttttcctgcaaggcggtctataaaatcgtcgccgacgaaaagatcggatgcgacgtggtttcgggcggggaactctacacggcgttgcaggcaggttttcctgcagataagatctacatgcacggcaacaataaattgcggcaggaactttgcgaggcgctcgattgtaaaatcggcgcgatcgtcgtggacgcatattccgaattggatatgctcgacgaaatggcgggcgagcgcggcatggtgcaggatatcctcatccgcgtcaatccgggcgtggaagcgcatacccatcactttatccagaccgccaagacggacagcaaattcgggttttccatatccgacgacacggcggaaaaaataaccgcatacgcgctgcaaaagaaaaacctgcgcctgacgggatatcactgccacatcggttcgcagatattcgaaaagcagtcgttcacgctcgccgtcgataaaatgacggattttatggtaaggatccgtaaagacttgaactttacggctaagacgctcaacctcggcggaggctacggcgtttggtataccgacgaagataaaaagatcacgcccgcaggctatgcagaatatctcaaagcgatcgtggcggaactgaaagaaaaatgcgcgcaatatgatttccctctgccgtatctcgtcgtcgagccgggacgctcgatcgtagcggaggcaggcatcacgctctacacggtcggtgcgatcaaagaaattcccaacgtcaaaaaatacgtggctgtggacgggggaatgttcgacaatccccgctatgccctctatcagtccaagtatacggcgcttctcgccgcgcgcgcggacgagaaacccgaggagatcgtgacgatcgcgggcaaatgctgcgagagcggcgatatcgtatgcgcggacgtgcctctgcccgcaacaaagagcggcgaaattcttgcggttctctccacgggcgcctacaattattccatggcgagcaactacaaccgaaattttatccccggggcggtgcttgcgtataaaggaaacgcggaatatatcgtaaagccgcagacctacgaagatctgacaagaaacgatctgatccccgaaagattaaaataacgtatgaaggaaaggcttgccgcctttcctttttcatcctcgaaaatcttgcttttttaagaaaaatacggtataatttttttatggatattgttataaggataattactttacttgcaagttttttcgccgtcatggtcgtattgtcgtttcacgaattcgcccatgcgttcgtggcgtataaatgcggcgatcccaccgcaaagatcaacgggcggtgcagcctcaatcccatggtacatttcgatcttctgggactcatcatgtttactttcgcgggcttcggctgggcgaaacccgttcccatcaatccgctcaatttcaaccattatcgcaggggcttgaccctgaccgcgatcgcgggcgtggtcatgaatctcatcatggcgtttctcttgttcccgatctataaactggtcgtgctgtacgtgaatatcccgctctggcccatccagacttttgtggaaatgctttttatgctgttatggacgtacagtatatccttctgcgtattcaatctgatcccgctcgcgccgctggacggctggcgggtggtggaagcgctcaaccgccgacacgggcgcgtttacagatttttcgaaagatacggctcgatcatcttattgattctgatcgcgatccatttcgtttcgggttatttcacggttttgggttatatcgatatcctcggctatattctggattttgccgtgaatatcgtagcgtggccgatcacggcgttttgggggctgattttctgatggttaaagatcctgccgaaaaattcgaatcggtcgtcgattataccacggtcctggataatttcgagggcccgctcgatttgcttttattcctcatcaagcaagagcagatcgagatcaaggatatattcgtttccaaagtgaccgaacagttcctgctgtatatgcaggggctgccgtacatagacatcgacaaagcgagcgagtatctcaatattgcggccgcgattctcgacatcaaggcaaagagcctcgtgccctcagtcgtggagatggaacccgaagaggagagcagcgaacagacgctcatccgcgcgctcgaagaatacaaactgctcaaagaagagagcgcgaaactgaaagaactggaaacgatcggatacttctataaggaacccgataaaaacgtcggcgaggcgaagatcgtctataaggatttcaacctcgacggactgttgaaagcgtttaccgaactgatgatacgccaggaagcgttaagccgcgaaaaaggcgtgcagagggagattcccaaagacgtctataccattcccgaccgcgcgaattatatctgcgacacggtcaaagagcgcggcacggtgggctttgacgaactgttcacgccgtattcttccaaaaacgaaatcattacgacttttcaggcgcttttggaacttttaaaatatcagtttatcaaagtagagcagggcggcgtattcgaaaaaattctgatcaaatacaataccgaaagaagtgaggacgagaccattggagatcttggagaatttgagtaacatactcgaaagtattttattcgcggcaggaaatcccgttcccgtggatatcattgcggaaaaactcggcgtttcggaaaaggacgtcaaggacgcggcaaaaaaattgcaggagcggtatggggaaaaaggcggcttgaaagttctgttcttcaataaaaaattacaactttccagcaatccggaatacaaagattttgtttcctccgtgctgaatcccattaaagagcgcgaatttacgcgcacaattttagaatgttccgcgatcatcgcctataaacagcctattaccaagggcgaactggaaaatctgcgcgggctcaactgcgattatgcgatacatacgcttctcgatctgaaaatgatcgaaccggtcgggcgcaaggacgcggtgggcaggcccattctttatgcgacgacggataactttttgaagcggttcaacctgacgagcattgcagaccttcccgactacgatacgctgatggagaatatcgcccgtctgaacggcgaaaacgccgcgcccgagtcttatctctatgccaacaacgtatatgtggacaacggcgaaatacagccgccgcagaatccagacggcgggcaaatcgagaaaaagagcgttccttccgaatccgacgaggaagaagaggaactgcccgactttttaaaggatctcgaagacgacgatatcatgaaaatagaataaaaaagacgccccgcagaaaatctgcggggcgtttgttctaatgaaaatttacggcttagtacattccgcccatgccgccgggtgcgggagcggcaggctcgggagcgggaatatccgccacgacgctctcggtcgtgagcaaggtagccgctacggaagccgcgttttgcaatacgcttctcgcgaccttggtcggatcgatgatgccgctttcgaccatatcggtgtaacggttgttcagtgcatcgtaaccgtagttggtctttttgctcgaaaggatcttatcgataatgaccgaaccgtcgagtcctgcgttcgccgcgatctgtctgagaggttcttcaatggctttgaggatgatctgcgcgcctgttttttcgtcgccttccagcgttgcgatgagttttttcagtgcagcggaagtggagaggagagcgacgccgcctccgggtacgataccttcttcgaccgccgcacgggtagcagccagcgcgtcctcgatacggagtttcttttctttcatttccacttcggtcgccgcgccgacgttgatgacggctacgccgcccgcaagtttcgcgaggcgttcctgcaatttttccttatcgtaatcggaagtggtttccgcgatctgcgccttgatggcgttaactctcgccttgatcgcgtccgcagcgcccgcgccgttgataatggtggtgttgtctttgtcgactttgacctgcgcggctcttccgagcatatccatcgtcacgtctttgaactcgtagccgagatcggaagagatcacggtgccgcccgtcaaaatcgcgatatcttcgagcatcgcctttctgcgatcgccgaaaccgggcgctttcaccgcaacgcagttgaatacgccttttagtttgttgacgatgagtgctgccaaagcgtcgccttccacgtcctcggcaatgatcagaagacgcgcgccctgctgagccaaaggctcgatcacgggcaggatctcctgcagattggaaacttttttatcggtaatgaaaatgtaggggttatccaatacggcttccattttatcggtattggtgaccatgtaagcggaggcgtagcctctgtcgaactgcatgccttctactgtcgtcaactcggtcatcatggtcttgccttcttccacggtgatcacgccgtctttgccgaccttttccattgcgtcggacacgatctgtcccacggtatcgtcgccggcggagatggatgcgacctgtgtgatcgcgagtttgctgtcgacttctttggaactctttttaatttcggaaacggcggcttcgacagccttgtcgatcccttttctcaaaatgatggggttggcgcctgcggcgaggtttttgagaccttcgcggatgatcgcctgcgcaagcacgaccgcagtcgtggtgccgtcgcccgcgacgtcgttggtcttcgtggaaacttccttcacgagttgcgcgcccatgttttcgaacgcgtcttccaactcgatttccttggcgatggtcacgccgtcgttggtgatgaggggagccccgaattttttatcgagaaccacgtttctgcctttcggcccgagagtgattttaacagtattcgcgagcgtattgacgcccgtttccaaagcctttctcgcttcgtctccgtatttgatctgtttagccataattatcgattcctcctaaaaaactttgacaaatttttacgattattcaacgatcgccagaatatcgctctgccgcagaatggtaaattcttttccgtcgactttgaattcgcttcccgaatatttcgcgtagagaaccacgtcgccgatcttgacctccatagttacgtcttttccatcgactactccgccggggcctaccgcaacgactctcgccgtctgaggtttttcctgtgccgaagaggggagaatgaatccgctcttggtcttttcttccgattgaacgctttcaacaactactctgtcaaataatggtttaatgttcataatattgcctccgttttttatttcttatttttgagttagcacttttcactcctgagtgctaatttaccatatattataaccatttccataaaaatgtcaaacgatttatataaaaaaaattaaaattttagcacttttcttttgcgagtgctaaaacaagaaaaatgaaaggaaaaatgtcactgcggcttgcaatttttagggtagtatggtaaaataaacgaaaaggaaacagaggttttaccgatgaataagtgggataagagatttatggaactgacggaaacggtcgcgggctggtcgagttgttttcaggagaacaggcacgtcggcgcgatcatcgtcaaagataagagagtccttacgacgggttacaacggcgcgcccgaaaatatacagagttgcgctgaccgcaaagaatgcctgcgccgtaaactgaatatccccagcggcaccaaacaggaaatctgttacgccgtgcacgcagagcagaacgccatcatccaggcggcgaggctgggcgtcaatatcagcggcgccaccttgttctgtacccaccagccgtgcgtcatctgcgcgaaaatgatcatcaacgcaggcatttcgcgcgtcgtgtacagacacggctaccccgacgaattttccatgcaactgttccgcgaagcgaacgtgatcgtggaaaaatacgaagacattgaaggagattgatatgcaaaagaatcccatcgcgaccatcactttggaaaacggcaagagcgtcacgctcgaattatatcccgacaaagcgccgaatacggtcaacaactttatttcgctcgccaacagcgggttttacgacggactgtgttttcaccgcgtcattgcgggatttatgatccagggcggcgaccctgcgggcagcggcatgggaggacccggatattccattgcaggcgaattccgcatgaacggctttgccgcgaacgatctcaagcacgcgcgcggcgtcatttccatggcgagaagcatgatgcccgacagtgcgggttcccagtttttcatcatgcacgaaaattcttcccatctcgacggacaatacgccgctttcggaaaggtgacggacggcatggacgcgatcgacgagatcgcgggcgtcaggaccgaccatcacgataaacccgtacaacctcagatcatgaaatccatacgcgtggaaacgttcggtgtagaatatcccgaacccaaaaaagtaaaataatcaaaaaaaacagtttgtgtaaatatgcgcacagactgtttttttatgttacttttatgcgggcgcggcatacactgtactatgaatgcggattttcacaacgatattttgacggtcagacatttgcccctcggaaacgaattggagggactggactgcggcgttctggcgctgtatctcggcaaacgctccatagaagaattgttcgccgtcgcgcgcggctttcgtaaaacgggcgggtacgaactcgccttcgaagaggtaagcggcattaccgacgaacagttggaaacgctgatctcttttcggccaaggtacgtgacgctcacctggaatcatgaaaacgatctggcgcacggctgcaaatcgtcgggcggtctgaaaccgaggggaaaggaagtgatccgtcggctgaacagagcggggatcgccgtggatacggcgcatctgtgccgtcaaagttttttcgacgtttgcgacgcgagcgatcgtttcgtaaactcgcacacctgtttttcggcagtccacgcgaatgcgcgcaatatcgacgacgaacagatcgaatgtctgcacgaggcgggcgcgctcgtgggcgtgacgttcgtcggcgcctttttgacggcgggaaaggctgattcggaaaacgtcgtgcgccacgtcgatcattacgtgcagaaatacggcgcggagggcgtctgtctcggttcggatttttacggaacgcaggatctgcccgccgatctattaaattataaaagttgggatattttagtggaaaaatttttgaaaataggatataatagagaagttatcgaacagatactttatctgaatctgaaaaattttttatacgggagataatcgtatgacggatacgagcatgtatgtcaatcctttgatcacgcgctatgcgagccaaaaaatgtccgcgatcttttcggacgacacaaaattccgcctttggagaaaattgtggatcgcgctcgcggaatcggaaaaggagttggg

SEQ ID NO: 1216 - DNA, 9136 bp, Unknown
  16S sequences of unknown bacteria
gtcattttcctgattgcaagctgcattataacccaattctgcggttcggtaaaattgcctgtttcggttatgtcaagattttttatcacggcaactcttgccgagtcgtctccgcttgacgaagcgatataccgtgaaaaggttattccgctcagcgcaaaggtgatgagcagaagatagagaatataggctcgaagagggagcttgagctttgaattcttatttttctctttcaaacagctcaactccttcttttcttctttataagctcgggaatgtaaataaacgcaatgaggactgcgagaatacagagcattccgaggggactttttgcggcgatgataatgtttccggcgccgccgaccgtcagcaccaccttgccgacaatactgctttctggaacggtttcgccgtcggccgtgtcgttggcgtcacctttggtgataaaaccgccgtcgatttttccgacaattcggtgggtggtggcggcggaagaaccttcaaaggtaattatatcaccgatttcatagcttgtacagcgttttgtaacgataaaatcccctgcgttaatcgcgggagacatacttcccgtgacaacggcggccgaggaaaatccgaaaacggtgggattatttttcccgaaaatgttacgggcggccgcgacgtatatgttaaggacaagcataaccgccaaaacaaccgtcaagaccgtcccgagaattttacctaaaagggatagaaatcttttagttttcatatttttttgcttttctcctgtcgattgcaagacccgaaattatacaaagactgagcacaaaacacgctccgaatccccaaaccgccgatttgtcgcctgttttgggaaattcgggagtgacgtatgaattgccgtcgtttacgacgatataaaaaccgaccgtcagctcgtcgggatttccgtcggcagacttgtttccgagggcggtgtcgattttgtcccgtgcgacggaattctgctgattttcaaaatcccaaacccagtttatatcaaaatcctgaacattttttgaggaaaccgttccgctcacagctcttatgaccgaattttggtcaatgtcggagggaaggagagcgttttcggcgtccgaaaaaccgtctcccgaaagagatacggcggctgtcctctcggcagccgtgtcctttgaccagagcacggcggtgtaggaaatttctccgccggactcgtttttaagacggatgatactgtttttatcggttccgggagctattattttttgcccgttttgcgcctcggcgttttgatatgccgtttcaaaaagcgaaagcttggcagaaccgttttcgtaaagctcggtgtcgctgtcaaattcaagggagccgggcgtataggtcagcgtgtgctcgggatttaccgaacgggaggcaaacgtcacaccgagagcggcggggagcagcagcacttgaagaataaaaagcagaacaagggaggggatgaggaatcgttcgaaatttttaacccttttcaagtccttcgctcctttcttttttccggcacataatcgagagtcttaaaaaaggctttcgattatataccgggcctccgcccgccacatgacggaggctccgggaattgagattaaataagattgagatgagactatgcttttatgttttgaaataatcagtcaatctgggttacggtcgtggttacctgaatggacacggttgcggcttttccctcggcggcctgatctccgagataggtgtcgttggcgtcattttcgtcggtggagaaaggccattcccaagaaactgcaagcgagtgctttgctacggtcgacaaatcagtaccggcgggataagttctgctatatttcttaatggcagattcaattgctgcgacataagcctctttcgagttataatccttgccggagtatacttcgtttaccgtttcatcaagcccgtcgtcataagtggaaatcttgaatgtgagggggcagtagaatgaaccgtccgcttttttccaattatcattaagaacaatgtcgccggtggcatcgtaatcaactttgacggcaacttcgggagttccgctgagagtggtgcttacggcgtcgcctttggtaccgggggcaacaacgttatcggtggaaacaacggactttgcaatggttgcaactatgttctgggtatcggtatcatattctttggcaaacatggagccgtttgaggttacgtttacaccgaattttgcaactcttgcgctgccggtaaggtctccgtttgttacatacttagcaaaagtgcttccgacaaagcaggaagtgatgagtaccagcgcaacaagtactgcggcgattttcattgttgggttattcttcttagtcattttaaaaatcctcctaatatatcaatttgctgtatttttgcggcgaaaagccgctgtatagaattgcgaggcaacctgtggcgtcggccacgcaaaaatataaccttaaatttttactgaccttctcggtcgttttgagccttctctgctttaagccgttcgagctcctttttaagctcttcggtttcgtcgttgcctttttttgcctggcgctgacggcgtataatgtcgtaaattataaaggcgcagacgggaataccgataaagaccgccatgccgaggggcgtttgaaggaacatggcaaagtcgccgagcttaggaattcttcctttatatttgccgattatcttgtcggccgaaatcggagagtcctcaatgttgttggcgtcgccttttgtggtgaaaagcttttgtccgtcctgctgctcgattttgacgattcggtgggtgacaaccgttctgttgtccataaaggaaacgatgtctccttccttaagactgtcgatgtcgggctttgtgcagaaaatcaggtcgccgacctcaatgtgatcctcggccgttccgctcatggagccggaaagcacaaccatcggcgcaacgccgaaaactgtgggcggcttgtcgggatttaccgttccttttatgataattgtaacattacaggcaaggataacgagaagcagcgcacaaagcacgcctcccacggcaaccataaccttgccgaaaggggaccgtttcattcttcaacctccgtgttcgataaatccgcaagctgtcttttaaaatgctctcccgcgtgaagatgattttcaaagcagacttcattttccgaaatatatcccgaaaggccggaaagctcggaaagactgtaatccgaaagctccatgcggccgatggcattcagaattttaagcggacgttcgttttttatgtcggaaatatattggcatccgagggcgtttttcagctcatcgaaaatacttttcatctgtttctcccgggcctttaaaaaggcctgtcaggggaatttattccccaataaatacatcttcaagaatttgtaaaagcaaaaaggccggccgcacacacaaaaaagtgtttgcagccggccgatcgtgcatcaaatgatgtttagacaccgtggctttgcgtctttgtctttcgacaaatttgcccttaaaattccttttacaatatatttataacatacataaaagaatttttcaaggatttttttattggattaaagaaaaatttacaggctgcgaagtcccgaaataaccttgttatattgctccttcaccttctcgaaaagaggggaggagccgtcgaaggtttttgcccttaatacttcggtcagctcgcttgaagccgcataaagctcggaaaagccgagatttacgctgacgcccttgagcgtgtgggcggcgcggaaggccttttcgatgtccttctcttcaaatccttcgcaaagctcggaaaagcttttgtccttttcaaagcttttgacaaatttaagtatgagctgttcgttgccgaaacgtttgaaaatttcgtcaaaatccgaaccgattgcttgataaaattctttaagctccaatttattttccgcctttcaaaatttttaggacggccgcaacaagaccgttttgggaaatgggctttgcaatgtgcccgttcatgccggcatttaagcattcggcaatgtcctcgtcaaaaagattggccgtcatggcaagaatgggaatgctttttgcgtcgggacggttcagagaacgaatggcccgcgcggcgtcggttccgctcatgaccggcatcatcacgtccataagaatgacgtcgaattcacccggctttgaggccgagaaaatttcgacagcccttttgccgttctccgccgttacatattccgcaccggcatttttgagaaaatgctcgactatttcgagattcaactcgttatcctcggccgcgagaaccttgattccgttaagatttcttgataccgaggtgtcgcaaagggttgctttgtgctctgatttgtcatattcaaagggcaggaacacttcaaatttcgttccgaaattctttctgcttataacgtttatgcggccgcccattttgtcggtcagttttttgaccaccgaaagaccgaggccgattccgctgtggttgtaaagcgtttcggaggattcctgagcaaagggctcgaacattttcttttggaattcgtcgctcatgcctatacctctgtcgatacaggtgaatttatactcgccgaagcttccgttgtcggaaatctcatccgccgagaatttaaccgaactgccgctgtcgctgtatttaattgcgttgctgacaatgttgagtatgatttgctgaacataaagcgagtcgccgagaacgctgtcgtgtattatgttcatgccggtgttttcaagggaaatgtttttgttttgcgcctgactcttcgttatggaaaatatttttcccgcaacctcgcttagcgagaacggcgattttgaaatttcaagattgcccgagtcgagcttatttatggtcaaaatgtcgttaacaagctcgagaaggaagttggcggcctctcttgtcttgtttcggcagtatttaagcttttccgggttatttgcattttgatcgccgatttccatcatgccgagaataacgtttatgggggttctgacgtcgtggctcatctgacgcagaaaatcggttttggcacggcttgccctcttttcgttggcaaccgcaatttcaagcttttgttggtattcaagctccagccgcttttgattgtcgatgcttttggtgacaagaagaaaactctttacgtctccgttcgggaaggtgtcgtttggaattatcatgtcgttgagccattcgccgcggagatttttatatgaaaactcaatgtattccttgccgccaagtcggctgttcaaggttgaaaagtcgcaaaattcgcgatatttttcccgatcctcttccgaaatatagtggagaaataccgtttcgaaggcttgctttgcggtcatgcggttgttatatttgggaaattcacccgcaccgtacaaaaactccagccgattggccttaagatttacgagtatattggtgacataaattttgctgacggcgcgaatgatttcaaactggccgttgatttcttcaaggtgacggtttcttatgctgttgtgaataaacacgacaaaaaccatcagcgtgcagtaggtggcaagtgccacgagcataagactgtggcaaaatgcgaaaacgtcatttcgctcatataccgcataaagctgataatcctgaaagcttgagtgaccgccgtaatataccttgtcatcggcgtatattcttgtcagcttttttcgctgctctacaccgtcaagagccgttatacaggcaacatccgaagcggtcttgcggtggtcgctttcctcggttgagcctatgacggtttgcccgtcggttatataaagtttgccgtttgaattttcctcatagcctgtgagcatatcctcaagagcaagttgataggatgtaagagtgtctctgtcttgataacgaacggcaaagacaagtccctttttatcctttcgtgaaacggcgcatatatcatatatttttccgttcttttcgatgcgtgaggagtaaatctttgaggggtgttcgataatttcgcttatggccggattggtcaccgcgctttcccaatcggaaatgccgttaccgttttcaaaatgctgataatccggattgaaattttcatcgagcacaaaaagcgcttcgagccgatcaatatcggttatttcttttataaattcatcggaatgggaatagtcgcccacagacaggttatagctgacgttttgtgccttttcggtgagtctgacaagacttttgatttcgtcggaccttataacatcgttgaaatcgatgcattggttttccaaaaacaaaattgaattgtttagagtatcctgagccatatttttgctgattttttctccgacgagcatcgataccgataccaaaaccactccgataagaatgagaaagctgtaaaattgaaattccgagacaaactttttctttcttgtcattgcaattcctccgacagcgccgcttcggcatcaatgttataagcggaaagaatggaggcgatggttccgtcctgcttcatttcaaaaagaacgtcggtcagcctttgggcaaaatcctcatgggttccttttaagaaagcgactccgagatttgcccgaagtaagggctcgtcaagaatgcgaaatttaccgttccattttttcatatagctgcggtaggcgttttcatgccccgcacaggcgtcgacatatccgtccttcatggccgaaataacattcgccatggaagggaaggcatagagatttttaagatgaattttgtcggacagctctccgtcgagaaaaagctcttccggttttgagctgttctgcacggcaagagttttgccgtttaaatcgtcaagagtgtaaataccgctgtcctccgcaacaaggactatttgccggcttgacatataaggccccgcccaggtatatctgtcctcgcggccgttcattgtaaagctgccccaaaggcagtcaacctctccgctttcgagatagctgtcctttgtctgccatttaatttgtttaaaaacagctttatatccgagacgtttgcaggcctctgtggcaatgtcaatatcaatgccgacatattgcttgtcaacataaaaatacggctcataaatgtcgctgccgattgtcaaaatcggaagcccgtcgtcggaagaggacttgctgccgccgcaggaacaaagaataaggcatagcacaagcgccaaagccgcgatatgtaagatggaggattttcgcaaaatatcacctcgcagaaaaattaaaaaccgtatacctcggtcataattttggatttgacggatttgagacattccacaagcagcggattaaatactccgcacttgccgcgctctatcatgtcgaaggccacgtcgggcgaatatgtcttcttgtacacccgatcacttatcagggcgtcgaaaacgtcggcaatcgacacgatttgcgccgatatggggatttcgtcccccgaaaggccgtcgggatagccatttccgtcataacgctcgtgatgccaacggcatatctgcgccgaaattttaagcagcggttcgtccttatatttgtcaagggacttgaggaccgtttcgccgatgacggtgtgctttttgatttcctcaaattcctcgtcggtgagtttgccgggcttgttgagaattttggtgtcgatacccattttgcctatgtcgtgaagggtggaggcggtggaaatgagggcacattcctgaaggcttaaggggtatttgtcggtcataaacacaaggcgatcgagcagaatttgggttaccttctgaatatgctttatgtggggagcgctctcaccgtttttaattcccaccacgccgctgagaatgtcgatcatcatgcggttggtgcgctctttttctctcgattcccttgttaccatggaaataagcctgcgctgctttgcataaagcttaatagtgttgaaaatgcgccgataaatgaccttggaatcaaacggacggctgatgtaatcgcttacaccgaggtcataagccttgcggatgttttggtcggagtcgtcggaggttatcataatgaccgggatattgtcgataatgttcgtcttgttcatttcgtcgagaacgtcaaagccgttcataaccggcatgacaatgtcgagaagaatgagagaaatatcggttttttcgttctcgattatcgaaagacaggccgagccgtcggccgcctcggaaatttcaaagtcgtttttcagcatttctctgagcatcatgcggttgatttcggaatcgtcaacaatgaggatgtgctcctttttgttttcggaaacttcttccgaggacatcttttcctcctgcagcaccatgcactcggtgacaaaggtgtttttctgattttttgcccgatacatatatcggtcggcccgtccgacggctgtgttgcaggtttcgtttttggccgtcacaccgcccatgctgaccgttattttaagtccgtcgaagccctcgattgaggaggtctcgattttgtgacggattttagaaagaatattttcgaatttatcgtcgtctgtgtcgggcattataaggagaaattcgtctccgccgaaacgtatgagcatatcctggggctcgataaagtgctttatggtgtttgcaatcatgataagcgctttatcgccgaggctgtgtccgtaggtgtcgttgcaaagcttgaagtcgtcaacatctatgacggcgactccgccgaaaatcgggcggtatttcaaatttaattcatagaaattgcggttgtgagccccagtcaggctgtcgcggtagttttccttgcgtataagaccgatttgacgctcatatcttttgacgataccgcttatgtcaaggcgggaataggttataaaacggtgcttgtcgtcaacataggtgaaaacggcttttttataggaaaactcgccgttttcgttaacaacggtgaaaaacactttatactcgtcctgatgctcgagggcactcacaacattttcaaggcgcagccgctgcggtgacgcaaatcggacggccggtcagtttaaagt

SEQ ID NO: 1217 - DNA, 16414 bp, Unknown
  16S sequences of unknown bacteria
cggccgggcctgcggcccccgcccatccctctgcacaaacctaccaagaatctaaaaaaggagcatcaatcttcccatggaactcatcccctttaccaccaaagatctcgcctcattcctggaaatgagccacgatatgtatgactcccccgcggtggcgcacccggtcagccgggatatcttcatttccacctttcgggcatgcctggccggcaatcagaatgtcgaaggccgcatgatcgtggaaaacggctgtaccctgggctatctgctgctggcacacagcttctccagcgaactgggcacccccatcattatgatcgaagagctgtacctcatcccggaggcgagaggtcagcacatcggccgggctattctggaatctctttcctcccactatcataataaagtcggcgcgctgaagctggaatgcacccccgaaaaccaggttgctatgcggctgtatcagtcgctgggcttccaggcactgccctacaccgccatggtatgggagctgcccaacacctaacatcgaaggagtttatcgccatgaaacacatcttcgttatcaatcccgccgccggaaaaaccaatgtgaccgaagccctgctgccccgtctgcgcgccctttttgtcgggcgggaggaggagttggaaacctacctgaccaccggcgtgggggatgccacccgttttgtgaaggagcgctgtgccgcctcctgcggggagcacctgcgcttttacagctgcggcggcgacggcaccatgaacgaggtgcttcagggcctggccggctgcgccaacgcagctatgggcgtcgttccctgcggcagcggcaatgacttcgtccgcagcttcccggattgtgatttctccgatctggaagtgcagatcaccgcagaagaacgccccatcgatctcatccacttcaataaccagtggtcggccaatatctgcagtgcgggcctcgattccgatgtatgcaaaaacatggcccgctacaagcgccttccgcttgttaccggcagcggcgcgtacattctcgctctcatctccactttcttcagccccatgggcaagcaggcacatattgtactggatgacggccgggtattggatgagaatattctcatcctggtgatgtccaatggcggcttttacggcggcggctggaacggcgcgcccaagttcaatgtggaggatggcctgatggatctctgcattgtgcgtaagattaaccgcctgcgcatcctcaaggtaatcggcaaataccaaaagggccttcatgtggatgacccctccctgcaggattgtatcatttacacccgctgccgcagccttaccatcgattttgataagcccaccaacctgaacgccgatggagaaatgagcgaaagcactcatgtggatgccgccatcgtgccgctggccctgccgctcatcctgcccagggtcaaaaaataaacatgatgtcattcctatccccacctatggagctttctccccggtggggatgctttttgcctgctaagtgatccgccaaaattcctccaacttcatttcaaaaagctcttgaccctaaggtgagctttaggtagtaaagcgagtacggagcaaaaaaccatcgcaccgtctattggtacggcagaattatcaatccacatcaagaggttttttgcaatgaagtacgaaagcaaggaagcctttgaaaaggcaaatatctttggaaccggcacagccaatatcgcgtacgcgcagtattttatcggcaattcctttttgaatccgctgactgaccccaaaagcggcctggaggaaaacaatgctgtttgacgcgcactggaggatgcccaggccactgggaaggtacgggtcatcgatgtttccaatttcctgcgggatgaccttgaaaacctgttgtcggattgccgagtaaagcccacggtcaatcagattctgctgtacatcagcaatatcgatatggcactgatcaattacagccgggatccgggcatcttagtggaagcctactcccctattacccacggtgaagcgctcaaaaaccctgccattgtggaaatggcaaagaaatacggcgtatccgccgcgccgctctgcatccgttatgtcgtccagcttgggaaccgttgcgttgcctaaaaccgccaatcctgacccacatggccagcaatgccgctcccgattttgtgatctccgaagcggatatgaagtccctccagcagatggaccgcatcacgaatcacggcgaatttgatatcttccctgtattcagcggtaaaccgctggcctaatgcaaaaacggcatggcccccgccacgccgtttccttttatcccatcacgataagaaatatattcacgcaagttttcctttccgcccacccatcacgccatggcgcgcggcgccccggcaatctggctgccggcgctggtcccggcgctttcaatcgcattggcaaggatcaccgccgcaatgatggctttttccaatcaaattccgatattccttcgttttttgtttctccccgccgtcagaattccggtccgccgttgttactctgcgggcgcagcatccggtaggcattatacagcttgcgggtcttgttcaggctcaccagcagcataatggtcaccaccaccatgcccaaaagcagcagtacactcagcaccggcacccaggaaagcgccaccgccacaatgttcagaatggcacagatcttccagctgcgcatactttccgctgcggcgatccctgccgagttgtttttctcgatgtcctcaaagcccttaatgaccaaccaggtggcataataagtcacggccgctgccaccaatgtaagcagtgaaatgacccagccgccattgagtcccagcagattgatcacccagctggcaatgccataggcggtaagtcccagcagccagggaccggctgtggtgtagcgggggctttcctccagcagctctcgggtgcccatatacagcagaataaacccgacaaaatccgggagcaggttaatgacataggtatcgttcagggtaaagttaaaattaaggaacacaaacaaaaaacccacaaagatcttggtcacggtaaagacctccttgaaaataataaaaggggcagagccacctttacgctcttcttctattatatcagttctttgccgcttccgcaaccttgccccgcgccggcagctgagccagcactaccgccagcagcatcagcgcgcagcccagcagctcccggccggtcagccggtcatgtaggataagcgcccccgccagcaccgagaaaaccgattccaggctaagcagcagcgaaaccaccgtggggttcgcgtccttctgcgccagtatctgcagggtatagcccacaccgccgctcattatacctacatacagcagcggccaaatacactccgtaatccccgcgagggtgggcgtttccgtcagggcggctcctatcccggaaacgatcgccgccaccgcgaactgcaccgtggaaagcgctacaccattcaccctttgggtaaaatgatcgatgaccaaaatgtgcaccgcaaaagccacagaacaaagcattaccatcaaatcattcttttcgatcgtcaacgcttcgttcatgcacaggaagtaaagccccacagcggccagcaccaccgagatccacacggcaatggtgacctttttacgcaggaacagtcccaaaatgggcaccagcacaatatacagcgcggtaataaagcccgccttaccggcgctggtcccgccggaaatgcctgactgctgcaggaaggaagccatagccagggccacaccgcagcaaattccgcccagcaccaggtccttcggggagctcgccagcggctccaccttctcgggcgccttctttttctgcaccatacgcacgatccaaaggcccagggccagcgccgcaaaggccatactgcaccgtatggcgccaaaggtaaggggcggtacatattcactgcccacgctctgcgccacaaatgcggtgccccaaatgaacgccgccaacacaggaaacaggttttgtctgattttcttattcatggggttcattccttttgcttgggttctaaaatacggcggctcccaccgcttttcggcaggagctccgcttgatttcgtaattatagcacgccgcagggcaatttgcaaccttcttcggcaaaggggatttcaccggagatttattctctcagtcctcaaatccgctgcccaaaaaggcccgcagctcggcggttttaggcgcgccgaagatctcctccggggtgccctcctccgcgatcagcccgccattcacatacaggatgcggttcgctgccccgcgggcaaagctcatctcgtgggtcaccaccaccatggtgcggtgctccgccgccagctgctgcataatcgccagcacctcgcccgtcagttgggggtccagtgcactggtcggctcatcaaagagcatcaccttggggtcgcgcatcagggcgcgtgctatggctacccgctgctgctgtccgccggaaagccggcagggatattcatcctttttctccgccaggcccactttttccagcagggccatgcatttttcttcggcatcggccgcgccgggctttgtcagcaggtacggcttgatgagattttcctgcaccgtcatgtgggggaacaggttaaagctctggaacaccatgcccatttcgctgataagccgggcacgctctgccttggaacagtatttcccgtccttcaccatggcgtcctcgcccacatagatgctcccatcggtcacttcctccaggtcaatcatgcagcgcagcagggtggattttcccccgccggagggcccgataatggcaaccacttcgccctcctccaccgccaggctgatgccccgcaggacctccggcccgccttcaaaggtctttttcacattttccagccgcagtacactcatccgggacaccccctttagttatagtagttcattttcttttccagcttttccatggccaccgccaccaccaggttaaagatatagtagaagatagcggcgcccacatagggcagcacattggcctcccggctggcgatgcgtttcaccaatgtaaacagctcggcgtagccgataacaaaagccagcgaggtatcctttaccagcgtaatgacctcattggtgatggagggcagaatgcgcttgaccacctgcggcagaataatgcggaaaaaggtctggcccttattgtagcccagcaccttggccgcctcgtactgccccactggcatcgattcaatcccggagcggtaaatctccgcaaagtaggcggcgtaattcaccgcaaaggcaataatcactgcatagaactggtactccagcgtaatcggcaccttaaagatataataaggcccataatagaccaccatcagctgcagcatcagcggggtgccccgcaaaatggagataaacagcttgagcaggagctgcaccggccggaattccgctgccttccgccaaaagggggatttgctctttttcaggcccgccagcggagcccagcggttcatgcggccaaaggctaccaaaaggcccagcggcagcgaaaataccagcgtcagcacaaagatgaggatggaatttcccatcccctcccccacctgggcaaatatctctaacaggttcatgcggtactctccttttatctcttacttgcagggaaaaatgcagcccctcagcacatcgtgtcgaagggctgcttttctgttttctttttgaggcgttacttgcccaggcaaaccgcctcggaaaggccccacttttcagcgatcttggcgaaggtgccatcggccgccatctcatccaaggtcttctgcacggcgtcgcgcagttcggtgttgcccagcttaaagccgataccgtaggtctcactggcaatggtgccgtccaagatcacaaactcatcgccacgctgggagatctggtactgcgccacaccaatatccatagcaatggcatccacagcacccgcctccaggttcaggaacgcggtgttgtaatccggcacctccaccatctgcttaaagctctcggccagcgcgatattctccgcattactgccgtcctcgttctcggtcagcgccgccagcgcggaagaatctgcctgcactgctactatcttcccagcaagatctgcataggtggcaatgccgctgtccttcttcaccacaatcacctgactgttatccacataggcctcgctccaggtgtacttatcctcacggccctgcatggtaaaaccgttccagatgcagctgatgacctcggtattcagctccatgtccttgctgtcccagttaatgggtttcttcaccagttcccagccattgcgggtgcaaacctcagcggccaggtccagatcaaagccgacatactcaccgttttcatcctggtagccatagggcgggaactccgcgtcaaagcctaccgtaaaggtggtggttttttcggtgtcattatcattgttagcagcaggctccttgccgcaggcggtaaagagactcagcagcatcatggcagctgcggccagcgcgatcaattttttcatggtgtttttctccttcgcttcggggttaatgaaatgttatgttcgtattatacgctttagtgtgctactacgctactatgctaaaccacattaatccgcgatttttctcgtttacatccaggttatcttctgatatctcactttttcgcacgcatacacacttttttgcatcttctattatgctttctggatgccgccggcttcgggccgcaggccaagccgccctccgggcggcttcagcgggcggagcccgctggcggcgctgcgcgccgcggcctgcggcccgccctgccccctaccggcaaaagactccccctcacccatcctgggcaagggggagatcctcgcttatttacagcaggtagaataaataactcgccacgctcagtacgatcagtaccgccagaatcagcgccacgatccgtttcattttgtccattcggtctcctccttacgctgtcaccagcacgatctccccgtctttttcttccgcgtggatcaacgccggcggctgttcggggcagcccgccagcagcgtgcagatgggatcttccactcggcgtcgcagcacattgcgcaggtcccgggcgccgctcttgtgtccgtaggcttcagtagccgccaaccgcagtaccccgtcgtcccagccaaacttgatctcccgctctgccaggccctttttcagctcctccagcattaggacggctatcttttccatatccgcctcggtcagcgggcggaacaccaccacttcgtccacacgcgccaggaactccggccgcaggaactgccgcagcgaggtctccgccttgtccttggcatcgtcatagcgggtcttatcaaagcccagggcgctgccctgccgctcgctgcccgcgttgctggtcataatgatgatggtattctcaaaggaaacctgccggccctgcgcgtcggtgatgcgtccctcatctagaatttgcagcagaatattcatcacatcggggtgcgccttctctatctcatcaaacagcacgatggaatagggtctgcgccgcaccttttcggtcagctgtcccgcctcatcatagcccacatagccggggggcgaaccaatgatacgggaaacggaatgcttctccataaattccgacatgtccagccggatcagcggctccacattgtcaaaaagctcctcggagagcaccttcaccagctcggtcttccccacgccggtcggccccacaaagatgaaggacgccgggcgcttcttggcggaaagccgaatgcggctgcggcgcacagcggccgccacggcgttcactgcctcatcctgcccaatgatccgccttttcaggccagtttccaggtcggccaccttctgcagctcgctttcctttaccttgctggccgggatcccgctccacagctcaatgaccttggccaggtggtcctcggtcacggggctgttgaaggctgcgtcatgcagggcgtccatgctctcctccagccgcgcgatctcgcttttcagctccgccatgcgctgataatcgatctccgccccatcctcggggttgatgacatcactgagggcccgctgcttttcctctcgctcagcggccagcttatcgtactcggtctgcgccgcacattccagcgaagcggtggagcaggcctcatccagcaggtctatcgccttatcgggcaggaagcgatccagaatgtaccgctcggagagcaccacagcccgctccaccataaagtcgctcacctttacacggtggtagtcctcgtagtatttcttaatgccccgcaacacctggatggtgtcctcaatagtcggctctcccaccttcacggcctggaagcgcctctccagcgcagcatccttttcaatgttcttgcggtactcgttaaaggtcgtagcaccaatgacctgaatttctccgcgggaaagcgccggctttagaatattggcggcgttcatgctgccctcactgtcacccacgcccaccagggtgtgcacctcgtcaatgaagaggatgacattgccgtgtttctttacatcctccaccaggcccttcacccggctctcaaactgcccgcggaactgggtaccggccaccagtccggtcaagtccagcatgtagacctctttttgagcgatcttggccggcactttcccctccacaatgcgctgggcaatgccctcggcaatggcggttttgcccacgcccggctcaccgatgaggcagggattgttcttcgtgcgccggttcaggatctgcaccacccggtaaatttccttttcccgcccgatgatggcatccatcttgccctcacgggccttgcgggtcaggttctcgcagtagttttccaggtatttgtacttgggcgcgcctttttcgggtttttcctttttgggcggagggttcccttctccctcggcgctttctttttcgcggttcatcaacccgccaaagaggttctgcataaaggggaacggcatggccccgcctttttcaaagccgtcctcgccatcctcctccatgtcgcccatcacttccatcatctggtcgctcattttatccaggtcctcctcggaaagacccatcttattcatcaggtcatccaccggcttcaggcccaactccttggcgcacgggaggcacagcccctcgcttaccgtctgtccattctccatccgggtcatatagatgaccgccagccgctttttgcagcgggagcacagcatattgttcttatccatcgttccacttcctttcgtggggagtatcattccgcagggctgacacgccgcccggccccgtttttcggcggcacaaatccgtgctggctgcgtcaagggccttgtcaggcatcagtccattttcaatggacacaagcctgtcagcggcccatttccttgccatcccatgatttttaccgtcgcaaaacgggtgcgaacactttctaacataaaatcgcttttattgttatgcccgttcccgggcaggatttacacaggaaattcaaactgcacaaaccaattgaggatcgtcgatttctgcaccacagccgtattcagccagctccactcattttcgctaaaggtgatcagcaccgccgccgccattccgatgagatagcacagcagaaaggcttccgccgcgcccagcacaccgcccagcacccggttcacaccgcccaccaccggcacccggtttacattccgggtcagctttgccagcgcccgcactatgaccatcgccaccaggaaaatgaccaggaacgccaccatcgtcagcagggccaccatcaccgtccgcagggcatcccccgccgccccggtaatggtatcggtcgggtctatgcggtccagcagctccgcaaaggtttgcagcttctgccgcagggtatcgcttacggctgtttgcagccgctccgccaggtagccatcgtacagccaggccgcggccttgccgctcagcaaagccgccacaatgcaggccgccgccagccccagcagatggataaaggaactaacaaacccccgccccactgagcggatcatcacaaacaggatcaccgcgatcagcgcaagatcccaaatcaatgaaggggtaaaaatatctctcattttgccgccccctttctctcttttctcgggttttcatcgttatggcggcacagctccattttgtctcgggccgaccctccatttcattccgggcagccctcgcccatttcgctgcgccaccccaggccctctgccattacagccgccggtgggtcagcccctcctcggtgacgcagtaatagccgttctgccagggtgccatctgctggatgccgctctcctcccggtcgctcacctcggtcagggcggcatcgcccagcagcagggtgttttcggtcaggatcagcacccggttcttctcggtatgcaggaaaagcacccgttccgtcacggttttggtgcccactgccgccagtgtggcatcataggccgtcaccgttactccggccgcctcccggctgtcgccgcatgcggtgtaaagcgtcccgccttcgccaatggccatcgccgtcggcgtttcggcaaagcgggcctcatacagcaccgtcccatcggtggagatcaccctcgcaccccggtcggtcacagccagcagcttatcgccgcaccactgggctttcagcagaatctcatccggccagctcagcgaaaccgccggctgccgcccggtcatatcgtgcagcttgatgccgcaccccagggctccgccgccgctggtcacgccgccggccgccagccaggtgcccttgccgttcagcgccagcaccgaaagatagcagtccccgctctccagcaggaaaatttcctccccgcgggcgttatacaccgtcaccgcggaaagtccgctgccgccccgccgggaaagcgccaccgtgcccttatcgttcagggtgccgcccagcaggatgccgctgccggtgccgctttgcagcgtcttggtcttattggtcagcatccagtcggtgccgcccacatcgtaggtcagcagccgcccgccggagtacacactcacagggctgttgtagctgtgcaggaactccccggtgatcacacccccggtattgtataccgtcacgctgccctcggtgcacagggctacgccgccctttaccccgatgagctgccttgtttcctgccggtccagcgtaacggggaagcccttgcccccccgcagcgaggccgcgaggttcgtcaggtggctaccccaccccaactgccgccccgcaaaaacggtgatgccgatgacggcaaccaccgccagcacaatggccagctttttggttctccgccagtttttcttacggcggcgtctgcggcgcgcttcctcaaattccgtcagttcgctcacagttccgcctcctttttgtcataaaatacctgctcgagataaagcccgcaggcgggggctgttttgccggctctttcccggtcctcactgcgcaggatagccatgatctccccgggaggatatttgccctgtcctatttccagcagcgtcccggccataatgcgcaccatgtggtagaggaacccatccccggtcaccgtcaggtgtatttcatcgccagtttgggtcacggcgcattcggtcagggtgcgcacccgttcctcgggggggatttttccgcccgaagcgcaaaacgccgaaaaattgtgggtgcccagcagccgcttcgccgcccggtccatcgcttcggcatctacggggcggggcagctgtaccgccagtccctcccggaaagggtctctggtttcgctttggtaccagcggtagcggtagcgcttggcggcggcatcataccgcgggtggaagtcctcctccaccgcacagcagccggtcaccgctatctccttcggcaggttcacattcagcgcccgctgcagcgcctccggcgggatgcggcagccctcgcatttcagcgccgccacaaagcccaccgcatgcaccccactatcagtgcgggagcagccggtcagctcgccccgctcgccaaagagccgttccacggcatcctgcacggcgccgcagatggtcggggcgttcggctggacctgccagccgcagtaatgggtccccagccagcgcagggtcagtttgtatcgcatggatggagcacccccaatcttatcgtatcacaaagttgttaccaaatcgttggcaagagattaacatatttgttcagcaggatcaccccggcaaaaaccgccgcggtcgccacaccggagatgaggtcccggccgtgcagcttcatctgcttcatacgggtgcggccctcgccgccgtggtagcagcggcattccatcgccagcgccagctcatccgcccggcggaacgccgaaacgaacagtggaatgagaatgggcagcagcgccttggccctctgcatcacgccgccgctttccaggtcggcgccccttgccttttgggcggacatgatcttgtccgtctcctcgatgagggtggggataaaccgcagggcgatggtcatcatcatggccagctcgtgcaccggcagcttgatcttcttaaggggcgacagcagccgctctatgccgtcggtgagggcgatgggcgaggtggtataggtcagcagcgaggtgcccgcgatgaggcacaaaatccgcaccgacatgaataccgccgtctcgatgccctccctggtgatcttgaggaacttccactgccacagcgggtcgccggtggaaaggaacaggttcagcaccgccgtaaagatgacgatgggcaccaccggcttcatggatttccagatcatcgaaaggggaatacggctgataagataggccgcgaagccgaacagcacgcccagcagcaggccccacatgttatccgccacaaatagcatcacgatgtagaggatggaaagcaggatcttgatgcgggggtccattttgtgaatggcgctcttcccggggaaatactgaccaatggtaatatctcggatcatcgggcggcaccccctttcacggcattcaggatagcggcagccgcgccctccacagtgtagatgttgcccggcacctggtacccggcggcccgcagcccggcaaagacccggctgatctgcggcacggccaggcccatggcggtcagctcctccacccggctaaagatattttccaccgtatcgtacatggcgggcttgccctcggcgatcaccagcactttcttggcatactgggctatatcctccatgctgtggctcaccagcagcacggtatttttgcgctcctcgtggtattcccgtatctcacccaggatggtatcccggccgcgggggtccagtcccgccgtcggttcatccaggataagcaccttggggtccatggccagcaccccggcaatggccacccggcgcttctgcccgccggaaagctcaaaggggcttttttccatcatgtcctccgaaaggcccacaaagcgcagcgactcccgcacccgcttttccacttccccggggggcagccccatattggtggggccgaaggccacatccgccgccaccgtctcgccaaagagctggtactccgggtactggaacaccagccccaccttgaagcggaaccgccgcaggtcctttttatcggcccacaggtcctcgccgtcaatgtagaccttgccctcggtgggagccagcaggccattgaggtgctggatgaaggtggacttgccggagccggtatgcccgatgatcccagcaaactccccctcctctatcttgatgttgaaatcctgcagggcggcccgctcatagggggtgccctgcgaataaatatgcgttaaatgctcggttttgatgatagacatatttggcacggttcctctcttaacgggtcagcagggcttccagcgcttctatgcactcctgctcgtctatgatatcggcctgcaccggcagaccggcttccttcagtatcgtcatcagctcggtggtctggggcacatccagtcccacctgccgcagctccgccacatggctgaataccttacggggcacatcgtccatcagcacatggccgtcatccatcacgatcacccggtcacaggcggcggcctcctccatgtagtgggtaatcagcaccacggtgatgcccttttcgcggttcaattgccgcagcaccctcattacctcctggcggccgcggggatccagcatggcagtgggctcatccagcaggatgcaccggggctgcatggcgatgatgcccgcgatggccacccgttgcttctgcccgccggagagctggtgcggggcgctttcccggtattcgtacatacccactgccttcagggcctcatccacccgccggcggatctcagccggctccacgcccatattttcgggtgcgaaggccacatcctcttccaccaccgtcgccacgatctggttatccgggttctggaacaccataccggcgcactggcggatctcgaagagcttgtcctcatccctggtatccataccgtccaccattacggtgccggtgcggggcagcagcacggcattgcagtgcttggcaaaggtggatttcccggagccattgtgccccagcaccgccacaaactcgccttcccctatggtgatattcacatcctccagcaccagcggcaggccggtctcttcctcgtaactgaaggagatatgctcggtttcgatcagctttttcaaaatgcgttcctcgcttttttcgtagtcttggtccctgctatgccgtgcggcacggcagcggcttttgccccgcttctgcagggggctggcacccgggccgcaggcccggcggcaaagccgccgaagcgggcttcgcccgcttgcccgcctaaacggcgggcggcctgcggcccgccctgccccttttttactccctgctgtgccacacggcggtggagccgcaaggcagggggcagccggtggcggttaccggcagcccgatctcagaggagaaggtagtgcccttccccgcaaatcgccggctgacggtcgtgttcaggatgtattccatcacgctggggctcaagcccgtggtgtaggaattgatggcaaagaagagcgggttttcggtcagcaccccggcgcacagcttcaccaggtcgtacaccgaatcctccagcttccatacctcgccgcccggcccccggccgtagctcggcgggtccatgatgaccccgtcatacaggctgccccggcggatctcccgctccacaaatttctggcagtcgtccacgatccatcggatcggcttttcccccagtccggagagctgctggttctctctcgcccaggccaccatgcccttgctggcatccacatggcagacggaagcccccgctgcggcacaggccagcgtggcgccgccggtataggcaaacaggttcagcacccggatgggccgcccggctttctcgatcttctcccggaagaaatcccagttgaccgcctgctccgggaacagcccggtgtgcttaaagccggttgggctgatcttgaatttcagatcccggtagccgatggtccagaactgggggtggctgcgatagatctgccagctgccgccgcccgccgaggagcggttgtaccgggcatcggctttctgccactcggggcccttttccggcctccaaatgacctgcgggtccggccggatgaggatggtattaccccaccgctccagcttttctccgctgctggtatccaggatctcaaaatcctgccactggtctgcgatacgcatggtttttctcactttctgtctttggtggtttcgttccgcctgcggcggggatggacatgacatagactgttgtcgcctatcggcggcgcaagttttacaaaagattttaatctgtacgcctgccggcggggcgttacttttctatgaagaaaagtaaccaaaagtcattcagggctgcgccctgaaaacccggtcgccctgctgcgctggatacggattcagatttttcgtaaccgaaaaatctgaatccgtactgcacgcagatgggcttcaaaagtgcctgcggcgcattttatgcgagattcagcagaaaccaaattaaaaatcaaccttataagcgtcgtctaatcccgctccgggaagccgccctttggctttccgggcggggtaaatggggccccgcaaggtcgcaggaccttgtggggagaggaggatgcactgtagcggggagggctgcccgaagcaaag

SEQ ID NO: 1218 - DNA, 15053 bp, Unknown
  16S sequences of unknown bacteria
gaaccagagtgggaagaatcctcttgccaaaaaggattcttcccactattattagtgtgtgtgaaccgggagcggttctctttgcatccataaaaaacaacaaaggagcgatttttatggaaccaaccatgaacgccgccctggacggcatttcgaaaagcggcatccgggtatttacccaaatggcaaagcaggagccgggctgcctttttctcacgctgggcgagccggatttcgacacccccgcctccatccgggaagcagcaaaagccagtctggacgcaggcgacacccattaccccgaaaacaacggccagccgttcctgcgccaagccatcgcccgttttgaacaggaaaaacacggcctttcctatgcccctgacgagatcatcgtcacggtgggcgccacggaagcgctgttctgcgcgctgtttggcattctgaaccccggagacgaagtgatcgttccgacacccgctttcgggctgtacgaggcgatcatcaaactctgccgcggcgtgtgtgtgccgctggacacccgcgccgacggttttcagatccgtccagccgcactgcaggccgcgctttcgccacgcaccaaagccatcatcctcacttcccccaacaatcccaccggctgcatttacgaccacgaaagtctcaccgcagtatatgccgccgcaaaggaacatcccatattcgtgctctgcgacgaggtgtaccgcgatctgatttataccgacgcctttgaaagttttcaccagttttccgatctgcgcagccgcatcatcgaggtgcagagtttttccaaaccctacgccatgacgggctggcgtgtgggctatctcatggcggaccggcccgtgaaagagcagctggagaaaatacaccagtacaacgtagtgtccatctcttcttttgtgcagcgggcctgcgctgcggctctggcatacgacatttcttccgagcgcgaggtttaccgacgcagaagagattacgtctgcacccgtttggacagcatggggctgccgtatttcaaacctcagggcgctttttatgtattcccctccattgcagcgttcggcatggattccctgtccttttgctcccgcatggtcaaagaaggcaaactggcctgtacgccgggcagctgcttcggcgctgagggctttttgcgaatctcctactgctacagcgacgatgtgctccgcgaaggcatggaccgcatggaaacgtttgttcaaatgctgcgcagctgctgagcaaacacacgacttctcccagagaaaccttgcgttgctcattggaagcctttggaaaccgctttataaaaaaagtgcccgcttccctgtgctccgccgctgcgtcgtgctgaggcaaacaacataacaggaaacgaagcacaatggagcgcctatccacccaaaggcctttaccccccacacttttgacgctcaccactacggacagatggaaggatgggaaaacactgtacagcccggcatgccactgtgttccacaccgcaccggttggtccctcatacgcccatatccatccccggcgcgtacagaaggaaatacggtcccgcccgacttgcctgcgtcgggcgggaccgtatctgtttttcccttattctgcttttaccacagacaaaaccgtgccttcaaacgcatccacctccgaaagcacaccggtataagtcacggtgacccgatcccctgcggccaagccatccagcgtcgcttcgccgccttccagcgtcagcgaataggaaacgccgctgtcgtctgtgaccacaaacataaaatctttgacctcatccagtgtgccggtcaggcttttttcctcggcagcctggttctgttcggtgccgccgtcagagccgtcgccgccgctctgcgcaccgcagccggcaacaaacaccgccagcgcagccagtgcccccaggagcaaaagtttctttgtgtgtttcatggttctaatcctccgttctgccgcctgcctccggggcatggcggcttttgcgtcattgcagattctattgtattgcccgagggcataaaacttgcatcgtttttgccgcacctttgcaaacgggaaccggaatacggccgggacggttttgggggcactgggatgcgctctttccgctatccctgcgatttttgggaactgccgctcttctttccctgcagcgccgcttcataggcctgcccgctgcggcagatgtagtaagtaaatcccagctttatgatcacagaaatcactgcaaggattccaatgaatcctcccaagatttccatgtttgtcgctgcattcatcgccaaaaccaccaaccagcaaacaggcaaaaaagaaagctttcatacgccctttctgttcccattcccgctcagatccagcagtttttcgtaaaaggcccggccccgttccagcacgcgctcgtcaaaggtaaaacgggcggaatgcagttcctccgtatcacccacacccagaaagaaaaatacgcccggcaattcctgctgataccatgcaaaatcttccgtggtcagcgctaagccttcgtagcgccggggggcatccgcccccagctgtgcctcgatggccgccaccagggcaggatcgttggtcacgggaggatacccttcgctgaacgccaactccatggcgcagttgctttcccgccccacctgagcggcaatctcctcacagcggcggcgcagggcagcaaagtcctccagcgtaaacgcccgcagactgccttccagcactgcgtcggcggcaatggcattgcggatccgcccggcctccatgcggccgaatttcagcaaccgaggcgtttccggcggaaatacctcgcgctccatggcatagacccgctgcaaaaaggtgctggccgccagtaagctgtcggcgccttcctgatatttggaaatgtggacgcttttgccgtggacatgaagggtaatctcactgcttttggccatcagcgcaccgggccgggtggcaatttcgcccagcggcagccccggccacaaatggaaaccaaaaatcgcccggacatgacagcgcgcaaagatgccgctgcggcacagcggtcgcgcgccgcctggattctcctccgccggctgaaacaccagcagcacattatgccgcagcgttccgtgccgcgccgccacagtttttgccaatcccagcagcatggcagtgtgcccgtcgtggccgcaggcgtgcatcttccccgggtgctcagaggaaaagggcaggccggtctgctcggtgatgggcagtgcatccatatccgcccggaacgccagagtatcctcctttccctcgtcaaaaaaggcgcagaccgccccctcgatcggctctgtgaccgtacaccccagcccctgcagctgcgccttgacaaaagcgcaggtcttgggaaggtgattctccagctctggaatgcggtgcagcgcccgtcggtattcaatcatatcctccagcatcatggcatggttctccttttcgtgttctctttgcctttatcatatcccgcccgcagaaaattgtacagaaaaatccgcatgcgccgcaaaatttctcccccgctgcccgcggcgcgcaaaaaagcttgcgccgcttatacaatcatgctatgataaattattaaaatatgctggccctgaaaaacaacggcgcagcttcgtgcacagtgaatacaaaggagagaaacacatgaacattcttttgattggatatggccgcatgggcaaactgatcgaacagactgcccaggccgccggcgaccgggtggtctgcgccatggatctggacaatctggatcagctcgcggctatggacaaaacagccgatgtgattctggacttctccaaccctagtgcctttgccttggtggaagcctacgtccgccgcaccggcacgcccctgctttccggcaccacgggttacagtgccgaccagctcgcccgcctgcgcgccctgggggcctatgccccggtgctgcatagcggcaattattctctgggtatcgccgtattccagcgggttttgagacagattgcacccacgctgctgccggattttgacgtggaaatcaccgaaacccatcacaaccagaaagtggacgctcccagcggtaccgccctgatgctgcgcgacgcgattgatcctgccggtgaaatgaccttagtttacggccgccagggcagcgtgggtaagcgcggagagaaggaaatcggcatccacgctctgcggggcggcactgtggccggcgtgcacacggtgtctttcttcggtcccgacgaggaactgaccatcacgcaccgggctgccagccgtcagatttttgtcaacggtgcgctgcacatggcccgtatcctcaaggacaagcccaacggcgtctacgacctgcaggcgctgctctttcagaactgactccactccacaccaagaaaggaacgcacaatatgaatgcagaggaaatcatttcgtttatcagcaacgccgagaaaaaaacgcccgtaaaggtctatctgcgcctgaacggcatggtggatttcggcccggaatgccatgtgttcggcagcggcgaatgccgcgtcgtctttggcgactggaatgtattgcagccgcttctgaccgccaacgccgccaaaattgacgacatggtggtggaaaacgaccggcgcaattccgccgtgccgcttctggatctcaagaacatcaacgcccgcattgaaccaggcgcgctgatccgcgaccaagtggaaatcggcgatggcgccgtgattatgatgggtgctgtcatcaacatcggcgccgtcatcggcgagggcaccatgatcgacatgggggctgtactgggcggccgcgctaccgtgggcaagcactgccatatcggtgcgggtgccgtactggccggcgtcattgaaccggccagcgccacacctgtagtcatcgaagacaatgtgctcatcggcgccaatgccgtggtgatcgagggctgccacatcggagcaaactccgtagttgccgccggttccatcgtcatcggggatgttccggccaatgccgtggttgccggcgtgccggccaaagtcatcaagcaaatgaatccggataccgcgcagaaaaccgctttgatcgacgcactgcgcaaactgtgagcacacaaagcaatcggccgaaaaatgggtgggaatccttggattcccacccattttatatatccatcaaatattccacagcatctcgccattcctccggcgaaaaaatgtctgccgtcagcggaatgtactcctccacatattgagagagcgtccccgtttgggcttgcagtatgcaaagcagcgcaaacttcgttcaaggtcatctgactgccctgcagcatatcgcagcggggacaaagattcgccacataagaaaaaccggcctttttgctgtagcgctccgctatattgtcacaatgccgctccaaatacgcatccagctgcggaaaaatggaaagacggatcgcttccagcggctgcagcagctcctctgcaccgggtaaccactggagcaggtcaaaataaggaaaatagctgcgcacacgaaggggctgcccgcatttccagcatgggcgggaaacggcataaagcgccatcccattggtttgcagcaaccggaacgtcccctctgccagcggcatcgtacaccggcagcgcggaaaatggctacagccaaaaaacaccccatacgttcccctgcgcagcaccatcttaccgccgcattccgggcagataagatcaaccggaacgcccggactctttttcggcgcctgtgctgacggcagacaaaaagtctcccgcgccatggaaagataccgctcatgctctccctccaagaggaaatccagcggccgatccacaaagatacgcatcccatcttcactcaaatgaagatagcccatctgcagcaaattgcgcttacagtcttccagaaccatatcgtaatcgtggtccggccgatcgtaaatgccgcgatagacaaaacggctgagtctgcggttgcgcacttgcccaattgggcaggagcgcccgtctccttccatgcagcaggccaaaacagcgtaataaacccgcaccacaaattctgtaaaattcccggtgggctgcaaacgctgcgcacgaaaataggaccacttagcctgtatctttttccggttccacataacacgcccctccctcttgctgctataaataagattatagcagctttttcggtcaatgaaaaggggcgctttgggagcggtttttcttcaaaatccatcccaatttgctatttttagctaaaatattacttatagttttcacttttaatgtattttccgcatcggcgaagttgattccaggctttgggcttccatatttgtcatcggaaacgttacaatccaactgccctccgtccgcatgccgctggtggtaaacgtcccgatcagctgatactgcccgatttctgcttccggcacatcaaagacaaattcctggtaatccacccggccctcactttcccattgattgcagaaactgacggtatataacgcctccaatcgttccccttcccggccctgcagctgcagaaaactgtgattgtcattttgcagagcatcgcgcactgcggtctgcacatggagctgtccatccacatagcctgcggccgttacatcaattcccctgaccggaaattccttcataggagcgcccggacacaataccgaaaccacatcctccgaaacagccgcaccgctgcagccggtaatgttgtccactgtctgcgtctgcgcctgatccagactgctcatcgaaagcgggatttccacatcgtcataaaccgttttatggcttaaaaactcctgtacctgaaatgtgatcttgctgccctcgatccgatggccgccccactgtgtgatttggatctgaaaaacagcggtaccggtggaggcatcgtagtgcaccagggaacaggtagccgccgtgtcataaggctgccggatcgtatagctgtcgaacaaatctgtggtctcatctacgcggtcaccctccagatcctgcagcgttacatacagctccgccgtatcgtcatgaacaaaacaggcagccacctccatgcggattccattgctgacacaggcgcgctgcaccggcgtaaaatactgcgccgtggcaggagaaaccgcatagagaacctcccgaaacggctccaccgccgccatcaccggcatcgccatgatcaccgcagccagcactgctgccgcaaccgctgcagccagccgcggccgcttccgcctcctgcagcggcgggcagctgtgctttgctgcagcgcagcctgtatcagatcttctccgggcgcagtctgatccatcatgtggcaatattgattctgcatcattcttcctccttcagttgctttcgcagcagccgcctggcccgggtcagctgagtgcgcaccgtagcaggcttctcccccagcagtttcccgatttccccgacagaaagctgttcataataaaacaaatggagcaccgcgcggtattttcccggcagcaactgcagttgttcccacagcaaagtgtcctccgtctcctgaaacagtccctccgcttcctccaacggcaccgtgcggcgcatccaggctgaggtccagaattttttggcgcagtttaccgtcacgcggatcagccatgccctgcggtgttcttcttcagaaaaaacaggcgcactacggaagtagcgcaggaaaacctcctgaaaaatatcttccgcatcacagcggccgcgcacctgggcgagagccagacggtaaaccatgggtgcatagcgtcgcaccacgctctctccctcctccatcggctccacagcgtccttcaccggcctcactcctttcactataaacaccccgcagggcgcggaaaagcgacaacgcgccgtccaaaaaagaaaaaacttccgtgggacagttgcagtatcccacgaaagttttcattttatcgtcctgccccttccggtacatcctggtcccagggcgcaacgctgtctccgtcaccctcaggcagatccgggatcgggatgtcgatctgtgcaggctcgtcctccaccggcccatactcttcctcttccgccggagaaacgccgccgtttttataggcctcccacgaggcccgcgacaccagaagctgccggggtttggaaccttcaaaaggaccgaccacaccccgctcttccatttggtcaatgagacgggctgcccgagaatagcccagcttgagccggcgctgaagcatggacaccgaggcctgtcccgtttccagcagcacctccacagcgtcgttaaacagcgggtcagtggattccgccacctcggccgctgtctgcgaagcgcccctggcgtccttctctaccaggctttcctcaattttctgcatcacttcatcggaataatgggcctcgccgctttgcttgacgaaagacaccacccgatcgatttcctcttcagtgatcatacagccctgcacgcgctggggcttgctggatcccacggggaaataaagcatatcgcccttgcccaccagcttttccgcaccggtcatgtccagaatgatgcgcgattccatactggacgccacggcaaaggcaatgcgcgaagggatgtttgctttcatcacgccggtgataatgtctgccgaaggccgctgtgtggcaatgaccagatgcacgccggcagcacggcccatctgggccacccggcagatggattcctccacctctttggccgccaccatcatcaaatcagccagctcatcaatcactaccaccaccgtaggcaggcgctgcagcgtcccatcctgggcagccatacggttgaatgaggccaggtctttcacattgtgctcggaaaaggctttatagcgcttcatcatttcgaacacagcccactgcagcgcgccggcagcctttttcggatcggtcaccaccgggatcagcaagtgcggaatcccgttgtaggggttcagttccaccattttgggatccaccatgataaagcgcacctcatcgggcgtagccttgtaaagcaagctgacaatcagcgaattaatgcacacggacttgccggaaccggtggtaccggcaatcagcacatggggaagtttgctgatgttgcccacaatatcccgccccgcaatatcccggccgatggagaaagccacccgggacgaatgctccctgaaggtccggccctccagtacgtcgcggatgagcaccatggagctgtgtttgttgggcacttcgatgccgatcacagaatttttctccgggatcggcgcaatgcggatgttgcccacccccagcgccagagccagatcgtcggacagcgaagtcaccttgttcagcttcacaccctgttccaggcggaactcataacgcgtgaccgacgggccgcgcaccacatccccagcctgggcacgcacgccgaaactctccagcgtattgcacagccgctccagattccgctgctgctccgcctgcgcctgtgccacgttgcccggatgcacatcgctgagcaaatcgtaaggcgggtattcgtagggactgtctacagcttcctttccctcaatctccgccgtcaccgctgcagtggcagccgccacttccgccgccgtctgctttttgctgggcagtttcacctcggacaccggcgcactctcttctgccgccgaaaccggcggctccgccttcggtattacaggcggtttcccagtccggaccgcttccgccgccgcagagaacggcgcatccggaatctccgcggcaagccagtccggcgcagaagtctgcgccggttcagcggcatgcagcgctgccgcgtcaacggtatcctgcgctgccggaactgcagaaaaatccgcgaattcctgcccggtctctttcgtctcatcctttgcccccaaaagctcatggggctttggcacattagacttgcggttaaagaatgatgcacggggcgctttttcctccagctcccctgcccctctctccgctgtacggctgcgcacggcactctctggttcatcgtccagcggaatgtcgatctgaggcttccgccgccgcggtgtctctttgaccgtaatacggctcgtgcgggtacgctcgtagtccggatccggctcatattctacccgacggctacgggatgcttcatacactgtcttcgggttcacctgcaatgcaaccagcagacacaccgccgcaagaagcacacacatcaccgtagaggcaaaggctccgaacagctgctcgaatccatacccgataccgccgcagacaacgccgccgctggtcatcgcaaggccggactgatacagcgcagccaaaataccgaacgccgctgtaaactcctctttgcataaaagcacctgcagcactgcgccgacggacaccggaaacaccagcatacagcctacccgcagccgcacagggcggccgtggtgcagcagcagaatgagccccgtgatgaaaaaggcgggcgggatcagccaaaagccgtagccgaacatgcctttaagcagattcgaaaacagatgaatgaagatagcctctgtcgaaacgtatcccacagcggaaaacagggccaggaccaggaacaccagtccccccacctcccgacggatcggctttttcggcggcggcgtactacggctccccttcttccggccgctggaagcagcggcgctctttgtccggctgccgccggaagcggccgacgccgttttctttttgctctgtgttgctgccatatgtttccctcttattgcctcaattctgatacgtttagccctccccagcgtgcatgctgcatacgggggaagaaaaacccctttgtcattacaaaaggatggatgcaatgatcgtcaacgcgcctactgcccagcagtaataggagaacgcgccgaattttcctttctcggtcacaaatttcaacagccggatggagagatatcccagcaccgccgccgttaccacaccggaaatatacgccggcagcaacgtcatatccacaccggtatccacaatatccttcaaattcaggatattggcgccaagcactgcgggaatagacatcaaaaaagaatagcgcagggcaaagcgccggtcaaggcccaggaagcatcccaccgacaccgtggtgcccgaccgggaaaggccaggtatcgttgcaaacgcctgggcgacgccaatcaccagaacatcgcgcagcggaacgctgccggcgttctttttgccccggttatagcggtcgctgaaaaacagcaacacacctgttatcagcagcgcacagcccaccacgatggtgttggcgctgagtccttctatgtagtccttgatgggcacaatgacaaacaggggcagcgtgccaatgatcagcagcagaatcatgcgccggttcggcggcaccggcgtgggcgtagtgcctctggcgatatctttgacgcccaggaaaaattcacggatcatatccacaatgtccggccaatacgccacaaacaccgcgatcagcgtgcccagatgcagcagcacgtcaaatgtgccgtcagtgctgccctcgatcttcaagcccagcagattctgtgcaatggccagatggccggaactggaaatcggcagaaattcggcgacgccctggatcacacccaggatcaccgcagagagaattgacatatgcaaaagttcctttcccattggtttgaccccgctccggctccccagagatacaaaggagcagaatcgtgcagtttactatttatattaacataaccgcagcggtgtttccagtccttttccggaatctgaatagaaaattaaaaaggaggggcactccccctccttctttggaatccattctcactcgccgcgctgcaggcacgcaatagccgcatgagccgccgcctgctcggcctcctttttgctgtggccatgacctgcgccaaccgctacgccgttgagcaggacttccacagtaaatgttttggcgtgatccggaccgctttctcccaccatacggtaactgagcacttgtcccgtccggcgctgcaccagctcctgcagcgcagttttgtaatcctgcaccaactcgtcggcatgggtgccctccttgtccagcaaaacgcggtggatcagggcggaagccgcttcaataccaccgtcgagatacactgcggcaaataccgcctcggtggcgtcggccaagatggaaggacgggtgcgtccgccgccggcatcttcccccttgcccagcttgagatatttacccagatccagctctttggccacttcatacagactctgttcgcacaccagcgctgcgcgctggcgggtcagatctccctccggaaggtcttgatgcagcgcaaaaagatagtctgccgtgacaaatcccagcacgctgtcgcccagaaattccagccgctcattgctctgctcgccctgggcgcggtgttcattggcataggagctgtgattcagcgcctcggaaagcagggaacgattgcaaaaacagtaacccagtttcgtttccagttctttcatgttttgcctctcccttcccacgcgcgttttccgctcgtttagtccgccagctgctttgcgatgtaatccaccacatcggacacggttttgatcgtgccgagcacgttctcttccgtctccggcagattgaactcctgctccagcgtcaccgccagatccaccagatccaccgaatcggcacccaggtcatcttccagcgcgctgtccggcgtcaccgtttccggatccacggaaaactgctcggcgataatatcctgcaccttatcgaaaatctcatctgtcgtcacagaaaaatcctccctttatgattctgctcctccgccggcggcaaaatccgtctctgccgccaacttctggcatcctaataggagataatagagcattctgtcctgactgtcaatagagatttacatggattgcccattttcttttggcgccgcttccttttcccccgcagtgcgttcgccggtctgcatcaaagagatgtgttccgcgatctcctgctccataccgctttcggcgcaggcaattgccgcccgcaccgcgttgcggattgcccgggcattggaagatccgtgggccttcaaaaccggtttggaaatccccaggaaaggcgtcgctccccgctcgttgggatccagcgtgttcttgatatcgttcacgccatctttgaccagcagcgccgcaaatttggtgagcgtatttttgaaaaagatatccttgagcttcactttcaaaaacgagcccacaccctcaatggttttgagcatcacattacccgaaaagccgtcagccacaatcacatcggcgccgcccttaagagcatccttagcctcgatattgccaatgaaattcagatgcccggcttcccccgcctcctgcagcagggcataggcttctttttgcagcgccatgcctttgctctcctcggcgccgatgttcagcagcgccacccggggccgctccagcttcagggcatggcgggcgtaaaagtttcctatgtaagcgaattgcagaagatattccggcgtgcagtcgatattggcgccgcagtcccccagcaccgcgtcgccgccggccgtggggatcagcggcgccatagccgcccggcggatgccgcgcacacgcttgaccagcagcgtcgccccggaaagcagtgcgccggtgctgccagcagagataaaggcgtcgccctcgccggcgcgcagcatctgcagccccaccgtcatggatgagtcctttttccggcggcaggccagagccggatcgtcgcacatttcaatggtttccgtgcagtggcggatcgttacgccctccggcagcgtctcaccgcattgcgccgcagcctgccggatatcctcttcccggcccgtcagcacaatgtccaccccaaaatcccgataggcctgcagagcgcctttgacaatctccagcggagcgttgtcgccgcccatggcgtcgagaatgatcctcatccgcacacaactccttcctctgccgctgtgcgcagcggctccagtacgtcgagagcgcgttgggccagctcggcgtttttctttctctttccgccccgcacccgatggtccaacggcggcataatgccaaaattcacattcatgggctgaaactccgtcacggaagggttgctgacgtaccgcgccagcgcccccacagccgtctcggccggcagatccagcggcgcaaggcccaaaagccgccgcgccgtttccatgccggccacatagccggacgctgccgactccacataaccctccacaccggtcatctgtccggcaaaggaaatgcgcgcctcagccctgaactgataataccggttcaaaagacgcggactgttcagataagtattgcggtgcatttttccatagcgcagaaactgcgcttggcgcagtgccggaatcatggaaaacacgcggcgctgctcggggaatttcaaatgggtttgaaagcccaccaggttataaatcgttccttcggcgttgtctttgcgcagctgcaccaccgcatagggttcctttccggtgttcgggtcaatcagcccccggggtttcagcgggccgtaagccagcgtctgcacgccgcggcgggccatgacctccacgggcatacagccttcaaatacatgtttgtcctcaaagccgtggacctccgcctcttcggcagaaacaagagcctgcacaaaggcatgatactcttcttcgctcaaagggcagttgatatagtccggcgtccctcgatcatagcgcgacgcgaaaaatgcatggttcatatccacgctctcaaaactcaccagcggcgccgctgcatcgtaaaaatggagcgtttcatgttcaccgaaaaaggcctggagatagcttgccatcgcatcggacgtcagcggtcctgtcgctacaatcacttctcc

SEQ ID NO: 1219 - DNA, 32759 bp, Unknown
  16S sequences of unknown bacteria
aatcccttatcgtccaccagaagtccaccgtaattttgatagaattacggtggactttttctatgcctggaactccgctttcagcatctgggaaaattcctcgatataatacccggaattgtcttttttccagaatacgcagtaggttttggtcaccggctcgccgtttctgaccagtgggatgcgcttcacagcggaatcgaaccactcctgctccccgatcacatccaccggcatatagccctgcccggtgatgatcatcaaccgcgcctcctgcagggagtccgcaaaccggtaatcgccatgcagacccacaatggaggtatagtatgcctgctcctcctgtctgccgtcggcattgatgaccagaatgcagggcgtgttcttcagctcctccggctcgatctgcgcaaggcggctcaggggattccgggccgaaatttcgatgaaggtgcggctttcggggaggattaggttgtggtacgcaccggaaaacgcccgacgctgatcgttgagggccaggtcgatggtgccgttctccatggcgtggtacaggtcgtcgtggctgccgacgatcacctgcacgttgaccttgggatatttttcagagaactgcgcaatggcctccgaaaattcgccgccgtggtagcccttgtagcagcccagtcgaagggtgtagctgtcatccgtgtccagccgcttggtctcccggacaagttgctccaggtcgctgcgaataataaggctcttgcagtaaaaatgctccccggcaggcgtgaggctgaaggtgcggttatgccggtccaaaagctgcactcccagctcgtcctccagctttttgatttgctgggaaatcgcagactgggacacatggcacttttctgcggcagcgtagaagctgccgcattctacaaccgcctgtaagtattccatctggcggaacaacatcgaaaatcaactccttcctgcgcatagtatactacgattagtaaaacttatcaatacaaaaagtattccgaattgattgagaagcatcagaaaactataatgggagccagaaaaccaaggaggaaattgaaatgagcaaaaatcttatcctttactactcccgttccggaatgaactacgtcaacggcaaaatcgtgaacctcaaaaagggcaacacggagatctgcgccgagtacattcaaaagtccgtcggcggcgatctgtttgagatcaggacagtgcagccatacagcgccgactacaccgaatgcacccggcaggcacaggcagagctgagaaacgatctgcggccggagctgcaggagtatcttgaggatatttccgaatacgaccatgtgtttgtgcttggcccctgctggtggggcacctacccgatggcggtcttttcgcagctggagcggctgaactttgccggaaaaaaggtcatggcgctgatgacccatgagggcagcggcatgggcagcagcgaacgggatctgcaccgcctgtgcgccggagcaaagtttggcacgagtatggcggtacatggcgcagatgcggcgaagtcggaacaggccgtggcggcatgggcgaagaaaaatacggaggagtgaagcggatatgaagaatgtgatgctctgggccggtgccggtcagatcggcatggccattgcccgtcggatgggtgcgggcatgaagatcattgtgggcgataaaaagtacgaaaacgcacaggcgattgcaaagacaatgaatgaagcaggtttcgatgtgcttcccatggaaatggatctgtccagtcggacgtccattcaatcgctgattgccgaggggcagaggtacggggagatcaaaatgctggtgaatgccgccggtgtttctcccagtcaggcaccggtcgaagccattctgaaggtagacctttatggtacggcagtgctgctggaggagatcggaaaggtcattgcccccggcggtgtcggcgtgactatctccagtcagtccggttggcggatgcctgcactgaccgcacggcaggatgagcagcttgccactgcgcccacggaagagctgctctctctggacttcctgctgcctgaaaatatccgggacacactacacgcctaccagttagccaagcgctgcaacgaaaagcgtgtgatggcggagtccgtaaaatggggtgagcacggagcgaggctcaacgccattgcgcccggcatcattgttaccccgctggcattggacgagttcaacggcccacggggagatttctacaagaatatgttcgccaaatgccccgccggtcgccctggcacggcggacgagatagcgaatgtggccgagcttctgatgagcgacaagggcgctttcatcaccggctccaccttcttgatggacggcggcgcaacggccagttatttttacggtccgctgaagccacaggaataaatgaaaagtacagcaaagggggggtgcatttccaaaaaccactgcaccccccttggcatcgaaaatgcaccccctcttaaaattctattagaattagggttatttaccacgtcgccgcaaacagcacaccgtttgtggcgacttttttgcaaagcgcatttctcatttattatgccgcagcttctctccaattgtacccgctaaactgaccccagcttataggcgtaagactgacagcgcctgctttaaaaaagaccatcctttccagttaaaaatattattaaaagccaaaactttcaaaaattctttttaacagtttttacttttaaattcataacaatatacatccgtcgtactttttttaagattattccaattcaaaagcccctgtatagagctgatagtacgttcctttttctgcaatcagctttttatggctgcctcgttcaataattctgccgtgatcaagcaccataatcacatcggaattttgaacggttgaaagtctatgggcaattacaaatacagttcttcctttcatcagcttatccataccgtcctgtaccagcgcttcggtacgtgtgtcaatggaagatgttgcctcgtctaaaatcataacgggagggttagatacagcagctctggcaatggaaatgagctgcctttgcccctgtgacagaccgctgccatctcctttcagcacagtattatatccctgcggaagcatacggataaatccgtcagcattagcgagctttgcagcagcaatgcagtcctcatccgtagcgtcaggatttccgtatctcaaattatccataaccgttcctgtaaacaaatttacttcctgcagcacaacgccgagagaacgacgaagatctgcttttttaattttattaatatttataccgtcataacgtatcttaccatcggcaatatcataaaaacggttaataaggtttgtaattgttgttttaccagcgcccgttgcaccgacaaaagcaattttctgcccgggatcagcatagagagaaataccatgcaaaacctgcttttcgggaacatatccaaaatctacattatcaaaaacaaccctgccttcgagcttagtataggtaaccgttccgtcgtgatgcggctgcttccacgcccacattcccgtgcgttgttcagtttccttaatgactccgtcttcttcttttgcattaacaagagtcacatatccctcatccgtttccggctcttcatccataaacgcaaaaatacgcgatgctcccgcaagagcggtaacaatggaattgaactggtttgaaatctgtgaaacgggattggtaaagtttcttgaaagcgttagaaatgaagcaatcataccgagtgtaagcgttcccgtccccgtaagtccgagatttgttgctcctgtaatagccatatatgccccgagaacagcaataataacgtactgtacataaccaagagcattcatcatcggcatcatagaattggcatagccgtttgcacttgccgcatttattgcccaggctttgtttttctcgcgtaattcttccttcgccttttcttcgtggcaaaaaaccttgataaccttctgtccgttaaccatttcttcgacataaccattcacatcagcaagtgttttttgctgcatcataaagaagccgctgattctacccgttaccatttttacgatttgtaaaatcaagaacataacagcagccgcaacaagtgtcagccatacgctgacgtaaagcatacaaattactaccgccacaatagtaaataccgaagatataagctgagccattgattgagcgatcatctgccggagcgtgtcagtatcgttagtgtaaagactcataatatctccgtgtgtgcgtgtgtcaaatgcacgaataggaagcctttgcattttttcaaacatttcatcacggatttttttgagcgtaccttgcgctatcgtaaccattacccgactataaagcaaagtggaaatcacgcctgcgagataaactgcacctattaacaccaatgcctttaagagctcagaaaagacaggattgtaagcgccgagcaacggcgttatataatcgtcaataagcgattgtaaaaacaaggaagaagcgacagacgcagcagcgctcagcaatatgcaaacagcaacaaaaacaagctgtcctttataatctctcatatatgaaaataatcttttgaaagtttttgtatcaaaacttacttttgacgacataccttcagaccctttatccttagaaatcattttctctttcctattcatcaccctcatctcctttcttctgtgattcaaacacctcacggtaaacactgcaatttttcaaaagctctttatgcttgccaacagcgatcaccttaccgtcgtccaaaacaataatttgatctgcatgctgcaccgagcttatgcgctgcgcaatgataatcttggtagtatcgggaatatactttgcaaacgatttttgaatggccgcgtcggttttagtatctaccgcacttgtagaatcgtctaatatcaaaacttttggtttcttcagcaaagcgcgcgcaatacaaagtcgttgtttttgcccgcccgacacattggcgccgccctgttctatatacgtatcatatttgtcagggaaatcttgtataaattcatcggcgcaagcaagtatgcaagcttgttctatttcctcatcggtagcattttcattgccccaacgcaaattttctttaatcgtacctgaaaacagctcatttttttgcaataccatagcaacagcgttacgaagcgtatcaagatcatatttttttacatcaatgcctccaagcgtaagccttcctcccgtaacatcataaaggcgaggtataagctgaacaagacttgattttgacgagcccgtgccgcctataataccgacagtttcacctgatgctatggaaagattgatattgccaagcacctttgtattggctttagaagcataagcgaaatcaacattttcaaagttgatagagccgtctctgaccgtcatttcaggattatcaggatttgcaatatcggtcttttcatctaatatctctgcaatacgacgtgcagaggccacggaaattattatcatagcaaacaccatcgagagcatcatcaggctcataagaatttgtattgcataagaaaacaaagcggtcaggtctcccgtcgtcatccccagcgcagcattatttccgcttaaaacaattgcttttgcaccaatccacgaaataagtatcatgcatgcatacataaagaactgcataataggagagttaaacgcaagcaacctttctcctttcgcaaaatcatcgtagatgctctttgatattcctttaaattttttaatttcataatcttcgcgattaaacgattttacaacgcgaattccgcgcacgttttcttgtactacattgttaagctcatcatatttatgaaacacacgactaaaaattggatttacttttctgatgatccaaataagaagcaaagccataacaggaatcacggcaagaaaaatccaagcgaccgtactgtttatgcggaatgatacgatcattgaaaataccagcataacagggccgcgaattgccatgcgaatcagcatttgatatgcattttgaatgttcgttacatcggttgtcaaacgagttacaatagaagccgttgaaaatttgtctatattagagaaagaaaaagtttgcacattatcgtacatatcctgccgcagattagcggaaaatcctaccactgttttggcggcgatatgtgccgaaagtacgcctgttaaaagctgaagcgccgcaaatattaaaagtacgatgctgtatttccatacggcactcatatttccgaggtcaatgcctttgtcgatgacttctgccatacaaagcggtattaaaatttcaaacgccgcttcgagtatagataaaagaattgtaataacagagccttttttatattcacgcaggctctttgctaatgttttaatcatatagtcctcctttcagtgtagcgcgctacattttttatctaaatataagccgacaatatatcggccttcttattcaagatttttataaattctcagtaacatttctctcaagcgcttaatatcttcattagagaaagaggttaaaatcttttgctcgttagcaatcatgctgcgctccatatccattctcaatgcttcggcttgttttgtaagtttaacgattttatttcgtctgtcgttttcatctatataacttataacataaccgtttcgttccattcttgatacaattccgactacggtaggatgagatacctctaaaaatatctcgatttctttttgcgttgcctgaccgcctttactgttcaaaaaagcaaaaacacggctttgcgataatgtaatgttatgccgtttcaaatccgcatctgctttaacctttaatttatcgtttatgtttttaataagataaccgatatctttttctggcacagtattacctcctttcatcaagtgtagcatactacatattatattgacattatgccattatgtcaagtatttttgaaaaatttttttaacccctttgtcatctgcatcaaacttatgtcaaagcagatccttctaaaagataattttctgtatctctgcttctaaagcgtttgtttttgcaataaaattgcccggccgtttgcggccgggcggtcaataaacgcattttataaatgcaagccagcgttttacataactgcatgcacacgcctgttattaaatttataccaaccttttaagatacaactatcaatgtgcccaaataattctttacctacagtacttgtaaatgccgttgctttataaaaatgcgaatattgcagttttagtaatggcaaacgattgcctgccgattgcgattgcttacattttaataaatatagatattgtcactattaaaatgctttaatatgtatctgctgctgaacctctgagcgtttctaaaagcttaccgtctttgtaacatttatatgtaacatcaatataataggctcctttatcaataagctgcttattatcttctacctgaaattcaaaagcgacctccgaccattttgcatcgtatgtcttttttctaagcaatgttccgtcgattttttccaatctcaaagttacctctactttatctattaaaccgcttgccttaggtcttaagtatgcagccatagttgcatatccttttgaatcaataagaagtccttcagaatgcgaaaaagttacgacaaatcttggagatacctgctcttcatcacgcactgtgctcattgcaggatctgcaaaacatgttgaaaatgatgcaagcataaccatcgccataaaaattgaacaaattatttttttcataaaaaacctccttttttctttctatacactattactgcaaaaaggaggttttgttacatatttttttaaaaatttttaaattttttattaagttattcgatatacttcatattttctgctatttcaataatgagattatcatcaactgtattagaaattgaaatttctaatacactgtcatatgtctgccaaatcagatccattgaattattatcttcgtttatatacatatatccttcaaagctattgatatatactttttcataaatatttgtatctatatctatcattgacaatactcgttcgtttttctcatatattcttattctgctgtctatatctacagattcaaacagcatagttttttgcattttgctgtcttctgccgagagcagataatatccttccggcagatattcgggataccaatattttgtccagtccttgagaagttcgtattccgtatcgttgcggaacactacggtgccatctttattttcaaacaaactgaatactttcattcggaaggcttccgaagcgcttatgccaatactgccgaggccgattactgctacggcaaaaacagcgacaattctgagggctcttcttctcttcattgtgcgcgtattcttttttaatttcgcatcatagctgcgcgctatttcaagaatcgtgctatcgtgttcatcaggtacatgcgtttcatttttctcgtattcctctatttcgagattgagctcgtcatcaacaatttccgcaattttttctataaacgaatcaggcagaatttcattatttaaagcatcttctcttatgtctatgtccttttttgtcataacaaaatcctcctttttactcgttttcctttttgagcctgagcaattcttctctcaattttctaagagttctgaactgcctaactctcaccgcttcttcagatatttcaagaatactgccgatttctcttgcactcatattgtatgtaaatctcatctgaataagttccttttcgtctttcgtaagtacgcgacacgctttttttagataaattgcatcatcttcaaaaatcgcattatcttcggcggagggttcggtccttctgtcaaacaaagttttgtctcttctatcatctgcttttcacgtttacttgctttttcatagtcctttgcaacattcctgaccattactcttaaataattcttcacccagcgcttattcattttcaaaaacatttcactctttttaaacacttttacccaaactgccgaggccaaatcatctttaagcgattcatcctccacaatatccgataaaaatgcatatataagttttctgttttctatatataattcttccagtgagctgtatttattgctatgttgattgctgcgtctattcataaaattactcccggcctatatttaccgatatttgataccgatctcaaaagtggcatacttgctatttccctgaattttttcaccttatttgatattagttgtcgaaaaattccgctgccgctcttttctacacttttgtccggcatattttttactttatatgattttatttttccgtgtttaccctgtttattgtcgatgcaagatagcctgcaccaaacccgttgtcgatatttactatacccactccgttagcacagctgttgagcatagaaagaagcgccgaaagtccgccgagattggctccgtatccgatactcgtaggtacggcaataaccggcttatcaacaagaccgccgacaacgcttgcaagcgcgccctccatacccgctaccacaataacgacattggccgctcttattttttcaaggttggcaaaaagtctgtgaataccggcaactccgacatcataaatcctttctaccggatttcccagcgtttccacagttattgccgcttcttctgccaccggtatgtcagctgttcctgctgtcactaccgctatagtctttcgggaagaaataacgcaaagctcagattcatcgagcggtctttgcactacaattatgcgggccgcttcatgaaaaaaagcttctgcatccggcgcgccctcacggtcaagatgcgcacatacggcttcatattgttcataagttgctcttgtacccaggatggcattgttactgagcgaaagtctggccataattattccgacttgctcagctgtcttgccctggcagaaaaccacttccgggtagcctgtgcgcagactcctgtgattgtctatgtttacaaaatcaaggtcttcaaaaggaagagtttgcagaattttttccgcctcttcaggcgtcatacttccttccgaaacgtctctgagcagttttctcaaatgtgtattgtccatttgcagtcctcttttcgatcctttttattaaaaatttgtacgaagctccatctgttttctccggaacttcgtacctctcataacttgcctattctttttagaaaagtccggtaatcttacctgtttcgtccacatctatgcgctctgctgccggcacttttggaagacccggcattgtcataatatcacccgtgagcgctacgataaatcctgctcctgcggaaactttaatatttcttatcgtcaccgtaaatccacgcggggctccgagcagcgcagcatcatctgaaaagctgtactgagtttttgccatgcataccgacatttttccgaagcccagctcctcgagcttgtctatctgcttcttagcagccggaagaatgttgatgccgtcagctctatatatcttcgtagcgattgcctcaatcttttcctctattgtaaaatcatcttcatatgcaaatctaaaattactctcttcttcgcagagcttcaccacctcgtttgcaagtgcaattccgccttcgccccccttagcccatacttctgaaagcgcaacattgacgccaagttctctgcaccttgcttccacaagatcaagctcagctttagtatcagtcggaaacgcatttatcgcaacaactgccggaagcccgtagactttggtgatgttttccacatgctgaaggagattcggcagtcctttttcaagagccgcaagattttcgctgttgagcttttccttggcaacacctccgtggtgcttaagcgctctgactgtcgcgactatgaccaccgcatccggcttcatttctcccatcctgcattttatatcgagaaacttctcggcgccaagatccgccccgaatccagcctccgttaccacataatcggccatttttcttgccatttttgtagctatcattgagttgcagccgtgagcaatgttggcgaaaggtccgccgtgaataaatgctggagtcccctcgagcgtctgcacgagattcggctttagtgcgtccttgagcagcgcggccgccgctccctgcgcctttagctgacccgccgtaactggcttatcatcatatgtatagcctacgataatattcgcaagcctatttttcaaatcggtaatatcgctggcaagacataggatcgccataatctcgctggccaccgttatatcaaatccgtcttcacgcggagtaccgttcggtttgccgccgagcccgtcaactacaaatctaagctgtctgtcattcatatctacacagcgcttccaggtaatttttctcggatcaatgccaagactatttccctgctgaatatggttgtccagcattgcagcaataagattgttggctgcgccgatagcatgaaaatcacctgtaaaatgcaggtttatatcttccatcggcactacctgcgcgtatccgccgcctgccgcgccgccctttacaccgaaaacggggccaagcgaaggctcgcgaagcgctaccacaacatttttgtttatttttttaagaccatccgcaagacctactgtcgttgtcgtctttccctctcccgcaggagtcggtgatatagccgttacgagaatcagctttccgtctttgacatcttttctgtcgtaaagcagattgtagtcaatttttgctttgtattttccgtactgctcaatgtatttttcatcaattcccgccgtttttgctatttcgtttatatgtttcatctcggcggcttgtgctatttcgatatcgcttcttatttccatcgatctttcccccttgctcttttcatatatatagtatatcttgacatattttcagtgtcaaattgcttttaccttataaatgaatttttattctatttttaaaaaataatattcttcaaaaatgtttttctgtgtattggacaaatgcctgcacgagaaattccctcataatgagccttggtaccataacctttgtttttttcaaacgcataatcgggatattcttccgcatattttaccatcattctatcacgtgtcacttttgctataatggaggccgcggctatagataccgattttgtatctccttttattagagaagtctgttcaatattgatgctgtcaattttcattgcatcaaaaagaatatgtccgagctgggagccaagtactctttgtacctctgcaactgcatccgccatcgcttcttttgtcgcttcaagtatgtttatttcatctatacgcttgttattccgcattccgataccgactgcaagcgcattttcaagaatgagtccgaacagctcctcacgttttttggccgataatttctttgaatcgtcaacacctatcactgaaaaatcctgcggcagcaccactgccgccgccacaactggtcccgcaagcgggcctcgccccacttcatctacacctgcaatgtatttaatacctcgcgcccaaatttcattctcgtactttttcatttcagcaagatgctcgcgcagcattgcttctctttcttcttttttcatttttttctttccgtgtattttctttgcttcaaagctctgttttttccagtgttatatgccctataagcccgcttctaaactcatcaagtattgttcttcccgctctttcataatcgagctttttccccggaagaatccagcctcttttacggcagatatcgttcaaaagcagcagcaccggacttataggaaaaccgtcttcatcatactcttcttcatcgtaaatggcgtacccctcatcatctgtttccgcattttccttcatttttagtttttccggcacttccactttataacgcgcttctatttccgtaggatattccgccgcaagagtgccaagcagctcaagtgcaaggccttcggtatcaagtatttcatctcttatcgagccgcagaacgcaagattcagaccggctttcggatcttcaaatttcggccatagtataccgggcgtgtcgagaagctgcatattattttcgagattgagccactgtttgccacgtgtcacccccggcctgtcccctgttttagcacttttcttccctgtcatacggtttatgagtgaagatttgccgacattcggcactccaactatcatcattctaagcggtttcaagcgcagactgtctttattcttttcatcccgaattttttcaagcatacgctgcagctcttttacacccgcaccgctcatgcagttcatcgccagcgccagattaccctgcgcgcggaaatattcgcaccactttttattttccttttcatccgagatatcacttttattaagtatcacaattcgtttcttgtcttttactatttcatctattatcggatttctgctcgaaatcggtatgcgtgcatctataacttctatgacgatatcaactgttttcaggttttcctgaatcagctcgcgcgtctttttcatatgtcccggataccaatttatattttctatcataatttccccctttttcaaacctgaaacctaagcacccgcctatgactaaaaaagggaacctttttaaggctcccttctcgcttttacttacagttccttgctcttgatcttagcagctttacctgttctctcacgcatgtagttaagcttagctcttcttacatctccgcgtcttactacttcgattttttcaaccagcggcgaatgaagcgggaatgtcttttctacacctacgccggatgcgattcttcttactgtaaaagtctcgccgatgccgccgttctgtttcttgagcacgaatccttcgaatatctgaattctttctctctgaccttctttgattttgatgtgtacttttactgtatcaccaacaccgaaagcagggatatcgctcttcttatattcttctgtaattgcgcttaaaatatccatcgtctttcctcctcccttacaaaggcgttcgtagttcagaatttatacgcaaactgcgcccagaggaccgcccgtaatgaccttatatattttagcacgcaaggagcctcgtttcaagttttttttgcatattttatgaaattcgcgtaattttattgttttaaaagcaatctttatctctatttacacattcactgagcaagctgtcaaatgcaggaaatctacgttttatcgacacaggatggccgtccttatttataacgcagtgttcgctccgtcctgtcgccgctgtttctccgcttccagcacgcacaatttcatattcaaaaacgtatcttatacccgtatattctatgagctttactttaatttccacaatatcgccaaaaatgcatgaaatcttataattgcacgaaaccgacacaacaggtgaaataacgccatcagcctccaatttatcaaagcgctgccctaactgctcgagataatcaagtcgtgcctcctccatccagcgaatatagtttgaatggtgaactatacccattttatcagtctcataatatctgactttaaaaatatatggttttgtaatgatcatatttttatcctgacctgcactttctttgtatttatttaatcaaatgtctcgcttctatatatttaattatgccctaaatacaaaaaaatcgcaatacagcaaagaccgctaaagcggtttttttaaactgctaaagcggtcctatgctctttcattttatttttcggcgtttaaaatttactgtatcttatgctattacgctatgtgcaaagccgcgcgttataatcttagctgagcagttgttccaaagctgccgtctgtcatttgtatagcatataccgtaccgttatcaaggtagtaatatgtatctccaacataacagagtctgctgaaataaaatgcattttcatcgccttcatcgatcatataattattgacattcgtattttctatgctgccttcgaggctgatattttctcctgaaatatcaaatatatatgcaccgtttgtatctttaccgctctcgtaagaagatgcacagatgccgatgaagtttttatccctatttaccattatcgctttatggtcatagagcgcatccgaccaagtcgagtcgccgccaagaatatagctgtccagttctttcgggtctgtaaaatcgcttatatcaaacagcgaaagtttaattcctccctctctaaaaccgacaacctcttcattgccaaactcatctctcgtaataagctcttttgtctgacgtcccacaccgagcactgtattttcatctatctgatgcagataattgctgtagccaggaagcttgagttcccccgcaattttcggattttcaggatcagataaatctactgtaaaaaacggatccattgtctcaaatgtaactatatatcctttatctcccataaatcttacggaataaatttgttcgcctgtagctatatccttgatgctgccaactatattgagatttttatcaagcacaaagaggcttgaggactgctctccgcttctccattcccactcggtagctgctacgcggagatatccgccgtattcgtccatagagaactggttcagcaggctgccttccactgtgccgtcggctctgtatgtcacttttttaccatcaacatcgagcgctattatatccgtatattctcttcctgtacctgttttttcatcatactcataattatcaaatgtcaagaatatcgaatctttattcatataaaaatctctgacagatcccatataactcttgatatccgcctcttcgtcccctgcaatattgagcactgccaaagtcgtgaacgccgcactttcctttattgagcaaagatatacgcatgaaggttctgctactatcatttcctcgccgccgaaattaaaagtatctttgccatcaagctttgctctcgtatctgagtagagcggtaatatatcgctgccgcttgctttctcaagatcattgataccgtaaatatacttgctggccgcaaggtatacgatctctccggatttacgggctgtaacaaaatcaccttcaagcgaaaattcctgtaaaagctctggcttttctttatttgctgtgtcatatatatttacatctgtaaatgttttgcattcataccagccaaatgcgggatcgacagtaaaatttgcatctgttttcattgccgcgtaaaccggcatcgacagatctgctatctcgctttcgtttactattgctaagtcctcgtttttatcataaagcacaggcgctttctcctccattgtatgactgccaaatacaacgagcctgtcttcatctataaatatatttcttataaaaaattcttcctccaattttgcagccactcccattttattcttatccacagaaacgatatacacgcacttatccgccgcaatgtaaaggtactcaccgtcagtctttacgatatctgcctcatctataccttcaatttgaacattggtctctgaataccctgcatttgccgcagctcctgtttcctcatcaaaagccgcgctcgcatccattgcattgcctgaggcttgtgcaaagtcttccattgcttccagcatagccgaaggcgctttactcatatctccgccgcctgctaacgctccgtattttttctgcgaagaattgctgttgtcaaaccttcctgttttacgcagcgcgtttttaatatcgtcaagactcgctgcccttgcaattatatcgctgtcaattttttcttttggcgatgcggtgtatgcaaaagaaaacaccgtgcccgcgcacagcacaagcgtaaataaaataattcccgcctttttcatctcgttctttccccctatttttatttttccacttttataattttgacttgaaaaataagggatttgttcccataaatttagtatttttaaagtatttgtccttagcttaaaattaaaaacaccgtcagcacttattttttaattgacgcgcatgaccgttatcaattcatatatacttttttgatatatcaaggcagtttctatatgtatttgatattataaaaataccgcgttacaatgtgagcatagaaagatgcatatgcagagcaaaacttaaaaaatatggaggtaatactatgtatcgtaaacaatttcaagataaagaaatttctgcacttggctacggcggactcagatttcctatggacaaggacaatccaagccgcatagacagggaggcaagccaaaagctaatagatgcagccatagcaggcggtatcaatttctttgacacagcgtatacataccaagccggcgattcggagagatttttaggcgaagctctttcaaaatacccgcgagacagctattatctttccaccaaattctatgctgatgcgggcgtaactatagaggaagcttttgaaactcagcttgagcgctgcggcgtcgactactttgatttttatctttttcacagccttgatgaaaacttcataaattattttatggaccctgagaaagactgccttggatatcttattaagcaaaaaaaggcaggaagaataaagcatataggcttttcctcgcacgcaggtccggatactctcgaaaaatttgtaaactggtacgacggttttgatatggcgataattcagctcaactatcttgactgggatctcctcaatgccaaaagacagtacgaaattttgacggagcataatattccgatatgggtaatggagccgcttaaaggcggaagactgtctgagctcaacgaagaagcaagggctatattaaaagaagccgcaccggagcgctcggtatcgtcgtggggaatgagatatcttatgggtcttccgaatgtacaggtagtaatgagcggtatgtcgagcctcgagcagcttgaagataatcttaaaaccttcgatcatttcgatccgctgtctgaaaaagagcttgaagtattgaaaaaagccgcagctgcgttccgcaaggatctcggcgtaccgtgctcatcctgcagatactgctgtccaacctgcccaatggagctcaacatcccggtactcatcaagggctataacgaatggaatatgagcaaggcgctttggaaagtagcggagctcattacggaaaaaacacctgacaactgcatcggctgcggcgtatgcctgcaccactgtccgcagaagatacagataccggaggtgatgagcaaatttgcagatataattaaggaaaatgatatagattttacaaaaatctgatgcggaatccgtaaagaaagaacccagtatatttacagcgtatgttgaaaatgtattgggtttttgctatttttgtgatagaataatttttaatgctgcatatagtataatattgtagaaaagaggtaatttagatggaatatacatattatccgaaaggtgtatgctcgaataaaatcgacatagaggtcgagggcaatattattaaaaatgtaaagttttacggcggctgcaacggcaatctcaaagcgctctcaaagcttgtaaagggtatgaccgtagagtctgtatctgaaatactttctggaaatacctgcggtttcagaccaacatcatgcgcagatcagcttgtaaaaggccttaacgaggctatggctcttgaccaagaggcagcatcctgtgaaaaaaccgaagcctgcgcggcaaacgaagtttcagacgaagacaaagatttaggccagacagaaaaagaaaacgaagaggcagaggcgtaggcatgaccaagcttcttctcaaagtttttgttaaagactatgaaaatgttaaagataccggtgtgcgcaaagcatatggaaagctggcgggaatagtaggcatagtgtcgaatatccttctttgcattatgaaagtagcgattggaattttcacatccagtatcgcggtagttgcagacggtatcaacaaccttgcggatgcctcatcgtcagttattactcttataggctttaaactcgcgtctcttcccgaggataaagagcatccttacgggcatgcgcgtatagaatacctgacgggactcctcgtctctgtgctcattatagttgtaggagtgcagctttttcgctcatcggcaggaaaagttatgcaccccgatgaatttgtgttcagcacagcgactgtggccgtactcgttgccgccattgctattaaagtctggcaggccatgtttaacatcgggctcggaaaaaggatagattctgtagcgctcatcgctacaggcacagatagcagaaacgatgtcattgcaacaagcgcggtgcttattgctgttattataacgaagctttcaggttttcagctcgacggctatatgggttgtgtcgtagctctcttcatcatatggtcgggcatatcacttgtaaaggaaactgttagccccctccttggagaagcacccgacgaagagcttgtgcgcagcatcgccgaaatgacagagagctttgacggcgtgcttggaatacacgaccttatggtacacaactacggcccaggcaaggttttcgcctccgtacatatagaaattgacgcggacggcgatattatggcggcgcatgatatgatagacaacatagaaaaaacagtgtcgtcggctcttaatattgaacttgtagcgcatatggatccgataaaaacaaacgatccgcagcttacacaaatgaaaaaaattattactgagctgctgtcagatatggaaggaatcgtgagcatacatgattttcgcatggtgcagggtccgactcacaccaatataatttttgatgcggtaataaaacacgactgtaaatatacgcaggaggagataaaggatatcattgagaaaaaggtacaggaagtaaacccatcgtactttgttgtcatcacttttgataaggaatatgccagctatggcagtgcaaaataatgagatttcacagtgtaccggcatatttttaagcctggggtgattttaaccatattaaaaatgcgatctgtactcacaaaaatataggaaacaacataatatgtaggaggactcttctctgcggagcagcgttgtaaatttcgcagcgcgcggaggagcgtcctccgatttgattttttgggggatatcttaatgggtatgatttatcttgataacggcgcgacttcttttccaaaaccaccgggaatggcggaaacgatggcttactgtatgaaaacctattgcggcaatccgggacgctccgggcactatatgtctatgaaaacgggcgaagaggtatataacgcaagaaaagcggtagcgggagcgtttaatattaagagagcggagcgagttgtttttacactcaatactacaggggcgcttaatgccggtatcaaggggatactttgcagcggagatcacgctgtaacaacggcgatggagcacaattctgtgctaaggcctcttaaagctcttgaaagggacggagtaacccataccattgtaagatgttcaaaatacggtacggtatctcctgcagatataagaaaggcaataagagaaaatacaagacttgtggtatgcacgcatgcatccaacgtgacgggcacactgcagccaattgcgaaaataggagaaatgataaaagagataaacagagaaagagacgccgaaaatcgtataatatttatggtagatggagcacagagcgcagggtgcgtgcctatagatgtagaagcaatgcacattgatatgctggcagtgccgggacacaagggccttcttggtccgcttgggacaggggcactttatgttggcagtgatatagatatatatccaatcatagaaggcggaactggtaccgccagcaaggacagagtacagccgcttgaatttccggaaggctttgaatcgggaacagtaaacgcccccggtatcatagggcttggccattcagtgacgtgggtgcggcgcataggggtagaaaatatcagaagacatgaagaagatatcataaggccgctgcaaaacgcgcttatgaatatggattgcgttaaggtctatggccctgcggactgcggtgaaaagaccgcggtagttacttttaacgccgtggatcgagacggccgcgtccgtctcggctgtgaggaagtcgcaggccgccttgcagatgaatatgggatagcagtgcggggaggtttccactgcgcagggcttgctcatcaaactatcggcacctgggatacaggcgcagtgcgtatgtcggcaggaccgttcaacacgccgaaagaaataaaaaagacgatagacgcggtctatcgcatatgcaaagaataaaggcacagtatcttgaaaaagcgaaagcgccgccgcataaaaaacacagccacgcgtcaaacgcgtggttgtgcatatgcgggcaaagccctctgttcttcgcgggacacgtcaaacgtgtaaactaaactgccagccgcgtttcttcttaagcttacttcttcttaaaccgtacgcgttctcccattgtcagttgttctcctaatttttcttcctcaagctgttttcttatgtactcctttccattcacaaagctgccttaatattttccctatcgcaaccctcttctcaccatagaatacttttctcctatacttctgtgcaaagactatgtggtatttgcaattccgcttggaatgcgataaactgtttatgtcattcatactcatttgaatatcctccttcttttccttggtttacagttggcagaccgcattccaagtttagcagaaggagtttttttgttcaaatgtataactgcctttgaaccgcgcgtttaacgcgtggttttctgcatacaaaaaagcactgtattttctatacagcgcttttttgtttgtgcgttttttatattatagcttaggcttacgatgtataatatcgcttctgccgggaccgtttgatacaagcgtaatcggaaaaccgatgagcttttcgatttcatctacatagttctttgcttcctgcggtaatttttcaaagtccctgatgccgcggatgtcgcatttccagcctggaagtgttttgagcaccggtttcgccttgtaacagtcaactgtgttcggaaagtttgttatttccttgccatcaagctcatacgctacacataccggaatttcgtccaaatagccgagaggatcgagcactgtgagcgctacttctgtcgtaccctgcatgcggcagccgtagcgtgtggctactgcgtcaaaccagccaacacggcgcgggcgccccgtggtggccccatactcgcctccgtcgccaccacggcggcggagatcctccgcttcgtctccgaaaagttcggagacgaacgggcccgcgccgacagcgctcgaatatgcctttactaccgttacgatatccgtaatgagataaggcggcaagcccgccccaacagcggcaaatgccgctagtgtcgatgagcttgttaccatcgggtaaatcccgtgatctgtatctttgagagcgccgagctgtccctcaagaagtatattcttttcattttgagcagcttcatagagataagcagcagtatccgctacataaggctttatcatttccctgtactctatacaagtcttaaaaagctcttctgcatcaagcagcggtttgtgataaagatgctcgagcagaacatttttttgtacacatactgtctgaagtttctcttttaagtgttcgtcgtcaaagagctcgcacacctgaaaacctattttcgcatacttatccgaataggtaggcgcgatgcccgctttcgtagatccgaaagactttcccgcaaggcgctcttcttcatatccatcaaacaatatatgatacggcattactacctgagcgcggtctgatacaagaatgtgcggagcaggtactcctttttccgtaatggcattgatttcattaataaggtaaggaatattaagcgccacaccgtttccgataatgctggttgtatggctgtaaaatacacctgacggcagcatatgaagcgcaaatttaccgtagtcatttactatggtatgtccggcattgcttccgccctgaaacctgacgatgatatcggcttcctcagccagcatatctgtaatttttccttttccctcatcgccccagttggcgcctacgattgctttgatcataactgattcctcctatctttcgatgcaaaagaacaaaattttgtacttagacattgatttcagcgtgcatgccaagtgcatctttgttctccgccagaataggctttatgaccccgtttagaaactcttctgtctgctcgggtgcccggccgacataattttccggcttcataaccttctgtaaagcctctttgcttatattaaaggcgggatcagcggcgatcctgtcaagaagatcgttcgcttttccttcttcctttacgagtttgcccgccgccattgaatgcgtgcgaattttttcatgcagctcctgtctgtcgccgcccatttttacagcgtccatcataatattttccgtcgccataaaaggcagctctgccatcagatgtgctgtaattaccttaggataaacgacgagaccgtttgccacgttcatatacaattcgagaatgctgtccgttgccaaaaatgcttcgctgatgctgatccttttgtttgccgagtcatcgagcgtgcgctcaaaccactgtgtgctcgccgtaatggccgggttcatagccgtactcattacatagtttgccagcgacgccatacgctccgagcgcataggattgcgcttataagccatagcagaagaacctatctgatgcttttcaaaaggctcttctacttctttaagattttgcaaaagcctgatatcgttggaaaatttatgcgcgctctgcgcaatgcctgaaagcagcgaaagcacgcggctgtcaacttttcttgaataagtctgtcccgaaacaggataacatgctttaaaacccattttttctgcgataagctgatcgagcttcttgcatttctcgtggtcgccggcaaacagctccaaaaagctggcctgagtacccgtcgtgcccttgcttccgagcagcttcatagtcgcaagtacataatctatatcttcgaggtcgagcacgagctcgttcatccaaagacatgcacgcttgcccaccgtcgtaggctgcgctggctgaaagtgagtaaatgcgagtgtcggcagatctttatatttttccgcaaatttacttagcgcggcaaggacattgatgacctttgcgcgcacgagctttaagccttccgtcataatgatgagatcggtattgtctcctacatagcagcttgtggcgccgaggtgaataatacctttagctttaggacactgaagcccgtatgcatatacatgcgacattacatcgtgacgtacttccttttcgcgttcctttgctgcttcaaaatttatatcatccttgtgcgcacgcagttcttcgagctgctcatccgtgatatcgagaccgagctcctgctccgcttctgcaagcgcaatccaaagtctgcgccaagtcttgaatttcatatcgggcgaaaacagatatttcatctccttgctcgggtaacgctctgaaagcggacttgtgtatcctgtataatccaccattagcttctcctttcatcagcctttaattttaagttttaataaattattataccataaaacaacaaatcatttcaagatttgtacacacaatatgaactccaacaatttttatgagaaaattcagaaatctatatcttttttctgcattatcgtgtataatcaacataattacttattttataagatgttctgattatgtttaggaggcagataaaatgttcaatgaacaatcacatgcgtttatcgcagcaatgtactataacaagcttaaggaacgtttcggagatacaggtgttgccgcctttactcatgcaacgcagcagtatgggcttcagagaggccaccgtatggcattaaaagctttgcgggacggcaagccgcttgacattttttcatacagagaatatggcgaactgataagaactgctgatgcaccggaaaccattctcgaagttgaaagtacttcgcctgattacgtttatagaataacggcctgtccgtggcatatgcagtttgaaaaaatgggcgcgctcgaagccggcgccgcttattgctcagagatcgacgaagctctttaccgcggctttaacccggatattgggtttaccgcgccttgcaatctcagcaaagactgtttttgcagacatgtaacgccgaatgtttttcttgacaaagctcctgaagttcggcaaaaaaacgagcttgcccacaccttcgattatcactgcgcacacctatattttagttacaacagagttaccgaagcagtatttggtgaagaaggcaaaaaaataaatgatgaagttcttgaagcctacggccgcgaatacggtgcagaagctgcttcaatactcaaaagctacgaaaacacagactttaatgccatttaaacagcccaataattaaaacaagaaaatatcaagccggtcgcttttaaaagtgaccggccctttgtttaatatctgcataatttaatctatatgcgttcaaagcttgcttcaggaatattatgctttaccctgtctgcttcttccgccgcctttgccgaattccaattatccatagtgcctacgagatatcctgtaattcttcttattctctcaaatccaatcggctcaaacttatagtgcagatccacaaactcaccgtcaacattgatatcaagactttggagcgtcctgttatgcttcttctgcaagtaatcgacatacgccattttctctttttcgctcagttcagcacctgttaccgtaaaagctatactcatagcgacacctcctatataatgtgtaaaatttatatttattatttgaaaagtacaatataaagtatacgctggaacaggcaaaaagtaaatatataacttacatttttcaagcttactttggcaaaacaatctgttttccttcttttgcctgcgattttgaatacctgtaaagcacgaatttacgcccgatagcctgtacaaattctgcgccgagcttttctgcggcaatgttggcagtttctttcggatcaagatccgcgccttcctggagttttacttttataagttcgcgcgtttcaagacatatatccatttcctttattatattctctgtgagcccgctctttcctatcataacgatcgggtcgagattatgtgcaagacttttaagaaaacttcgctgtttacttgtaatcatataaatttctcctgtcaatttaaattataaaaaaaattatatcatatcagggagtaaaagccaaaccgtgcctaaaatttttttaaacaataaaatatccgttcaaaacgatatttttcgactgattttgaaattttttaaaaattcagatatagtaaaattgaaaaagtatgctgagttatagctaaaacggtttgtgaaaggagttagactatggcagaaaataaaaaatacccgcttgagggagtaaaggttgttgatttgtcgacaatagttgcagcccctacggcagcggagcttctatgtactttcggcgcagatgtaatcaaggtcgagagtttgggcggagacggccagcggtttcttgaaccgcattttcaggccccatcgagagacgactgcaaccctctttacacggtgcagaatgcaaataaaaagcatatttcgcttaacctaaaaactcctgaaggtaaagaaacgatgctaaagcttcttgaggatgccgatatcttcgttaccaatgtgagacatcaaggtcttgcgcgcctcggccttgattatgatacactgtcgaaaaaaatgccaagacttatctatgcgcacttttctggctacggaccacttggcccgaataaagatgatccggggtacgattcaacggtattctggctcagaggcggtatgagcgccgactggtcggttgcgggagtgccgtatccgtttaatcctacatatgcgttcggagatacagttacagcatcgtcgttttttagcgctattttgctcgcaattatcggcagagaaaaatatggcgaaggcacaaaagtagaaacttcgctttactcaagcgccatttggtgcaacggacagggtgttgttatgactcagtttgaaaagaaaagccttaatcctgacccgaatgaaattaaaaatcctcttatcggttactatctctgtgccgatgaaagatgggtaaatatcaatcaggtaacgacctatgaaaatgatcttcagagaatagcaaaggtgctcggtattgaagaggaaatatgcagtgatccgagatttaaaacgtccgagacgcttcttcaaaactacgcctacagagatctcaggcgcaaaatggaagacgccttcgcaaaaaaaccttcggcagaatggaaaaaacttttccaggcaataagtatgccgtttgatgtcgctgtgcctacgcgcgaagtgtcacaggacgaacaggcaatagtcaacaattatgtagaagaaatcacctaccaggacggtactaaagtcatgatgccggtgccgccgatgtttctttccaattacgacaaaagaaagctgcagccaacgggaaaaatgggtgaaaatacggacgaaatccttgccgggttaggttacagcaatgaaacaattgaaaaaatgaaggaaaacaatatagtaaagtaataaaaagcgcattagtaacatatggataaaataaaaatgatgagtttgtttttcgggaggcgtacggattatgagaaatgacagcaatatattcgatgtaggttatgtaaccaaagaacttgaaaaaaatccttttaccaatgtgagtaaaatcgtgtccgacgcagtggaagatgcaattctgacaatgagacttaaaccgggagaaaaactcataatatcaaatatagcatcgcagcttggcatatctacaacgcccgtaagagaagctatagaccgtcttgcggaaaaagggctcataaaaatagagctcaacgataccggcaaacaaagcatatacagagtgtttaagattacgatgccggaggtagaagatttgtttttcgtgagaaaagctatagagccggcatcagcatattactgcgccgaacatccttggctcatagacctcgaaaaacttgaggatcttgcacgaaaattttacagtggatatgtattgtacgacaaaacccgtgataaaagcctgcttattaaaacaacaaaattggacagagagtttcacaaacttatagtaaacgcgaccaacagcaaagttcttattgaagcatataaatcaatagagaaaaaactgacttatcttacagctgtgacgggaaacgaagtatcggatcattctgtaaaaaatcttgtaaaaatcggacatcagcatgttgcaataagcaacgccataaaaaacggatttacaggagaggcaaagcttcttatgaacgagcatctcaatttctgtatgaatataaacagaaaaagtttcgactgaccgcccatatcagtctttacttaataaaaaacagaaaactcaaatacagtggaattctgtattaaaattgactgacaatttattattatgttattattaaaccgaggcttcggatgaataccgatgacctcggtttataattattcagaaatgggggatgaaatcatatgtccgaaattgaaaaaaggagaggctttcattacggatttttaatagttgcctgttgctgcgtgttctccgcaacgagtgtatctcttgcattcggctgtgccggtgtcttttatactcctgtaagcgaagcgataggtgtcagccgcggggtatttgtaatttcctttacctgcatgtcgcttacggcgggaataggagtaaaaattatgactccgttcgtggaaaaatacagtcttaagctggctgtaataatactgctgcttttacagtcggtctgttattttgcacagtcacagtttacgcaggtttggatgttttatatcactggcgcgcttctcggtattgtcgtatcgctcacgcagtctatagttgcgactgtggcgattaaccgctggtttaagacaagtacggcgtttttcattggcttcagctcatcaatggccggagtaagcggcgttattatcaatccgatagcgggaaaagtgatggaaacgtatggctggagagccggatatataatgtatggtgcgataattttgattttagcggtaccgtttgcagtcttcgtgtttaaagattttccagctgacaaagggcttgaaccgtacagcggccgaaataaaaataacgaaaataaaaaagatgaaaatattaaacaaagcgatatcagcatagagtacaaagacgctgtacgttcaaaggccttttttgcagcgatgggtgctataagctgctttgtatgtacctgctgttttgtgccttatgtggcatcatacgcttcttcgctggggatgtctttgacctttgcagcaacacttgcgggaatggctcagattggatcactcataggcaaaaataccatcggccttgccgcggacaaaaatccaatctttctggtgacactgggaccgcttgtgccgcttttagggcttttaatccttctcatctcaggaggccgctcagtaccgcttttagtaataggaataatacttgtgggatcgatatatgcggcatctacagtaggcagcccccttgtcgtcatagaagtgttcggaatgaaaaactttatgaaaatttacggctctatatgcgtatttacgtcgcttgccggtgcagcgatcagccctcttatgggaatggttgttgatctttgcgggggaagctttaccttgattcttgccatttgcgcggcaatgtgcatcttgtctattattctcggtctttacgcatttaaagaaggcaaaaaaatgaaagcaacggctgcaaaaatcgaatattcagaattatcggaaaaaattttttaaaagatataaaaagcaagacaaaaatgaatattcatacataatttgaaatgtttaaaaaaagtgggctatactttaaaaaaattaagtgtgaattcgtcacttaaaagaaaggagctacactatggaaaaaggcattaacaaacaggccgttgcggtcggtcttgctttcttcgccgctttgttcggcgcaggcaatctgatcttcccatcatatatgggacttgaatcaggaaaagttttaatcggatttgttatgtttatcattttggacgcagtattttcagcgctcggcctcgttgcagagtcaaagagaccggagcaaaaaatgtcgacacttgtaagatgcggaaggccaatgttcgtatttaccacgattatgggtcagtttataggtttcctttgcatagtaccgcgtacttgtgcaacttgttttgaaatcggtatcaagccgctcttcccggagattccgacgcttgcattttcggtagttttcttcgtcctcacatttctgcttgcggtaaaaccaggtaaggttgtcgatattgtaggaaaatacctcacaccggcacttataattttaatcctcataatcgttgtaaaaggacttattactcctctcggtcagatagccagcgaacctcagattgacaatctctttgcggaaggcgttatccaggggtaccaaactacagacgcaatgggagcaccgacgctcgctattgtttatatcgtaggctgccaggctgccggtttcaaaggtgaaaaagcattgtcaaagattctcgtcaaaggcggtatcatagcttgcatctgtatgacagttatctacggcggactctttatcctcggagctcagctttcgcaggaattcacaccggacgcaatcacctcgacagctctcgtatcggtaatcgttgagagactgatgggcagaattggccttgcaatatttgcacttgtagttattcttgcttgtctcacaacatcgataagttcgtcatcaggcggctcgcagtactggatgatgtacagcaaggataaggttaaatatgaattttatgttgcggcttactgcatcgtcggcatcattatgtcgattatgggcgtaaacaagatcctcgctattgcaggtccgttcctttcgctctgcttcccgccgttcctcgtgcttattgttttgacactctttacaaataaaatcaaaaacgacaatgtatttatcgcaggctcatacggagcgcttgcattcgctatcgttcaagactttactccgctcggagcgatgcttccatttagctcgctttcgcttggctgggttattccagcagcaatatgcgcagtaattggagcttttattccgtcaaaagtatgcagagatcctgtttgggctgaaaagctcggtgttgagcataccaagggtatagcgtaataagaaattgttgcggcgactgaattataaaaaggaggacaaaaaatggttcctaaagcggataggcttaaagatatcgaattttcaaagatcagacttctcaatcaaaaggtagaggagctccaggctgaaggcagagaaatgtgcacatttacaatcggccagccggattttccaactcctcaatatatcaaagatgcctgcacaaaagcgcttaacgacggatttacaggctacggctcatacacgggctcgcttaatttcaggcaggctgttgttgataaatataaaagagaaaacgggcttgaattcagcccagatcaggttatcgcttcaaatggggctgctcaggcagcttacctcgtgcttactacatttataaacccaggcgatgaaataattctgcccaaccctatgtacaatatttatgacaacatcggcaaaatctgcggcgcgaatatcaagcactattctctcaaagaggaaaacgaattccagattgatattgaagagctcagaagtcttgtgacggataagacaaagatgattgtcatctgttctccgaacaatcctatcggcggaattctaactaaagaaacactcgaaggtgttgcggacgttgtaaaagacaaaaatcttttaatctgttcggacgaaatatatgaaaggcttacctttgatggagaaacagcgccgtcgccggctctcattccatcgcttcgagataaaacaattatcattaacggcttttcaaaagcattttcgatgacaggttggcgtattggctatgttatagctcctctttgctatatggagccgctgacgcttcattcgggatttcaaatttcgggaatcgcgacgtacaatgccgaagcggcggctgccgcgctcaatgacgacgctaagtatcatacggttgacgctatgcgcgctgaatttgaaaaaagaagaaattattttgtttccgaaataaacaagacagcacatttctcgtgtcttaagccgaaaggtgctttctacatctttatga

SEQ ID NO: 1220 - DNA, 1712 bp, Unknown
  16S sequences of unknown bacteria
tcttgtcgatggtgccgccggtgtggcccagcccgcgcccgctcatcttggcgacggccgcaccgcaggcagagacgagcggagccagcacgagcgtcgtcttgtccccgacgccgccgctggaatgcttgtcacaagcaatgccctcgatgctgctgagatccatcgtctccccgctgtggatcatcgcgtcgcataaagacaaggtctccggcatcgtcatgccttgaaaccacacagccatcagaaaagcgctcatctgataatcggggatatcatgacgcacataagctgcgatcagctcatggatctgagcgtcagtgagcgcttcccctcgtttcttcttctcgatcagtttcagcatatccatgatgtgcaccgcctttcaatgcgtgaatttcttcttcttccagcggccgccactcgccgatggcaagatcgcccagctgcagcgggccgaatgcatatcgatgcagcgtgatgacttctctgttcagggcatgcatcatccgcttgacctggtggaactttccttcgcggatgcccagctgcagctcatttccttcatggcggccgatctgggccggcatggtgatgaaatcgccgagatcgatgccgctttgcagcttctgcagcgcagcgtcttccagcggcgcatccagcccgaccgcataccatttgcacacatgatgacgcggagagagcagctgatgcgccagctggccgtcattggtgatcagcagcagcccggtggtgtccagatcgagccgccctaccgtaaatgcgcccttgggcagatcgggaagcaggtcgaatacggtctcatgccgcccgtcatcgttggcgcagaccaccccttgcggcttgttgagcatcaggtagaagaaccgctggtaccagacctgttcgccgtttacgctgacctcatccctttccttgtcgatctgtgcgccatctttcaggatgatctccccatttacgcgcacggccgcgccgcggatcagcttcttgacttccttgcgggtgccaaggccctgattggccagaaagcggtcaagccgcatcatggttcctccgcttcagcagcttcttcagatcgacatggaagatcgactgcgggatctgcaggatataggtcacgatgagataagcggccagggcgcatacgccgctgagcgccatctgcagcaggctgaccagccggccctgatcacaggcgtcaaagccgaacatgttgaagaacaaggagatgccatacagcgcggcgacgccgatgagcatgaagaagaacttccgcagcgtatatttccatttcacctgataacgctttgacagctcccgcatcgccaggatcatgaaggcgccatagccgatcagatcagaatagatcgtgcccggatagccgaaccacatcagaaacggcagcgtgagcaccagcttgcacaagaagttgacgctgatgaacttcaatgcccgatagcgcaggccgacggccatgagcagcgaagagaagatcggcgcgatggtggagaggaacgcctcgatggaataccaacgcagcacctgcgcggagagatcgagcgattcggtcgtgaacagcgtataatacagcggcctggcataagcgaacaggcagaaggagatcggcaggccgatataaaggacgatctctacgcattcacggatgttcttgcggatgcggcggctgtcgt

SEQ ID NO: 1221 - DNA, 4899 bp, Unknown
  16S sequences of unknown bacteria
tgctccggactctcctgaaatacgattcggcccttttcctccatctcctcaaacagccgaaacagatagtccttcttacaggtaccggaatacagatacggcatacggaccgttgtcaccgaaatcccgtgcagggccgcatacttccgacacagctcctccgcctcacagacgagcagggtctttccggtcatcgtatcatacataccctccggtccggtcagataaagaatccggacctcccggtctcctttgcagtactgcagcactctgcgcagcttctctgcctctccttccgtactgccgtgaaacgtcagataattggaaaagtacacgacctcttcaaattcataagtcagaaacagatcaccaagctctgcctcctcttccggaaacggccggtgtacaattccctttttccggttcgtccgcacctgtgcatccccgaggatcagcgcctgacactccggaaatgcctcttccataaatctttccgtaatatatcccgtattgccaaccagtaatactctcataacgcccctgccttttgcgcaattttcgtccgaagtatagcacatctcacaaaatccgtcaaaaatttttttacgcgggttgtctctccacaaaagatcgactataatagctgaaaggtatcacgttcagatgaaacacgcgtgaggccggtcagacatgagaaagcagcggaaaacgggagggatgcacatgaccgatgaagagctctaccagcgttatcttgacaacgatacggccgcagccgatctgctcgtgcagacccacagcgacgcactgatgctctacatcaacggctatctgcatgacatccatgagtcggaggatctaatgatcgaagcattcgcacgactgtttgcgcgtccacgcccgatccgggaagccggctgctttcgtgcctatctttataaaatcggccggaacctcgccctgcgccatcaaagacggcgcaggcttcatctgattctttttgacgatcttccgtttgagctctcgggtggtgcgctcgccgagactccattttttgaaaatgaacggcgccatcagctctatgacgcactggctaagctgaagccggagtaccgggaggcactctatctcgtctactttgaagatatgagctaccacatggcagctcaggtcatgaataaaaatgagcggcagatcacgaatctgatctaccgcggaaagcagagcctgaaggcaatactggaaaaggagggatttcaatatgcggacaaatgaagaacggtcagcgctcatccatcggcggatacgcgagctgaaaaggcagcaggccaggaaaaaagaaaggctggttgatctctcctgtgtggcaggcagcctcatcctgattttgctgctggcgatgtggattccggattcgctggcacactcagaaggaactatggcacattctgcaatgacggccagtctgatcggaggctctgccttttccggttacattgtgatggggatcctttccttcctgctcggcgtctgcgtgacgattctgctgtaccgtctgcaccggcatttccgtgacaggaaggaggagcaggatgaattttgagatcatcgacaacgcttaccaggtcaccgttctgctcatatgcatgctgctctccgcgtggttgggtatacgccaaaagaaccgcggatttattatgctttcttttggctacggctgctttatgatgggaaccctgtttttcgtcctgtatctggcgatcctcggccgcgtgccgcagatcttttatacatgcgagatctcatggctggctgcctatctgttctttctctcgctgcttttgctgcgcaaagagtccgagccgctctccttctccgccatcgcactgattccggctgtcattgtcgccgtcgttgtccttttattcaaaatctttggtccggcacttcttccatgcattgcctgtgccattacgctcagcgcaatcacctatctggccagctgccgcattctgcacgaccgaaaaaatggcaaacggacatcctggctcgatcactgttttctccttttggtttttttgcagctcggcgtctacattgtctccatctttatgactgattatcagcattttaatctgtactttgccattgatatgctgctcactgccatgctggctgcgctgctgccgcttctataccgggaggttcgccatgatctacattgaaaatattttcgtctgtatcgcgattcccatgttgctgtccttgttttttaccgaacaccggcagcgtgtctttacgctctttgtcgtcgcaggtatggcgatctgcctgctcgcagcttacgtcagcagcttttttatgaattattatcagaccaacgccaccacgactatgatcgagatcacgccggtctgcgaagaggtgatgaaactgctcccgctgctcttttactttctgatctttgaaccggagaaaaagcaggtgacaagcgctgcccttgcgctctctgtcggctttgcgacctttgaaaatgcctgctatctgaccgaaaacggagcctctcagttttcctttctgctgatccgtggtatttctgccggggcagtgcacatcctctgcggcatcctgatcggctgcggcatggcctacgtcttttaccaccgctggctgcggctcaccggtaccatcggactggtcggcgcctgcatcatcctgcacgccagctacaacctgctcattacagcggacggcatctggaggcgcatcgggtatgtgttcccgtcgcttttgattctgcttttgttccttgcaaggcatctgctgataccgggaatccttccatctgaggctcggcaaacggcaagctccggaaaaagatagaataactgcaaaaatacaatacaaaaatagtagaaaatcagcagaaaatcaaaaaaagagtgagagctttcttttccacatgtatttatatctatataagcagaacctcacaattacatctgttcacggaggcaatatatgaaacattcctacgagcaaattcaaagagaagtccggcgcaggacccggaaataccgaagacgctatgagcaggtgacccttaccatccttagcatgctctgcctgatcctctcaggcagcatgcttccgctcctctcccgcgcgggtatggcatcctccacagttcccggaggctacagctccgtcctgctgcacagcggcgcgagcgcctatgtcgttgtcggcatagccgcctttgtcaccggatgcatcgtcaccgccctgtgcctgtatctgaaaaagcgcaggtcaaagcgggattaaccgtcccgctttggcctgcgctttttgttctgcctgtatagactcttccattttctttttctgcatttcaacagcatttgtcatactgtgtcgattaatacagatttacctttctcggagcgatccggcgaagatcgttcagaatggactcatccagctcgaccttgatcatctcctgtcccttttccttattgaatacaaggatatagcacttcgcatgcggatctaaggatgtgtaatccttcagcttcagatcctttttattcttaaaggaatccagctcgtgggaattctccggagccaggatctccagctcggatgcatcatagcttcccatctttttccgcttctgtttggagtagatagcatcgatatccagctctccgttgacgtataagtattcatactctacctcgagcttcgggacaaacagccagcaaacgacgaccagcaccgcaccgacgatcaggagcggccagaataccagcccgataaaaatgctgattgccgccagtgcaatcaacagccctttcagaagcttgttccccacaggggtatttcgtttgattagtatttctttgtatgaatcgttcatatcgttcctccctcattttacccattcatatcttttaagcccttcttcgttactgttcacacatcaatgaacaataccttcttcggctgatacgcttactgcatgagatactcaagaaacttcgcactcatatccgtatgagacgaattcgccatgaccacagcatataccttttcgccattgtaggctttggactgctccatgagcgaagccttctgcacatccagcgctaccggaatctccttgccggtctcttcatcctttccataggcaagggcatcctcccacctggaaagctgctcctctgataagaccttggagagatcttcaagcccatagccatcgcggtacttctcatactgttcggaatcgaagatcgccacatcgacatcgcctgccgccactaccgcagtaaacttcatctgacttgccatcgaatactgagaggtatcctctgcatccagtatcgttgatgtatcgagcaatatctcgtccttcgcgccgatcccgccgatgtactctgcaaaatcatctgtaatcgcctgtgcgtccagctccgttgagttacagttgacgaaatatacattcagaagatgattgatctgcatattccgataaatactgaccccgatcgaaatcaccagaatcactgcgagaatcgctgccatcaggggtttgtaataatcccatatgtagcccagtctctgtccccacgtcatgcctttcagcttttttaactcctcccgtatgatctcccggattgatcgttcgtccatactctgctccttcatacgttcgtttttgcaggtgatttatcagaaaattcctgcacttttttcagtttaacacaaatgagggtaaacgtctattgtttaccctcattttataaatattttaggaatgaatagacgtgctacagctcaagagcttcgctctttcgctgaggggctatcgccccacaagtctgccgatccagc

SEQ ID NO: 1222 - DNA, 5712 bp, Unknown
  16S sequences of unknown bacteria
ggatttccacgctcgtcacgcggcggccacgacgcccgcttcatgtcggcaagataatcgtcaaggggggtgagaatgtgctccccgtcatagcggaaaacgtcccacaaaccgttgttccaatggatgatgtcggggttgccgaactgctccacccagtgcccgaattcgcaaagggtgtattttgcaaagcggctgttttcctcgggatagaccacctcgcacagccccgacagcttcatataaaccacgggacagtagttcatgcggatggaatcgcccacaagcattacccttttcaacggtcattctcctcttttctcgatttcggccatgatgttttccaccgaaaaatcggcgaaggggtcgtgctcggcagccttttcctcctgcggctgctcgggcgccttttgcgccgtcttcgaaggctcggcggggacttgcgtttcgcttgaaacggggtttgatttttgagtttcgaaagctttacccgaggtcacgtccttaacgggaattccgtaaatctgggtctcctcggcggggagaattttccgattttccgaaaccatggggacatattccggctcggcgtcggcctcctcctcgtcaaaatcggggccgatgctgtccttgccagacatggcaaaaagaagaaccataacgaatatcccgaaaaagaggttgcagtatcccatggaggacgaatgactgagcagctcggtgcgtccggtcagcccgaggaaaattctcggaaccgacgaaaccaccgagaaaaaggcggcgcaaaggccgaaggcaaagagctttcccgtgctctttttaacgcccacgcggtagtaaacatgggcaaggtaaagcagcgtcatcataaccgaacacaaagcgaaaatgtcgagcacgttttcggaaatgagcgccttgccgttgaactcgagggtatagcgcacaaacaggcggaaaatcgaccacaccgaaataaaggcgtaaacagcggccgaggggccgtttcccctgacgaagcctattccctgaataacaaagcaaaccgccgcagccgcgccgaacagggcgagaagataaataatcgtcgtgttctcggccttgccgtagagggtgatataatccagcacgtcgctcttgattttaatggcaatgtcggcaaaaagacctatacctgtcagcaccgagaaaatcccaagcaaaaggccgtttttgggcgggaggtaaagggtctttctgtcctttgcgaggaaagaaaacacaaaggcgagcagggcggcgacggcgacaaaggccatgcttatatacatgacgtcccccgccgacagccaaacctccttacccgttgccgagtccttggaaagcagcagcgtcaaaaagctgtcgcccgaggaggccgagtagaaaaatccgttttgggggtcgatacatttgagcatttcgacaatgcggagcacggccgcaacgggaataagggcggcgaaaatcgagacaagggttcttcttttcataaaaaaggctccttttatctatcgtttatgggaatatacttttctttttcataaactgcgcggtaggcgggacggatgatttttccgcccgagatgaattcctccactctgtgagccgaccaaccggcaatacgggcgacggcaaaaagcggggtgaacaaatcgtcggaaacgccgagggtgcggtagacaaggccggaataaaggtcgacgttggcgcacatgggcttgtcgacgcccttttccttaaggaaaatgccgggggtgagccgctcgacggcgcggagcaggtcgaaatcctcgccgaagcccttttcgtgggcaagcttgtcggcgttgtcgcggagaatggtggcgcgggggtcggaaatggtgtagattgcgtgacccatgccgtagataagcccgctcctgtcccccgcctccttgcggataagcttggtcaaaaaggcggctatctcctcgtcgtccttataatccttgacgttttcctttatgtggctcagcatctccatggtcttgatgttggcgccgccgtggcggggacccttaagcgaaccgattgcggcggcaatggccgaataggtgtcggttcccgagcttgacagcactcggcaggcaaaggaggagttgtttccgccgccgtgctcggcgtggagaatgaggcaggtgtcgagcaggcgtgcctcctctgcggtgaattttctgtcggcacgcatggaggacagaataaattcggaggtggagtgagacttgtcgatggggtggaaatacatgctcttgtggtcatactgacgtctcttgacctgataagcatagaccataatggtggggattcgggcgatgagctcgatggactggcgtattatgtttgttatggaggtgttgtcggggttcatgtcataggaataaagagccagcaccgagcgggcaagcttgttcatgacgttgggagagggcgcctttattatcatgtcctcggcaaaatattcgggcagctctctgcattcgccgaggatttctctgaatccgtcaagcttttcccttgtgggcagctcgccgaaaagcagcagccaggcaacctcctcaaagccaaaatggcctgcggcggtgcagccctcgataatctcggcaacgtcgattccgcgataggtaagcttgcccttgtcgggaatacgcgccccgtcggaaaaataatatccgtggacgttgcatatgcgggtcagacccgccacaacgcccgagccgtcggcattgcgaagccctcttttgacgtcataggtcttataatcgtcggggcttatatagttatttttcttatactcttcacataaatttgaaagtgagcgcattgagatttttgattcatactgaggcatagatgtcctccctttcaattgtgtttgtttttgaatatttattttactacaaaaggactttcaagtcaataaggagagtacatgaaaaaggcatatttaatattttttgcggtatttttcgcccttatcggccttattccctccataaacctaaagggcaagggacaaaagggcggcggcttatcgggactttcgggagaggcttccttttcggttctctgccccgacggaaatgtaaaaatattattggcaaaggaatatttattcggtgtgctttgcgccgaaatgtcccccgaaagcccggatgaggccttaaaggcacaggccgtcgccgccttttcctttgcgaaatataaggcttccgagcgcaggaaaaacccgcccgccgacctttgcggcgccgatttatacgccgattcctccaaagatcagggctatattccaaaggaggaagccgtaaaaaaatggggtcaaaaggccgatgaatatacaaaaaagctaaaccgcgttttggagcaaacggttggggtatacctttcctttgagggcgaatgcgccctgacgctctatcacggcatttcggcggggcgaaccgactcggccgaaacggttttcggcacggctctgccctatcttgtgccggtgcaaagcgcctccgacctgctcgagcccgactactgcaccgaaagcaccgtctcttttgaggaatttttcaaccgtttaaacggcctttgcggcggtacccttgaattttcggaggatttctacggcggcaaggactgctccgacagcggaacggtcaaaaccatgaaccttttttcccgtgacttttcgggcaaggagataagagaggcctttaagcttcggtcggcaaatttcgacatcgaggttgacgacggcaaaaccgaggtgagatttgtggttcggggctacggccaccttgtgggcatgagccaggcgggggcggtgtccatggcaaaaaacggcgacgatttcaaggaaattttgcttcactattaccccggctgtcaaattgtcggttgacaaaatcgacgttttgcattttaataaacatagaaaatatcgggaagtgaaaaaatggacgaaaaggaagcggcgctgcttaaaaagcggctttgcgagctggataatcggtcgcggcagggcggctttgccctctattccgactttctcgacctctacggccaggatattttttggtcgatgaaattacgggacgcgcatcttttgggcggatatgacggggccgagcgcaaggtggcctgcttttgcggggacagccctcccctttgctttgtgaaaatcgctcccaaaaacaaaaaatttgcggccgccatgtctcatcgggacattctcggctcccttatggggctgggacttcggcgggaaacgctcggggacattatcgtcggcgaaaaggacgggacggtcgtttgccttaaaaaggtggcggattttatcgtcgaaaacctcacaagcgtcggcaggacgtcggtggtctgttccctttttgacggagaagattttacgtcggaaagagagccggagcagaaaacggttttcacctcctcccttcgcgccgacgccgttatcgccgccgtttacaggctgtcgaggagcgaggcggcggggcttattgcggcgcaaaaggtttttgtttcggggcgcatggtgacctccccttcaaaggaaatacccataaacgagccgatttcggttcggggcttcgggcggttcaagcttgtcgacgttcgaaagaccaaaaaggacaggctgcgctgcacggcggaaatttaaaaatttgcataaaaaacaggagcggacacgggaaaccccgaaatccgctcctgtttttatttttgtcagccgccgaagtccacggcgcccagcttcatcaaaatcgaaaggagagcatattcgtcaaaggaggaggtccactcctcataatctgtggtatctcccttttcgggaatttcaaagggagctccctggtcgttttcgataccctttgccgtgaataaatccatgcccgccaccgaagccgacatctcgattccgttgccctgagcggtgagtttgaaagaaatggtcttaataaggcttaaggacgcacggtcgaccgaactgccgaaaaccgaggcaatgtcggcccccgcagaaaatgtcaggctgccgttaaaatctccgtcatttaccgtaacatcctcgagggcaattgccatgacttccttgttctgtatattcacagagaagttgccgctcgaacggccgccgtttaccgtgccgtttccgagcagcgcaaaaatttgctcgccgtccgaatagccggcaaattcatagccccaatttgctccgtcgttcgccgccatatatctgaccgagtcgccgtcggcgatgaactcggctccgcaggcgtttttgccgtcggcggtgtagagcttaaaggtgaatgcctcgtcgtttgacgggtcggaatcctcaagctcggcaattgccttgtcgacggccgcggcatagtcgtcgtcgcttgacacgatgtcaaaaagccttgctattctttcggccttgtcgtcgtttttggccttttcgaggatttttaccgcgatgtcggttatttccttttcggaaacaacagcggtcagaacggtgcaatcccttgtcacgccgcccaccgaaaccgactcattatccttttcaacgtcgctcattccgtcgacaaaaatgccgtaataatcggtcaaaagcttttccaccgcgtcggggtcggtgaaaaccgccaaaagctcctgttcggaaatttc

SEQ ID NO: 1223 - DNA, 3740 bp, Unknown
  16S sequences of unknown bacteria
gcgtgatgttctcgctgagctggcagatgacgcccatcgacgccgtgtggtggagcgttacgccctcgagcgtgacgttcttcgagtcggtgacgaatattcccgggaactcgcgggacgaatatgtcatcacgagataattgcccggcgtgtgctcgaagccgaggtttccgtacatatttatcgtgtttttgtcggtctcctcgagcgatacgcggcggaacatcggcgagaggaagccgtgatcggtcttcccgagcgaatccggaaaatacggcggcttgtgcggggagggaatgaagccgtcgcgcagggtggtgtcgaactcgagcgagagcggcgactccgcgtcggagtgtccggtctcaccggtcaccgggtcgtgcgtgacaaacctgaaccgcccgtccggcgcgaccgtgcagccgaactcctcgccgtcgaagcggagaacggtcgtgtacctgtccgagcttataatttccgcctgcgagaagaacggcgccgcatagtctatcgtgaggtttttcacggtgacgtcggacgagccgtcgacgactatcggcaggatcccgccgtggaagatgagctccgcgccgccgccgtctatcatgatgtcgtgttttccgatgagggggattgctataggcttgtcgcccgcgtcgttgttcgagatatagtagtgctttgtcagcgccttgccggggaagagatggtaggttccgccgccaagctcgagcgtgccgccgtccgggagggaatcgagcgccgcgagaagcgccgggacgatgtcagtttcgccgccacgaaggtgatctatgagttttatagtcattctgatgtctgcctttcttaaaataaacatatatttatgaaaatattatatcagatgaaagacggattgtcaaggggcggcaaacttttttcgcttttccgcggaaaatttcaaaaagcccttgacaccgggagcggattgtggtataatatacttgtttggaggcgtagctcagctggtcagagcgttcggttcacatccgagaggtcgtgggttcgagcccctccgtctccaccagatacctgaaaggcaccgttttcgcggtgctttttctgtttcccgcacgatctttacacgatcccggcgcggaattgttttcgttcacaaaatccggttgattttttctctcaagtgctgtataattgaattattcaatattggattttccggggtgtaaacaaaaatggaaggtatgcgtgtgaacgcggcggagatgtacgcggcgagcaagagtctgtccgaggcttacgcggcggtgatggcgccgctggcgcgggagaccgggctcgcggggacggctgtcgatatattgctttttctggcgaacaatccggggaaggacacggcgaaggacatctgcaccatgcgcgggctcaagccgggaatcgtgtcgttccacgtcgagaacctcgcgcgcgagggctacctcgcgcggcgggctgtgccgggcgaccggagaaagagcgggctaacgctgactgaaaaggcggacgcggtagtcgtgcgcgggcgcgcgatgcagaaggagttcgcggcggctctgaccgaagggatagaccagagggcgctcgcggtttgtttctcgtgtcttgagagaatgcgcgagaacgccgcgagaatggcggacggaaaataaaaacgtgaccggaaattttccggtcacgctcttttttactcgatcacttcgcagactgttgacatcttctcgtcgagcatcggcttgatcttcgcgacttccgtagcccacgaaccgccatccagcatgcaagccctgattaccgccgacggatagtcaagcagatcgttgaatatctcgcccggatcatagactatgttgtccttggccatatcgaacatccggctgacattgtcgtccggcgaatatctgactttcagtgatacctcacaatactcgggtacgagcgaacggtaggtctcgctcgaaatcgcctcgagcagcgctcccgacttcgcgaggtccggggcggtcaccggaatcagcgcgtggcagactctctggaggacggaattatagctgtcctgcgtttcgtcgaatttcggatacggcagaagtccccagttaaacgtaagctccggaaccatcacggcagcgtccgcgataagtccgcaggacagcagcgcccgtccctcgacaaaaggctttgaggcgtaatttccgcctccggtcgagatctggtaatccggaaaattgtcgttattggcctgtcccggaagcacatattcttccgggttcagcttctggatgaaatcgaccgtgtttaccgcgcgctcgctgccaaactcgaacttgtagcgcccgtcgctctcttttttgtagatgtcaactccgaacgccttgatgaatcccacgtacttgttgagatctccgaaggtcagaccgaaacggtcagccggatcgacttcggagtttccgttcaggtcggcgtaggcgtccttgatgactgactgcatcgcgtcagccgtccatttgccctcgtcgacgagcgcgtagaggtcggtgtctatcccgagcgattccttgaggtcgttgttgtaatacacgacaaaagcgttctttatgttggcgagcgagaattcaccgatcacgaacggcagctcgccgtccggcatattctcgagcgccgactgattgtaccacggcttttcgaagtcaatgtgctcgacgtttctgaggtcggcgaaatactgaccctcactgagccgcgacgtgaagttgttctgagacagaagcaggtcgatgtcgccgtctcccgcgagtatctgagaggttatcttggtcagataattgcctctcgagccccagtcgtattcctcgcggacgtaattaagcctgacgttcagacgctgttcgacggcgaggcgcacattgtatatggcgtcgctgagcctgcttccggtcgcctcctcggcgtagaggtcgtcccagtacgctccgaaatagtcgccgacgacgacgttcatcgtcttgccgccgaagtcgaggtcggggagttcgtcggcgacaaagcgcaagtctgtctcttctgtcgcggttgccccgtccgcggcggtggtggttccggtctggctggtcgtctccgatccgcaggacgagagtaccgaaccgagaactaagatgaccgctaaaatgagtgattgttttttcatgatcgttctccttcatgttttttggtaaaattattataacatattgacaaaggtttgtaaagatggtatactatgagtgaagataattattctgcaaaagaggagaacgacatgagtcatggtgaaaatgaaatatctgagataaactatattccggtcacattcaggtatccgggcgggtatctgtcaatcgcgaaatacagataccgcctgaatcactactacgaggcgaaccgcagcacggcaaaatcgagcgtaggctgcatcatcaccggaaaagtcgagctgaaaagccggctcgtgaacatcagcctcggcgccggcgacgtgttctatatcccgtcaaatgaaaagtattcttcaagctggaccggcacgccggacatagagttctacggtatgcactcgctcccgccgctcgacgccatgtcggagacaggcaggttcaggctcgggaagctgacgcttccggagggtctcgacgcgcagggcgttttcacggagatctaccggctcc

SEQ ID NO: 1224 - DNA, 7870 bp, Unknown
  16S sequences of unknown bacteria
actattatacgccttacggagaaattgatttgattgttcgtgatgggaattgcattgcttttgtagaagtaaagactcgccgggcaggatccataacccggcctgcagaagcggtggatcggcgtaagcaaaagagaattgcccgatcagctgtgtgctacctgatggcgcatcccgccgatttacagccgagatttgatgtgttcgagattgtgacggaaaaaggaaaaacgttttccgttcaatcttatcaatacataataaacgcatatgaggtgacaaattatgaaagcatttgacatgcattgcgataccctgttgggcggtaatcgcaaccattgggatctggtcaacgatcagatgcacatttctctggataaactgggcgcttttgaacattatgtccagtgctttgctatttttatcccggatcagtttcgtggacaggatgcgattgatttttacgatcggactttcgcgtattacaaagctcagaccgagaaatatgcggaccggatggaatgggcgcacaatggaaaggaactggctcaagcgaaaaaaccgattaccggcattctaaccatcgagggaggctgcgcgctggcaggagatatcagccgagtgaagctgttgaaagagcagggtgttgccatgatgacgttaacctggaacggacccaatgagttgggctgcggcaccagcaagaatgaagggttgacagattttggcaaagctgcgatcaaagagatggagaaagtcggcatgctggtagatttgtcccacatttcagacgctggttttgaggatgcttgctcagtagcaacgaaaccgttgattgccagccactcgaattcccgtgcagtttgcggtcatatccgtaatgtaaccgacgagcagtttaaagaatatgtcaaacgcggtggtttggtgggattgaattattccaaagatttcatttgtgacgatccggaaaaagcagatttcgattggctgtaccggcatattgagcatttcctgagtttgggtggggaaaaagtcgtagcactgggctctgattttgacggtacgcatgtgccggaatgcttaagctcggtggaaaaaaatgctgatttttacgagtatctgctgaaaaagaatttgaatgaggatttggttcgggatattttctttgaaaacgcaaaccgtgtattccaggagtatgtcctgtaaaccgtttagtgaaacgccaaaggagtgaaaagggtgcagtatcaaagcacaagagataaaacgcagaaagtttcggccagccgagctattttacagggcctttctgccgaaggtggactgtttgtcccggaacaactgcccaaattttctgagcagcatctggaaaaaatggtcagccaagactatattcggcgcgcacagaaaattttggaagaatttttgtcagatttttccaatgaagaaattgaaagttgtttgaaaggcgcttatgatgcgaaaaaattctcgggctctcagatcgcaccgctgtccaaactgggagagaacgcatatctgctggaattatggcacggaccgacctgcgcttttaaggacatggctttgcagttactgccccgtcttatgaccgtctccatgcagaaatctggagacggaaaggaaattgtaattttggtagctacgtccggtgatacgggtaaggcagcgttggagggtttctgtaatgtacctggtatccgaattgtggtattttatcccgaagaaggggtaagccctttgcaaaagctgcagatggctacacaagaaggagaaaatgtttttgtcgcggcgattcaggggaattttgacgatgcccaaagcggcgtaaaaaaactattttgtgatccacagatagcaacggcgcttcaaaaacaaaaccgtgtgttttccagcgccaattccattaactggggacggttgctgccacagattgtttactatgtcagcgcttactgtgacttagtgcgggatgagcagattgcactgggagatcctatcaatgtttgtgtgcccactgggaattttggaaatattctggcggcttactatgccaaacaaatgggacttcccattcacaaattgatttgtgcatccaataaaaataacgtgctgacggatttcatcagcaccggtacgtatgatcggaaccggccgttttatcctacgacctctccttctatggatattctgatctccagcaatttggagcggcttttattccatctggcggacgaggatgactccattgtgcgccagctgatggaagatttaaaaaacgaaggacggtataccgttccccagcaggttttatcccgcttgcaggcagatttcgctggcggctttagcgatgaagaggagaccgccgctaccattaaacggctgtttgatacctattcctatttatgcgatacgcatactgcggtggcggtttctgtctatgaagactactgtgcccggacaggagacgataccaagacagtgattgcttctacggcaaaccctttcaaattcccgcatgcagtgctgacagcgctgggcggaaaaacacaaggggcagacgagtttgaaattgctcaaaaactggaagaaatttctggctgcgagatgccaaatcaactggcgggactgcgggaaaagacagttcgttttacggagactttttccaaaaatcgaatggatgacgcgctgacaaaggcattgcaaaacgtttgaacccaaaaatgcggcggaaaagactaagagccctttccgccgttttcttatccaatatgggaaaggagaagtgccgatgagcctttttgcgatcggagatccacatctgtcctttgggtgccagaaaccgatggacatttttaaaggctgggaaaatcatgcggtgcggctggaaaaaaactggaaggatacagtagaaaaagaggatacagttgtgttgccaggagatatttcctgggcgatgaatttcgaagaactgctgccggactttcagttcctgcacagcctgccgggaaaaaaagtgattttaaaaggaaatcatgactattggtgggcaaccaggaataaaatggatcagtttttactgcgaaacggattagacagtatagaagtgctccataatagttgtatctgcgcggaaggatttcgtctgtgtggtacccgtggctggctatttgaaaatgggcagccccacgacgagaaggttctggcccgggaagcaggccgcctgagaatttccttagaggctgcaaaggaaaaagaaggagaactgctggtttttctgcactatccgcccatttttggtcaggaagtgaatcttccgattttggaaacattattggaatttgatgttcgtcgggtgtattatgggcacattcatgcaagcggatgctcttatgcgctcaatggtgtttatcaaggaattgattttcggctcatttccagtgattttttatattttaatccgataaaaattgaaaaaagcacggaaaaatcacagcttttttagaggaaacgacgaaacggaaaaaattatcaaattcgtaacaattcattcttggcaaacccctttttgacatgctataataacatagttaatttgcattcggcaccaggggttgtgtgaccctgcggctggacagtacaggaggaagtttacatgagccttgtttcggctaacaaagtggaaaccaatacgtatgagctggtggtttccatcggcgcggaagatttcaaaaaaggaatcgacaagatttataagaaaaccgcaaaaaatatcaccgttcccggttttcgaaaagggaaagcgcccaaaagcgtaattgaaaagctgtatggcgaagccgttttttatgaggatactgtcaacgacatgtaccctgatgcttataccaaagcagtagaggaagcgggaattgatcctgtggaccgcccggaaatcgaaatcaccgatgtttctgcagaaggtttttcttttaccgcaaaagtgacggtaaaaccggaagtaacagtcaaaaaatacaaaggtttgaaagctaccaaaacacctgtcagcgtgagtgatgatcaggtggatgaagaaattgccaagctgcaggaaagaaacggcagaatggtgactgtagaaggccgtgcagcaaaagatggagataacacaatcattgactttgaaggttttgtagacgatgttcctttcgaagggggaaaaggtgaaaagtttgacctgaagttgggttccggtcagtttattcccggctttgaggagcagatcgtgggcaaaaatgtgggcgaggaatttgacgtgaatgtcacttttccggaagattatcaggcggaagaattggcgggcaaggctgctgtgttcaaatgcaaattgcatgaaatcaaggaaaaagaactgccggagctggatgacgagtttgcaaaagacgtcagcgagtttgatactctggatgaattgaaaaaggatatccgtgcaaaactgacggaagcggcagagaaaagcgctgagaccgcggtagaagagcagctggtagagcaggttgtagagagcatggaagcagagatcccccagtgcatggtagatcgcaagactgatgaaatgctgcaggaatttgattaccgtttgcagtctcagggtttgaatctggatttgtatatgaagtataccggatttagcgcagatacttttaaggaaacttataaggagcaggctctcaatcaggtaaaaattcgtttggctctggaagagatcgttaagctggaaaagattgaagttaccgaagaagagctgaatgcagagttcgaaaagatggcttctgcttattccatggatttagagaaaatcaaagaactggtacctgctgaggatattaaattggatctggcagtgaataaagcgatcgatttgattaagtccagcgcggaagtttctgaaagtgcgccggagaagaaaaaggctcctgcgaaaaagaaagcagcggcaaaagaagaaaaagcagacgaagatggagaaaagaaagcgcctgccaaaaagaaaacaacaaagaaaaaagcggaagagaccaaagatgctgaataagcagtcagcttttctaggtgcctgtgttttttcctcttacatattttgaatgggggtaataaaccatgagtctggtaccaatggtagtggaacaaacaaatcgcggcgagcgttcctatgacattttttccagattgctcaacgacagaattataatgctttgtgaggaagtaaacgatgccagcgcgagtttggtagtcgcacagcttttgtacttggaaggacaggacccggacaaggacattagcttgtatattaatagccccggtggctctgtaactgctggtttggcgatttatgacacaatgcagtatatcaaatgtgatgtttccacgatctgtattggtatggcggcttctatgggtgcgtttttgctttcctccggcgccaaaggcaagcgtttggcactgcccaacagtgaaattatgatccaccagccaatgggtggaatgcaggggcaggttaccgacataaaaattcatgcagaacggtacttgcgtattaaagaaaacctgaacaaaatgttggcggacaatacaggaaaaccgctggagatcatccaacgggatacggaacgcgacaactttatgtctgcccaggaggccatggagtatggcctgattgacaaggttattacgaaccgataatattttgaattcgtgtggggacattcggctccacacgaatttttacctggtaaaaagcaggtgtttgaaaagaggaggaaccttatggcaaaaaacgatgatggctccagaatgctgcgatgttccttttgcggcaaaacgcaggacaaggtggataagctgatcgccggtactggggtgtgcatctgcaatgagtgcgtacagttgtgcaacagcgtattggaggaagagggattgtccagccgccgcaggtcgtcaagagaagaagcggcggatattaccattccaaaaccagctcagatcaaagaggtgctggatcagtatgtcatcggacaggacgcggccaagaaatctctgtcagtggcagtgtataatcattacaaacgaatttttttcggtagtgatggcgatgtagagctgaataaaagcaatgttttgttggttggccctactggaaccggcaaaacgatgttggcacaaacgcttgcgaaaacgctgaaggttccttttgcggtaacagacgctaccactttgacagaagctggatatgtaggcgaggatgtagaaaatatcctgctgagattgattcaggctgcggattatgatattgaaaaggccgaacgcgggattatttatattgatgaaatcgacaaaattgcaagaaaaagcgaaaatccttccatcacccgtgatgtcagcggggaaggggtgcaacaggcgctgttgaagattttggaaggtactgtgtccaatgtaccacctacgggaggaagaaaacatccccagcaggagtttatccagattgatacttccaatatcctgtttatttgcggaggagcttttgacggaatcgataaaatcattgaaaaaagagtcaatcaaaaatccggactgggttttggttcagagctcaaagatgccaaagcgaaaaattctgatttgttgcttagccagattttgccggaagacttggttaagtttggtttgattccggaattagtgggccgtattccggtggtcactggcctgaaggctttggacgaggaagcgttgatacggattttggtggaaccaaaaaatgccattgtcaagcagtaccagaagttatttgagatggatcacattcagttgacctttgatgcggaagcacttaaagccattgctcatttggcgattgagcggaaaaatggcgccagaggattgcgctccatcatggagtccattttatctgaggccatgtttgccgccccgtccgatggcacaattgaaaccttaacgattacggcagattgcgtaaaaggaaaggaaggcccgcgggtcacttatgacttggatcggcctaccacttctttgacattgcctgctacaaagaaacctcgtcccaggcgagattccgtttcctagccaaaagaaagaaattaactccacctttcttttccaaaaagaaaggtggacttgcttttttacagagattttagtataatgcagcaaagcagagcacctgctttgctgacaaaaatgagaattggatagaaatagattaaaaatcggacgcgcgccaggaaaagatttgggcagatccgatatccccaagtaagaaggtgaaaaaatgtctgaatggaaacaatatcaaatgccggcggtagcattgcggggattggttttatttccgaaaatgatcctgcattttgatgtgggcagagaaaaatccattttagcactcaatgctgctatgaaagatggaaaacgagtatttttgacagcgcaaaaagatgtaagagaagatgatccaaaagaaaatggactttatcagaccggcgtagtggctgaaatccggcaaattttgcgttctggtgaagaaggcctgaaagtattggtagaagggaaataccgtgctaggatctcgcaggtcatccaaaaagaaccatactgggcagtcgtcgctgaagaagctcctctgaagtccccaaccatccgcagcaaaacaatggaagaagcacttatccgcattgtaaaggattcgtttgaagagttttgctatcaaatgccgaaaatgcctaaggagattattgtcaatgtattgggcagtaatgacccgctgtatctttcagagtacataccc

SEQ ID NO: 1225 - DNA, 32759 bp, Unknown
  16S sequences of unknown bacteria
aattagcccaaacttatacgcctgtggacattgtgtaagacattgagttgcgtaacaccgcagccaacgcagtagtggttgaagcaggaagctccgacttctataagtcggagtagttcacaggcttttttcaaggtattatttgcaccttggctttggttttgcagggattaatacttatggagagtggcgaaataacccggactttgcatgagaaaatattgcgacctgcgataaaagacgatatagtggttattgagaaaaaagagcgaggaagaatataaatggagataatttctaaaaaaatcagcagagatgagctaaacaaaatggatagcggatattttgaggataagattaaggcggctgcggacatcgaaaagcagataataggggttgatgtcgagctgcacgcagatatcgagggagctttgattgaggagggttctgaattgcgtaatttgtgggggataaattttcttgcagacgaggacgaaattgaggaatttgtgaagtttgactcacttatcaatattcatccgaagcagaataaccgttcacgagatgtagaagatgaaaacatcagaaataaaattttagaggctgttgaaaaatggatagaaattcaggagaatatcagcacagggagcttgcggcaggaagatggcagacgatgacactggcacagcagcttgcaaacataggaagtgagtttggcagggctgcaaagagaaaagataagggtgacagggaaaaagaaatgaaagcctttgagcgtggacttgaacttttagacctgttcatacagggagcgcagttcaagagaacagaacatcgtggcatatttaaagaactccttagattgagggaagttatgtgcgattattttgtgggtgaaaacgagtataaaacagacagagcgtttatcgaaaagtatttttacgactttgcatattgtgcgaggaaataaacagagtaataagaaaggtttgataacagataaaaaatacgccggtgtgagccggcgtattgctgtatagacagctagattattcttactctgattacactgtcatttgcaatttcaagtgagtcaactgcggcaggggtttcaaccagcgtatatgcaaagttgccctttgtcttgctgatgatgtttgaaattacggcgtttttggcattgagcgctgccgttacatctgaaataatagtgtcgtttgcctttgaaagcacagctattcttgtgcctgtttttgctcccaggcttacagcagggaaattaacggaatttacgatattgccgttttcgatgtagtccatagtctgaagcgcagccattgtagcgcagttgtcctccgcctctgccgaggaagcgccaagatgaggaatagctataacattgttgtagtgaagcagctcatctgttgcaaagtcggttacatactttctgattttgcctgagtctattgcagccataaggtcagcgtcgtttaccagcttgtctcttgagaaattaaggaagatagcgccgtctttcatccggtcaaacacttccttgttcatcatacccttggttgagtctgtagcaggaacgtgaattgttatgtagtcgcatttgcccagcatatctttcatatcgtttacgatttctgctgtatttgaaattctgtgagccgcatttacagtcaggaacggatcatatccgataacgttcattcccagagcttctgcggcgtttgcaatcttgatgcctattgcgccgaggccgataactcccagagttttgcctgcgatttctgttcccgcaaactggcccttgcctttctcgtatgccttaagcacatcgctgtcaaggcttttggcccatattacagcctcagggatatttcttgcagccataaacatacctgcaagtaccagctccttaacggcattggcattggctcccggagtgttgaatacgacaattccctcctctgcgcatctgtcgagaggaatgttgtttactcctgcgccggctcttgcgattgaaagcagattgtccgaaaaatccatatcgtgcatagcctggcttcttaccagaattgcatttgcttcatcaacgttttcggtaatagtatagttatcggtaagatgtgaaagtcctaccggtgaaattttattaagtgttgctattttaaacattgtatcacctcgaaaattaaataataataataaaagtataccactttactggagcttagtaaagtggtacaatggttaaaatagactaattaaccgggaggacaaaacaatgagtaaatatgacagagtatataatttctcagcaggtccatcaatgctccctcttaacgtaatcgaagaagctgcaaaagatctgcctaattaccagggctgcggacagtcggtaatggaaatgagccacagatcggcagagttcaaaaaaatacttgcagaagcggaagcggatttaagagatataatgaatattcctgagaactacaaggtaatgttcctgcagggcggtggtacactgcagtttgcaatggtaccacttaaccttttgagaaactccaaaaaagcagactacattatcacaggaagctgggcaaaaaaagcatacaaagaagctaagaaattcggagatatacagataacggcatcatcagaggatacaacctatgactttatccctaaagttaaaaaagaggacttcagagctgatgcggactatgttcatatcacctacaacaatacaatttacggcacccactattcatacattccggacaccggagacattcctcttgtagcagatatgtcatcgtgcatactgtcagaggagatagatgtatcaaaattcggcctcatatatgcaggcgcccagaagaatgtgggaccggcaggcgttactatagtaattatcagagaggatcttctcggatatgcacctgaaacctgccctacatatcttgactacaaaattcacgcagacaacgactcggcatacaacacaccgccatgcttcggtatctatgtggcaggtcttgtattcaagaacatcaaagctatgggcggcatagcacagcttaataaagtaaacagagaaaaggctgcaaagcttcataaatacattgatgagagcacactttacaactgccctgtcaaagcggcagaggacagatcgcttatgaacgttacattcgttacaggcaatgaggctctcgacaagaaattcgttgcagagggcaaagccgcaggtcttgtaaacctcggaggacatagatcaatcggcggtatgagagcaagcatatacaatgcgatgccgatggagggcgtagacacacttatagattttatgaagaaatttgaagcagaaaacaaatagtatttttcaaaggcctttctgtacggaaaggcttttcatatacagaatggaggcagtatgaaatacttgatagtgcttgctgacggggcaggaggagagccgattgaggctcttggcggaaaaacaactcttgaagcggcagatatgaaatacactaaagagcttgcagcaaaaggacaggtgggcatggtacagacaataccaacaggctgcgcgccgggaagcgacgccggcaacctgtcagtaatgggatatgaccctgcggtatatctgacaggcagatcaccacttgaagctgcatcaataggaattgatatggaggatacagacgtatcgttcagagtcaatgtaataactctgacaggagagggcgaatacgaggatttaattataaccgatcacagctccggagaaatcacaactccggaggcggataagcttatcaaagccctgcaggcagagtttcagaacgatgaaatccagctttacacaggcgtaagctacagacactgcatgatatggaaaaatggtactacagagcttgaatttacaccgccccacgatgtgctgggacagagagtcggcgacaatctgcctaagggcgagcatgccgatatgttcatcaatatgatgaaaaaaagctacgatatactcaaagatcaccctgtaaacaaagacagaattgcaagaggattaaaccctgcaaactcaatgtggatatggggtgagggcaggaagcctaagctttcatctttcaaagataaattcggaattacgggagcggctatttcggcggtggatctgattaagggcattgcaatatgcgcaggacttgactcaatagacgtagagggcagtacaggtacgctcaacaccaattatgagggcaaggcagatgcggcgcttgcagctttcagagagggcaaagacttcgtatatgttcaccttgagggacctgacgaatgcggtcatcagggagatgcagagggcaaggttctttccctcgaaagaatagacgacaaaatagtaaagccgatagtagagggactcaaggcagacggtgaggatttcagatttctcatagttccggatcacagaactcctatagctgtgagaactcatacacctgagcctgtaccgtttgttctgtatgacagtacggacgagaaaccttatgatgatacaagagcctttaatgaaacctcgggttccacaggctcaaaattcggatcaggctatgagcttgccgactatttctttgaaaaataaaggagtgcacttcttatgaaaagactattgactgtggccttaactgttatagttgcccttactatgactctggggacttcggtatgtgcctatggcgcatcgtcaaaagatgcgcttgagcttgaggcaacaactgcaattttaattgatgcaaagacaggagaaattctgttttccaaaaacaaagacgttcagctgacacctgccagtatgaccaaaataatgacagcgcttcttgcgatagagaatctggatatggatacggtagttaccatagacgatgaaacgccgtacacagagggtaatatcatatatatgcacaagggtgagaaattcacagtggagcagcttctcaaggcaatgctggtgacatctgcaaatgactgcgctgtggcgcttgcaaagactatgtccggcaccatcaaagatttctcaaatcttatgaacggcaaggcaaaggagctgggggcaaagaacacaaactttgtaaaccccaacggtcttgatgacaaggggcatgtgtctacagcctacgatatggcaatgattgcaaaggaagccatgaaaaacgaaaccttcagagaaatcgttgcaatgacaagctatacggttccaaagacaaacaaaaataaaaaaagaccgctgtataccaccaacagactgctgtcagacaaatataacgatatagttgtaaacggagaataccgcaaaccgtattacaaaaatgccataggaatcaagacgggatatactcctgtggctcttggatgtctgacggctgcagccgaaaaaaacggcacagagctgatttcggttgtaatgcattcgtctgatttcggcagatttgcagatacaatagcgctgtttgagtacggatttgcaaattattctacatatactgtgtatgacaagggagaagccgtagaaaccatcaaggttaagggtggcaagcctgatgaggttaaaaccgttacagattactatgctgcggtaaacctcaaaaaaagtgaaagcagggacattgtcactaaagacattgtttggaatgataaaatagtggcgccgattgcaaagggtacggtagtaggtcaggtcaagttatataagaacaagaagcttgttaccacaacgaatatagttacggcagacaaggttgaagagggaatgttcagcttcctctacaacggtcacgtggcatatccaggcaagctggccctccttatagcggctattgttctggtgcttcttgcgatagtgctagttattatcagaattgtgaacaggcgtaagcgtatgaagcagagacagagacaggccatgaaaatagcaagagaaagaaaatacggtcatcgttaacacgatgaccttttgtgatgatatgtttgatattaaagaaaacctcaaaaaacttcccgattcaccgggagtatatatacacaaggacagacttggcgaagtaatatatgtaggcaaggctgtatccctcagaaacagagtaaggcagtattttcagagccagaagaatatggacagcaaggtatcggccatggtgtcgcatattgcggagttcgaatatataaccaccgcaaccgaaatggaggctctgattttagagtgcaatttaatcaagagatattcacctaagtacaatatacttctgagagatgacaaaacctatccgtatattaaaatcacaatgaaagaggattatcctcgtatactcaagacaaggcgtgtcgaaaacgacggcgccagatatttcgggccttattccgatgcaggcgcagtaaacaggatagtcgatctgatgggtgaaatctacagactcaagaaatgctccgctcagaggttccccaagggtttcagaccatgcctcaactatcacatagagcagtgcaggggcatatgcacaggttatgtttccaaagatgaatacagagagactgtaaacaaagttgcagagtttctcggaggcagtacaaaatctcttgtaaatgaaatgaaagcaaagcttgaggctgcggcagagcagcttgattttgaaactgctgcaaaatacagagataacattatggcgcttgaggctataaatgagaagcagagagttgtgctgagaagtgacaaggatatggatataattctgacactcaaaggcagagaggactcatttatagtcgtattctatgtaagggacggcaagctgagcggaagagaaaattttgagatgcatacggagggagaggaaagctccggtgagatgataagctcgtttatcaagcagtattacggagaactgacttcggggccaaaagaaattctcacagaggaggcgctttccgatgcgaatatcctgtcagagtatctgtcgcaattatggggcaggaagacttctgtatttatgcctcttaaaggcgagaaaaaagccatacttgaccttgccagaaaagatgttgttgaaatggccaagacaatagatgacagagcggaggcaagggctgagcgggaggattcactcagaaaacagatagatgctgtatattcctgtctgaaaaacggccctcacggctacagagtggaggcctatgatatttccgacatcaacggtgtggattcggtaggagccatggttgtgtttgacggaagccgcaggctcaaaaaagactacagacgatttaaggtcaaaaccgttgagggatctgatgactacggcagtatgcaggaggttctgtacaggagatttaaaagagcgcaggcagacgatgccgcgtttaacacatacccggatatgctatttatagacggaggcaaggggcatgttgccgctgcaaacaaggttcttcgggctatgcagatagacatacccgcctttggtatggcaaaggacgacagccacagaaccaaggagcttgtctatgaaaaggacggagagttcagtacgatacagataaaggacagtccgctgctgtttaaatacgtaggaaatattcaggaggaggttcacaggtttgcaatagactaccacaggacgcttcgaacaaagaatatgcttacctctgtacttgatgaaatagagggtataggccctgtcaaaagaaacagccttcttgcatattttggcagtgttgacagaataaaagcggctgcggcagaggaacttgttaaagttgatggaataacagaaaaaaatgctcaaaatatattgaaatattttcggggataatatatagtaaagtctaagaaattaacaattcggaggaatattaaaatggcagataacaaatcaaagggatacaatgatggcatagatgaagaggctgaatttatcacacttgaatttgatgatggtgatgaggttgaatgtgaaattatgggcgtgttcgaagctgccggcaaagaatatatcgctttaatacctgatgacggcacagacgatgtatatatctacggctacaaggaagtaggcgaagatgaatacgacctcgttgacattgatgatgcagagtttgaaatcgcagtggcagaatttgataagattgtagctgaggaagcttaatctgactttaaagcattatgcatttaaagaccggctctcgccggtctttagggttttttgtactgtctatcttctgcctgatgcgttcaggacatttcttatcttgtgagataccattgatttgatagcatccctgccaggtcccagatattttctcgggtcaaattcagcagggttttcgctcagatactttcttacctctgcggtcagagcaagtcttaaatcggtatctatatttaccttgcatattccgtgttttgcagcttctttaatcatatcctcaggaaccccctgcgctcccggaatattgccgccgtactgattgcatttgtctacgaattctttcaggactgttgatgctccgtgaagtaccagtggagtatccggaatgagcttgtggattgtctttaatctttcaaagtcaagctttggctcgcccttgaacttgtatgcgccgtggcttgtgccgattgctatggcaagtgagtcaacgcctgttctttcaacgaattcagcagcttcctcaggaactgtaaaggttgcgtttctgacatctacgtttacatcgtcttcgataccggcaagcttgccaagctctgcctctacaacagctcccttgctgtgagcatattcaacaacttcctttgtgatgcgtatgttttcttcaaacgggtgcttggagccgtcaatcataactgatgtaaaaccgtcgtctacacatttcttgcatatttcaaaatcttcgccgtggtcaaggtgaagagctatatcaagacctgtatctaaaacagccgcctcaaccagcttcataaggtatgcgggcttggcatattttcttgcgcctgccgaaacctgcagaataagaggagcgttttcctcctgagcggcttcaacaatgccctgtataatctccatattgtttacattgaaagcgcctacggcataatctgccttgagggccttttcaaacatttcctttgtagtaactaaagccataatttacctcccaacttacatctgtaatatattatacaccagccgggagcttttttcattactatttttggttcatcagcatattaagcatagggccgaaggactccatcattttgctcatatcaggagcagactcctgcggaggcgcaggctttgcttcgggaagtgacagcgtatcaaggttaaactgcctcagtctgtttacgttttcaagtgcgtttacagtgtgatgcagtctatctaaaagcaggtcaagtctgaatgtatcaaaatatgcaggctgggaatttctgctgtcgtttgacagaagcagcagcagcagaattatttttacaggacttatattcataatatgtacctccggattggccgcctgcggcaaagcggaccttattgtaatacataatatgcagcgtctgcgcatattgtgcatatgaggaggatttaaaatgaataataaaagtattatggatatggcaaggcagctgggactgcctgttacggaagcaaacatagaagatgtgagcagtatgagtcagcagcagatggaagcagaaataagaaagcttaaaaacgagataaaaaaagaccctgaaactttcaggaagcaggttgcggcaataaaatcgctttcgtctatgatgaacccgatgcagagagcaaagcttgaaagtctgctgagaatgcttgaagaatgaaaaaatccgcagcatatgctgcggaaaaagattaacagttatttgtccaggccgttccagctttcggagtctctgtcccattcaggataatctgcaaggacaggcgcaggatagtcaatgccgaggattgcaacgatattgccgtttgtgttgtacagcggcgagaataccgaccagcaccatttgccgtcgccgtcctgccagcctgagcgcgccgaagcaacaagacctgcctcaaaggcttctttgaactgcacttcgctgccgtagtctgtaccccaggtatccggatcttcggaaccgtcaactgtgatatagtagctgccctcggagttcggtacaagggcgtacatatatgttgcgccgcattcattcatatagcctgtcagagttgcgctcaaggcagtgtattcggaagaattcattgtggcttcgccgagattttgcgagatgagcatttccagtctgtcggtccagcctccctcaagcttcttggcataatcctgaacatagtccattgcctgatctctgacatctgccacagcctccggcagagtataatcctttgcagtctctttatttgcggttttgcctgcgccgcagcccgcaaaagcaagcagcactgccacaaggctcagaattgtaagtatttttaaattgcgtttcatctaaatctcctttgcgattaacctgcgtaattgagcagcgcctccatcttccagaatatgagcagtcctgctgcaaccactatacctaaggctacgagtatatcgctgttgttgtataaaaagtttctcataatgtatctcctgaacttaaaaaactatatataatgtatcatatttttggcttttaggctatcggttatatgaaattttaattaaaaatgatataaacatttttttagcgggcaaattattgtataatagaataatggttaagataattatagagaaaaacgatgggaaccagagacttgacaggtttctcaaaaagtatttaaaaaacgcgccgctgagctatatatacaaggcaatcagaaaagacgtcaaggtaaacggcaaaagatgccccaaggagcatatgcttcaggcaggtgacgagctttcgctgtatatatcagatgatgagctttcaaagctgactgcggttaaggctcacgcaaaggcaaagcggcagtttggaataatctacgaggacgaaaacctgcttatagcggataagcctttcggcctgcttactcacggagatgagtttgaaaaaaagaacactttggcaaatcaggttacagcctaccttatagcaaacggcgactataaccccagggccgaaaaaacattttcacctgcgcctgccaacaggcttgacaggaatacgacgggtattgtgcttttcggcaaaaacagcgcggctctaaaagcgctcaatgagatgctgagagaacgcgatgccataggtaaatactacaggactgttgttgccggtactatgacggagtcacttgtgcttgaggacagaattgaaaaaaaccaccgggaaaatctcgtaagggtattgcctattgagcaggattcgggtaaagtaataaagactgcagtaaagcctgttgaaacaggcggcggatttacacttgcggaggttcatctggtgaccggcagaactcatcagataagagcgcatctggcggaggccggatatccgcttataggggacaggaaatacggcaatcccaaggtaaatgcaatggttggcagacggtttaatctgaacacgcagctgcttcacgcctgcaggattgaattcggtgaatgcagaggtatatttgcatatctttcgggcaggaaatttgtttcaccgccgtcacaggaatttatgagaataaccagagaacttacaggaattgatatttaggagaataattaatggcaggtaaagataaaaaaaactggagagcaaataacaggccgtacataattgcgtttgttctggcatttgttatgacgatgctggtggcgcccgaaatgatggagggcgactctatggagccggtaatttcagacgggcaggcaatatgcgttgtcaaggactcatattccgcaaagagagggcagcctgatcttaatgaggttgtggtaatggaaaaggtttattccgaagactatgcagatgacaatatcattgcaagagttgtgggacttccgggtgacaaaatagaaattaaagacggaaatctttatcgaaacggcaagcttcacgaggtaaacggcagctcagaatgtctgggcgaatacagtgttacaatagataaggacagcgtgtttattctggcagacaacagaacggtcaaaaaaactgcggacagcaggacaataggtcctgttccgatgaaagaaatcaagggaaatgccaaggttataatatggccgctgggtgacataggaaggatcaggtagtgaaggagattatcaaagacgttgttatcgctgcgattatagcgataatagtcatacagtttataaggccgacagtagttaaagaaagctcaatggaggctactttatttgaaaataactatatatttttaaacaagcaggcatatactttcggagagccgaagagaggcgatataatcgtttttcattcctcacttacaagagaggacggcagcgagaagcttttaattaaaagaattataggacttccgggagatactgttaaagtaagcgataattgtgtatacttaaacggagcgcttcttcacgaggactatatcaaagagcagggcgtagtgccgggagatgtcgaggttactgtgccggagggtgagctgtttgtaatgggtgacaacaggagagtcagcatagacagcagatatgaagaggtcggctgcgttaaaatagacgatgtggtcggcaaggcgtttttcagattgttcccgttcagggatataggcaaattgtaaaggggttatctgatgaaagagatattgagagatatagtaatagcggcggcaatagcatttatagttatacagtttgtaagacctgtggtggttcacgaaacctctatgacagacactttgcagccgggggattatcttcttatgaacaagaagatatacaggcacaatgaggcggagcgcggagatatagtggtgcttcattcaaatcttacgcaggaaaacggcagagaaaaacttttgataaaaagagtcatcggattgcccggcgacaccgtttttatcaaggataattccgtatatattaatggagagcttttagaggaggactatatcagagagccgggagttgtaccgggcgatgtggatataaccgtacctgagggcgagtattttgtaatgggtgacaacaggggcaacagcatagacagcaggtctgaggaggttggctgcgtcaagcacaaggaccttgtcggcaaggcgtttttcagactgtacccgttcaaaaatataggtaagatatagggattgtgatgaaaagaaacaagaaacttgtagcaaacaacaaaaaagcaagacacgactattttattgaagaggtctatgaggcgggcattgtgctcaccggcactgagattaaatctatcagagccggcaaggtgagcatcaaggaaagctatgccaaaatagaaaacggagagatgatagtctacggtatgaatataagtccttatgagcagggcaacagatttaatgttgatccgctcagacccagaaagctgctgcttcacaagcaggagatacgcaagctcataggttatacaacactcaaggggcttactattgtgccgcttacggtgtatatcaatgaggacggcagggccaaaatggaaatcgccgttgcgcgaggcaagaagctttatgacaagcgtgatgatattgccaagcgtgatgcggagagaagaatggccaaagccgcaagatattaatattaggggatgtaaaggtttcgacgggggcgtggaaaccggataagcgagccgcagtttgtccagtctgcgttaaaaaggacacgttaaatataaacgctaaaaataacaacaatttcgcattagcagcgtagttctgcaccgcgtgtcagcccatatttacctgtaggtatgggatctggcatcgaccatacaggaaaacctgacaagtgagtccgaccttgtcagggaacaacggactagccgatttatgaacctgctgatgggtgcttaaaaaggcgaaacttaaatcatcagctgcgctcggagaaattcctgtggaaatactttcggacgcgggttcgactcccgccatctccaccataacaatccgcccgaagagcaccagaggtgcgattcgtaaggcggattttacgcaagcgaagccaaagagcacgaagtgtgatttgcaagcagcgcgaacgtgaaacaatccgcccgaagagcaccagaggtgcgattcgcaaggcgggttttacgcaagcgaagccaaaaagagcgaaagtgcgatttgcaagcagcgcgaacgtgaaaatctgaccctgactgggaacagccggggttctttttttatggaaaagatacaggtattaagtgcagatgtgcaggcttgtttaaaaaattctgaaaaaggtgttgacaaaagattgctcatgtattagtgtattagataactagtacgatagtacataattaaagaaagggggaactgctatggacagaagtttagaagacaatatgcccatatatatgcagataatgaacagaataagagatgccattgcctcgggagagcttgcggcaggcgacaaggtgccgtctgtcagagaattcgcctcggagtttgaggtaaatcccaataccatgcagagggcattaatggagcttgagagagagggcatactcgtgtcggagagagccataggcagatttgtgactgatgacagaagcagaatagatgcgatgcgccgcgaggcaggctcaagggcagcggatgcttttatcagacagatggcggaccttggcttttcagaggaggaaatgctggatttttttcgtgaaagatatggagaaacgctgagaaagcaggtgggataaatggagagaaaactaagactggtagagtcacctcctatagtggagattaaggagctgaccaaaacctttgatactgttacggcattagatgatgtatcactggaaatcggtgaggggaagataataggtctgcttggctcaaacgggagcggtaaaaccacgatgctcaaaattctggcgggactctgtatgaaatacgagggtcaggtacatatagatggcaaaagtcccggagcatttacaaaatcaaaggttgcatacctgccggacagaagcggactgccggaaaaaatggaggtctccgagatgataaaaatctacagaaccttctttgacgattttgacgaggacaaatgccgcaggctgcttaatctgtttgacatcggtctgagaagaaccaccaagggtatgtcaaagggaatgactgacaagctgcagcttgcgctgatgatgtcaagaaacgcgaggctttatctgcttgatgagccgcttgggggcatagatgtcgaggcaagagatcacgtgcttgatataattctggataacttcaacccgcagggaacaatgataatagtcacccaccttataggtgaaatcgaaaggctgtttgatgaaattatagtgcttgaaaagggcagactcagactgcagggaagctgtgacgacatcagagcaaaatacggaaattcactggtggattgcattaaggaaattacaagagagggcagaagtgaacaatatatttaaaaaacacagggtatggctggcagtgataattgcggcggcagttatcgcaggagccgtaatcggggtcagagcactgtatgtccgcagcttcggtaaggcgctttttccggcatatctgccaggtccctattcctcacttgaaagcgatatgctttttgcagatgagatgacagggagcgctgcaaggccgaattacagggaacttgactttgccagaagcaaaatcatatcacctaagggctttggcttcaaaaggcagtttacctttgatgaaagaaccgcagtcagtatggacgtttcgggcagcagcaggggatatgtgaacaattacacctacggcatatacaaagacgagctgctgatgaagcctgtttccgaaaaaaatacaaagggagaaagcgatgcagccatggctgatgaaatgggtatagattatgattacggcttgggtctgagcgcagagcttgaaccgggaacctattatataggcatatgtataccggctgtcagaaacactccgatgataaccgaatacagtctggaattcagggagctgaaataaatattagaggaagcttatcagggaggacgatatgaaaagcagaataattcccataagcatagcggcagctttagcgctagcaggtatttttggcatactggtaaatgaacttttgagatatgacattaaaaatccggaaaccatgggcagggcagagctgcttgttacagcagaggacatagagataattgacgcttcaaaagacctcttctatatcaaagccataggcgggggatatgccattaccgataaatacggaaacccgcttgcagatatgagaggcttcggagggctgaaacagcacagcggaggcctgcttgcagttaaaaaggacggcagtacagcagttgtgaatatcagcgaaacagtaaaacagggaaagcccgtatatgcggtatatgatgaagcgatactgagcggtgacggtacatatatgcttgtaaaacaaaacggcagatgtattgtgcaggatatgaaaggcagagggctttatgaggcagaggactataatgcagtaagcctgaaagagggttatataactgacaggcaggcgatagtaaaacttgcagacggcaggacagaatacaggcttcatgagggaactgaggcagtggcgtacggaagcggcttttgggttataggggttattgacaagcagcttgtatcgggctattccggctactatatgcttgacgacaaatataatatagcctttgagggcaggatgattgaggaatacaaaatctatgacggctacatatggctcatttacgagaagaacaaaaagtatactgacatacgtgcagacggaaccggcgggtatatatcccaaaattgcgagaccgcagtaattgatgcagacggcagaaccgtttacagggataaatacagcaggttctgcaggggcattaccggcggtatacttgccgtaagcgactgtgaatacagctatgcggaaaagcatatatcaggagaaatttcatatatccgccttgccggagataagcagggagaaaccatgtataaatcagaggatctgtgctatatggactttgaggacggaataggcgcagtatgcgctatggaaagcagatatgccgaggacagacgatatacaggcgacacagacagcgccgcatacaaatggtattttgtcgatgagaatatgaaaaggatttcaaatacagtccgcggcattaacggcgcgacagacagcggatatgtaataaaggatgccggaaattacaaaagactttatgacctgagaggattattaaaataatgtgaggcagcattgggggaaagaacagatgaaaagcagaattatacagataagcatagccgtggttttagctgttgcggcgcttgcctgcatactgatgcagtgctatgtgaaatatgatatgggtaaagacactgaggtgcgttatccttttgttgccggtaccatagacataattgacggtagccagaggctgttttatgtaaaaaatgttcatatgggttatgatcgtgatgctggggaatacagaaccgatatgaaccattacaatattaccgatgaccacggtaatgtccttgctgatatgagagaattcggagaactgaagcagcgggcaggaaactggcttgcggtgaaaaaaggcagcaaaacggcaattgtggatattaaaaaatcggtaaaaagagcataagcggtatatacggtctatgatgatgccgtaatcagcagcgacggcaaatatgcagtcgtaaaagaaaaaggcatatgctctgtgcgaaatatgaggggcagagtgttttatgagtcagaggatccgaatgcctcaagccctaaagcaggctatatagtcgaaaaaacagacggaggcatgcagacaatagtaaactttaaaattggcagaaccgaatatgagcttccgaaaggagaggaggctgtcgagcacggcagcggattctgggttatagggattgaagatgataaatacgaaagcggatattccagttactacctgctggatgacagatataatattgcatttggcggacggctgattacggaatacaaaatatgtgacggctacatatggcttctctatgaaccgtgtcgcttctatgacagcagaaataccgacgatgaatattcaatcggtgaatacaaggcggcggtaataaatgaagatggggagattgtctacaaaggagaatatggcactttctttagaggcatctccggtgatgtactggcagtcagcatcagaagcggcttgtgcggcgcaaacgatatttcatatatgtatcttgcaggcgacaatgccggaaaggttttcttaaccagcaaggatctttactatatggactttgatgatggcgtgggagctgtatgcagcatgaaaagcagatatgccgaggacaggcgctgtatgggcggagaaaacagtccggcttacgaatggagctatgtagatgagaaactgaaacatctcgcaagcggaggtcttagcggcggcgcaacagacggcggatatggcatagatgattacggtgaggagcagtgccttataaatttcaagggggaggttaaaaatgatgaacagtattgataattcaattcgtcttgggataagacaaaacagagatgacttcataattgcggcggtgcttataatagggctcggcttttcggcaggagcctttgcgcctctcctgtttgcaatgatggcggcaggtatagtatttgaagtaagagcatgtaaaagagtgttttatgacagcgtatatggcaggcagggatatttctatatgtcgcttcccgtagatgtccggcagcttgtaatatccaagctttatacagcctcgatcctgtctgccggaataatcgcaatgctggttatagggggagtattctacttctggataagctttaactccgtaacggtatttgagattatagaccaattgacagcacagcttgtactggtcgtaaaaatggaacttgtatatgttgttcctataacgctgatttcgtggattatagggattgtggcgcagatgaccgttatattcgcagccattgtatgctacagcagtctgcctgaaaaaaagcatacaggaccatacaaggcacttatgataattgcaggggcagcagcggtgctgtatgccgtaagaccggcctcagcccttataggctttggagttctggaaagctcaatactcctcataattgcagaggcggtatttcaggtaattgtaacggcagtgctttacagatatatagtcagggcgctggaaaaacactatatggtgatatgatgaacagaaaaaacattgaatatctgaaacttaatatcagaatgtgcatatgggaaatactgatatcccttgcagccttccttatatggctcatagcggagtacattttcgatatgccgggggataactgtgaaatcctgatgataataattacagcatttatgtggataagaacagtaagaaagcttgtcagccggaatatgtttgagagcgaagcttatctttatcagagtctgccggtttcatatgtgtgcattacatttactaaagtgggacttggagcagcagtgctgtttccgctgatgagcttttttgcaatcataaaacggcaggaaaacgctctgtggcagcagctcgaagaaggcctgctccttgcggtaatgttttcagcccttatatacataatacagatatatatggcaggacagggcacaaggaaaaaaagaacccttgctcccgtatatacaggacttgcaatccttgtaattatcctgtttcttccggtcacactggtgataccgggaacgaacatgtacggtgcggcagccatactggcagcagcagacatactgcttgccgccgcagcggtaaaggcgatgaagcgctggtatgtgctgttgtaagcgattaaagaccaggaggaaacagatatcgtagggtaatttctcaggtatgcaaatatcttgaacagggaaatttaataaaaggcgataatccaccggtatgagactgatattggtggattgtttgttttttgagaaagagtgtaaaaaacctgataaatgaagtgcgttttcacctgaaatgcaaaaataaagaattataagttaaaaaacagaaaacgtttgttgacataaatatgcatatcctgcaatttttacatctgaggaggaaggcggtttttctgtggtttttccggatttagaaagctgttatacctgcggtgacaatatggcagatgctttaattatggcggaggatgttcttgctcttacactttacggatacgaaaaagaacacaaggtaattccggcaccttcacagagaaaagagattgacacagaagatgacgagtcgtttgtgaattttgtttcgtgcgatactttggaatatcgaaagaaattcagtaataaggctgtaaagaaagctttaacaattcccactcggctcaatgaaatggctatagaaagcaatgtgaatttctccacagtgcttcaggaagcattgaagaagcatttaggcctgtagataatcggcagggtgggcaaaccggaaattgcaaaaagacagagcgaatttgttgctcaactgcaaaaccttggtgtgtatggctataagccgtacattgtatgcacgaatgcttgatggatttaaatatagatgatataataaaaataatttaaggaggtaatgttatggcagcgaagacagcaaatttatatgcgagaatagaccctgaaacaaaagaacaggcagagcgcatacttgatgcattgggaattacaagttcaatggcaattaatatgttttacaggcagataatattacagaaaggaattccatttgaagctagactaccgtatgaagctcctttgaatatggagaaactgacaaaggaagaacttgataaagaaatcgaaaagggctacagagatatgcttaatgggaatgtcagaagtgcagctaatgttttttctgatataaggaaggactatcttgatgaagtatgaggtaaaccttacagcaaatgcctgcatagatttacagaatatatttatgtatattgcatttaaattgcaatcacctttaaatgcgacaaatcaactgaaccgtttggaagaaggtattgatactttggaatatatgccgtatagatttgtgacatatgatgaggaaccttggcatagcaggaatacacatattatgccaattgatagttatcgtgtactgtacatacctgatgatataaagaaaatggttaccgtattgcgtattatttatgcgggaagtagcatggaggataaattgtaaatatcagacatatcttaattgggtgcatttttgtaattgtagatttattgccgttgatgcaaaactttggtatatacggttgaatatgcataataaagatgtgttgatagtttgaaatatgtatgttagtatatgttatataaataagtttgcagcaggttctggttcgattccagacatcacctatttatttatagaaattttatcagaaaatctcctatcaggaatatgctatgatatttttaaatgcatatttgtgaaaattaaaggaggtggtattatgacagaattatctatagtaataatctgctggctatgctgctatggtggttgtggtgtaattggtaagcattgtataaaaacatagccagtaccaaaaataatagctattgtttctggatagaagcgatagctttttaaatattgaattacatatatgatgaagaagcttaactcaataatattgcgattgagtatttgtgtgaaaaacaaagggtgctttttcttttgacaagaccttaaaaaagcttttaatgcaaagaacaaagtacgcataacttttttgtattacagtagggtctttttttaaatttagctcaggtgcagcaattgtcgagggctttttatattgcaaaatgatacataaaagaggattatatgcaggtgccgtattatcactcttgcaaggtgtgttttcttttgaagcaaatgatggtatgatattcttaataaattcttaataaattactcccttttttcttaaagagaatttatgcataatatcagtggaggttggaaatgagcaatattttaatttgtgatgatgagaaggatatcgtatcggctctcagaatctgccttgctgcagaagggtatgaaatctttgaagcatataacggtatggaggctctgaatgtaatcagacaaaatgatattcatcttgtactgcttgatattatgatgcccgaaatggacggaataagcactctggcaaagataagagaaagctacaatatgcctgttcttttcatatcggctaagagcgaggatgctgataagatactgggacttaatataggcgcagatgactatatcaccaaaccgtttaatattatcgaggtggttgcaagggttaaatccaatctgcgaagatatatgaggcttggttcaaatgtcagcggcagcagcagaatagaaatcggaggattatgccttgatgacagcgagaaaacagtcactgctgacggcgaggagataaatctgacgccgacagagtatgaaatacttaagctgcttatgaaaaatccgggcaaggtgttttcaccgagagagatatacgaaaaggtctggaaggaaactctgcttggcagtgagaacacagtggcggtacatataaggcatttgagagaaaagcttgagatcaatcctgcagaacccagatatatcaaggttgtctgggggcagggctacaagatacagggggtaggcagataaatgaaaaaactattaaaaaacacatgggttaaaatggcaggggtgcttctgtttgcagtgcttatgacggcaactgcgttctttggtactgcggttgtagtatttgaggcgtcaggcgcatactcctcgggagaggaggcttttgttgaaaatcttgtaatttccgaagcatgtcacagggcagaggatctgctgaattcaaatgctctgtggtatgatgacgatgcaaccagatatgacagggacggtcttagggctgacacaaaagcgcaggaggattcaggctttttttacagaataaaagatgagcgaggcaaaacaatcttctccaactatgacaaggggcaggaatatacatatacctgcaggtacgaaggaggcgctgcaactgcagatatatatattaatactgatacagcaggagacagcaaggcaaaaagtctggagattttagcttataatatatataggcagaagacagcggctatattttatgcaatcatatcatttatacttgcgatatttgtgtttgcatttcttgttgccggagcaggcaggagagaaggcaccgatgagatcagaaaacgctttacagataaaattccgggtgatgtatacactgtggcagcaggttttgctgagacagctcttgtatatctgtgttttatgtcacttcaggcagtgtatgaatacagagatttcagtgcaattttcggtataacccttgcagcagttatagccatggcaggttttgcgatatttatgatttatgcaatgagtatggctgtgcagttcaagcttcactgtttctgcagaggcacactgataggcagattgcttattctttgcagaaaaataatattaaagattccgtatatgtggcgtacaatgctgataacggcagtgatactgtttgtagaccttgtaataataatgtttaacagctatgacggcggggtggtgttcttcttcatcgtagagggaattattgtccttgcaggcgtatgctacgcggctctcaaccttaacaggcttcgcgccggaggagaggctatagcagagggaaatacagactacaagattgatacggacaaaatgttcttagactttaagaagcacggtgagaacctgaacagcatcaataagagcatttcccttgcggtcgaaaagcagctcaagagtgaaagaatgaaaaccgagcttataaccaatgtgtcgcacgacatcaaaactccgcttacctcgataataaattatacggagcttctcaagcaggaaaagctggataacgagagggcggaggaatacatcggagtccttgacaagcaggcggcaagactcaagaagctgactgaggacatagtggaggcttccaaggcaagcacaggcaatctgcctgtggaactgcgggagtgcagtcttggcatgatactcaatcaggctctcggtgaatacgaggataagctgcttgaggcagggcttaaacctgttgtaaatattgcagatgaggatatgcatattatggctgacggcagacatttgtggagaataatcgacaacctgctgggtaacatatgcaaatatgcgcaaagcggaacaagagtataccttgatgtttacagagcgggaagcaaagctgtgatgtcatttaaaaacatttcaaagtacgagcttaatatatcggcagatgaactgatggaaagattcgtaaggggtgatgaatcaagaaatactgagggcagcggtctgggactttcgatagcaggcaatctggcagcgcttcagggcggagaactgaaacttgccatagacggagatttattcaaggcaacggtggaatttaatgtgatatagggaattacggagcaggagataatgaggaaaaagagaaaaacggtcagaaaaaaacgaagcgggtgcacgaaggtcatacttcttatggtgcttgcagcggctgtgattgtatgtgtcagggggattgacgcgggtaaatccgcagagcagattgtgcaaaactatgcggacagacataacatatatatgtcggaatatccggacgagatgatacagctgcttgcatcaaacaaggaaacaaagaaattcgttctggaatatcctaaaaaaaaggatcttgctccggaaatcagtctggataaagaagtcagagggggcggcgtgccgagactcctgcagtgggatcagagatggggatacagagagtacggtgacggcattatcggaattaccggctgcggtccgacctgtctttcaatggtgtacatatatcttacaggagatacaagtatgaacccgtatcagatggctcagtacagtcagagcagcggctattatgtaaacggtacggggacatcatgggagcttatgggaaacggcgcatcaaatctggggcttgatgcagtgcagatacctcttgatgaggaccgcattatagccaatcttgaggccgaaaaccccgtgatatgcagtatggggccgggcaaattcaccaagacgggtcatttcatagtccttacagaatacgaaaacggtaaatttaaggtaaacgaccctaacagcaaaaagaggtcacgccacaaatggagctatgaggatattgccgaaagcgtgctgaatatatgggtatacagaaacaaatagaccggaaaaaaataaacagataagagttgttcttatctgtttatttgcgttagaagttatacagtcattgtaaaagtgattaatttgcatcgtttatcctgtcagttttgacaccgacgataaacagtataataccgaggactgttccgcctaagccgcaccacctgcaggttgatatcataccggtaaagctgctcagaagacctttgccgtatacttcaaggtaataatcagggccccaggagccttcgtaccatcctatgacgaaagagcctacaaacataaggactccgaaaatcataaagaatattcctatcctccagatatcaccctgagccagctttgttttagggttgagaggatgcttttcagggtccttgacggataatccgccgtaaaggcgcttaaagattatatagaatacaagccccgaaattgttatgagaaagctcattgtgaagaattcaagtccgtttaccatcataccgataaaacctattaaaaacatacccccgagcacataagctttcagagctttcccgcctttagcataccacacagttctttcttcaaccggatatttctttcttatcttgaggaatgcaaacgccagacccacataaagaataaagagtacaggtgatattatatttactattattgaaaaatcaaaattaacaaatataattgttacgattgctaatatgattataggccagaaaggcattttgctcttctttgtaagctttgaaagaaatcccggacaaagattatcctcagcaagaaccataaacagtctggagccgctggcaataaccgagtttgtcgtcgagcaggaagaaataacggccattatcataaatgcaacgcccagtgcaggtcctgtaaactgtgtaagaaccgatgaataattgagtacaccttcctcaattccggttccccaactctggtaatttcccaaagatgccagtccggcaattgtagggagaaggaaattcagggctattataataatggagaccttcattccctttggtacgatttcaggatttgatatttctccgcctaaatttgaaatctgtatataaccgcagtaaagccatatgcctatggcaagtcctgtgccaagactggttacgatatcagagccctcaggaatgaacggctcaacaggattgtagttccagttggcaaagcctactatggttacaagtccaaacattatgattattattacagagaaaatagtgctgagaacacttacttccttcagcccgataagatttacgattgtaagaataactacgatagccactttgattatagttgccataagaggtgttaatgctataaccttgcctatatagcctactgcaataactacgtaggctgcctgacccaggtatatagccagcataagccaccagttcatacaaaatccccataattctccataagccattttcatccactcatatggtcctgcatctacaggagccagcgcgccaagctcggcagtataaatgcccataggggctgcccagaggacaggaattataatgagaagaaatattgttaatccgggaccgacactcggaatcatatcctcgacaccaaaagctccggcagcgcacatacagaagataagaaatacaattcctgcaagtgaaaatttcgttttgtgcatagcagaagagctggttgctgtattagtttcagatttattgctcaattttaaatcctcctttttaaaatatgtaacgatatcaaaagctttgccgatatgtcgcgctttagcgttagctaacggagctccccgcggcctgcggcatcagccttaaagacgacattagcttacaggatattttcagaaaattacatactattcttgctattataattgttcaaattgcgcattagcaattttgaaaggagaatatttttgcggtttaagaaaaaatctaatgagaaatagcaaaaaaatcaataaaagaaatactttttttatccagctgaattgtaaattcaacggaatctttagcgtaaaaactgcgattttccgtgaaaagaatattgttcagtatatgatgaccggcctgtggcagttcctttttttcagatgcagctattgcatctcttacagcagcggtatatgaaggaaagttttcaatggacatccctgcattagtaataagactccctgcaaaaattttagatttcagagtaatttcaacctcgtgctcagaactgagattccagcagaggatatggcaaccgtctgatgcttttaggataatatagcagtcacctatacagatttcatcatagtcctgtgaaataaaagacagtagataatacagcggcgttcgtataatatcatttgtaaaaacggcgttatgttcagattctgaactaaaatcgattcctatggtaaaatcgcaggaatgccttgtgataagagaatccagtatattttttacacaaatgtacatatcatcatcagcagttgcaggtaagatgcctggaaaaatttcaatccgggattttatggaattaaaatgatattttgaagcctccggcaataacagcttttcaagaagctcaatgtcagctccttcatcgggaagcaggtcggtattcctgaaaataaggttaatgcgaagcttcagagaatcatcaaaatcagctttatcaatattcacagtctggcttgaagatccaatatggatattggaaaattcagtccccagtttataaagcagatcttctgcaagaactgtataatcagataaattatgacaggtgactgcaggctttactgttaaaagtgtatgattggagtatttttgtctgtaatcgtgcggaggcataccaaaccagaactgaaaatgcttttcatagtatgctgaattggaaaaacctgcgctgagtgcaatatgcgaaattgaaaaatcagatgtcagaagttcatattccgatgtttctgcacggaccatatttataaaatcacgataatttattccaattgtttgggaaaacagatgagacagataatatggattgagtttttgctgggaagctatttcctccagtgtagacggctcaacatagttcttatatatatcatctattatcataccgagcctttctgtctgcttgagatcctgcagacgcttgaatacgaaagccttggtctccttatcaatggtaaagccgcggaattcacggtatattattccaaataaagttctgagtgttttcttgacacgcgctttaaagccttctccgcgtttaatcaattcttccagtattataaaaatacagtatttgagatacgcctgctggttatcatacagcagcagagtcttgtctgtatgcatagtgactaccgttgttcttatatttggatagaaattttctatgtaatcaggtctgatgcttaggattagtaaaagattgtttccgtcgggcgaacttaatgaatgtatatcttcactgtgtatgtagtgaaaatcgttttttttgagtcgataggttttgaaggtgagacgaagatcaatacagccgtccagaacataaatcagctgtatgtccggatggagatgcagcgggtaatctgaaatcgagagtatttcggcttttacaggaaggtcttcttcgtatgttatttttttaagcattggatacctcacttgttgaatgtagaatttagttgctgtcagcagatacattataaaagtaaagagcaaaaaaagcaatattattttttgaatattaaaacgaatagcaataaagaaatttacgcaaaaaggcagaaaaagtataatgtttaaaaaatatagaagatgcaggctacggtagcatcttaagtatatatacaataacaacaatgacaggaaggaaatggggctatgaatttggtagtaaaaagtacgtgcatttatgacagtatcggtgatttgccgtttgcgggatatatagagattgaggatgacaggattaaaaaaatcgtcaagggtgaaagcagctgctacagcgataaaaacagatatgaggtttatgactgcggagacaggacaataaccgcaggaattatagacagccacgtgcatttgtttcttggctcgcttcataacgcgactgttgatatatttgatacggatacagaggaggaagctgcagaatgtctgtatgatttttataagaatcgtgacgacgaatgggtaatcggtttcaggtggtgccagtttaaatggcctgatgaaaagctgccgtccaaagcatctcttgataaatattttccggacagacccgttgtggcatttaatgatgagctgcatggcatctgggtaaacagcaaagccctggaaatctgtggtatcgacaaggatacgcaggatcccgatggaggtactatagtgcgcgatgaaaacggggagccgacaggcttcctgctggagcagtctgcaatggagcttgttacaaaaaaggcgcttgtagtatcacctgaaaaagaagaggagctgattaaaggctttattaaaaaagcgcattctaaaggggtaacgtcagtgggagctgtacaggttctgcggataatgaaaaacgaagcctgcaggcgccttgaggaaaaaggtgatttgaagctgagagttttcttcgccccccatattgagatggaaatgaaagaagcggtgaatttaaggaataattatgtttcagataagctgaagttcataggactgaaaggatttgtcgacgggacaccgctgggacatacgggctatatggtagaaccgtacagtgatatgcagggctttcgctcagagccgctgatgaaaaaagaatggctggatgagaagagcaaagaatgctataaaaatgatattgcaataagattgcacgcatgcggtgacggcgcagtaagaatggcgcttgacgcctatgataaggcgcgaaaggaactgggcgcaaaggatgtcagaaacactatagagcatatagaagttcttaattgcgatgatattaaaagatttgccgagacgaatacagttgccagcatacaaccgacgcatatgcttatgggctcattggaagaacatcctatatttgcgatgattggagcaaaaagagcagagctggcatggccgggaaggtcactggcggaaaacggagctgttgtagctttcggaacagactatccgatagtggatatgaatccggctgatactctgtacagcgcagtaaagaggcgtatggaaaataatttacccgaagaggggtggaatccgcgtgagaaattcagtatggcagaggcaatacagaattcgaccataggaccggcctatatgatgcatatggaggataagctgggaactcttgaggaaggcaagcttgcagatataaatgtattcaatatgaatatatttgaaaacgaagatgagcttccgtctgcaggaacagatatgactgtgtttaacggagagatagtctataataaaatctccgactagaaatattcgcatagttttggagaagaatagaaaaattgtgcagaaggtataccgcacacgggcgtacagcgccggacttctttatcttgcaaaaacttccgcaaaaagatataattaaagaattgaattgtcaagaataaatttatatacaggaaggaagaaactatgtttcagtcaagaactcataattgtaatgaattaagaatagccaacgccggcgaaaatgtcaagctggtaggctggatggaaaacgtcagagaagtaggcaagaactttgcattcatagtgcttcgtgacttttacggcaccacacaggtcgtaatcgaaactgaagatatgatgaatattgtcaagcctttaaacaacgaatccgttatatccgtagagggcgtggtaagagagcgttcaagcaagaactcaaagcttcctacaggagaaatcgaagtcgttcccgaaaaaatcgaagtgttgggcaagtgcatttacaacgagctgccgtttgaaatcaaccgcagcaaggaggctgacgaaaacgtaagacttaaacacagatatcttgatctcagaaaccctgcggttaagaacaagataatattaagatgccaggttgtatcagctctgagagcagctatgacagctaagggatttttagaaataacgacacctatacttacaagctcatcacctgagggcgccagagactaccttgtgcctgcccgcaaccacccgggtaaattctatgcgctgccgcaggcgcctcagcagttcaagcagctgcttatgacatcgggcttcgataagtatttccagatagcaccttgtttcagagatgaggatgcaagagcggacagatcaccgggagaattctatcagcttgatatggaaatgtcatttgcaagtcaggacgacgtatttgcagtactcgaagacgtgctgcctcctatctttgcagaatacggactttacaaggaagcttcaaaaccgccgttcaagagaatagcgtttaacgatgcaatggagaaatacggctcggacaagcctgacctgagaatagaccttgagctttcagacatcactgaaatcgcaaacaaaacagactttgaaccgttcaagggatttgtcaaggctgtagtggttgaggacttcaaggaaacaagaaaattcatagacaagctctgcgcagacgtagaggttcagactgcaaacaaaccgttctggttcaaggttgacgagtcaggaagtcttacaggcggagttgccaaattctttgcagactgcgctgatgaactcaaaacggcactggacttaaagccgggctgctttgtaggtatcgcagcggctcctaagaagcttgccgctcagaaaacagcaggcgtgctcagaaaaatgataggcaacacagtagagggtcatatgaacaaggaaaaatatgaattctgctggattgttg

SEQ ID NO: 1226 - DNA, 6488 bp, Unknown
  16S sequences of unknown bacteria
ggggctgtatgtgttatgatgatgcttgcaggctatagtaacggaatgtcacttgcagcggcgtttgttatcggtatggtgacaggtttagtgacgggacttcttcatactgttatgggaatcccggcaatacttgcgggcatactcacacagctgggtctttactctgtaaacttaaaaattatgggcagcagagctaatacgccgataaaccccaataattacgatctgctcgtatcgctccgcaatgttaaaaatgtgccgttttacgaaaatgcgatttttataacagctgttattacacttgttatagttgcgattttgtatttgtttttcgggacagaattcggctgcacgctgcgcgcaacaggcggaagcgaggcaatgtgccgagctcagggtgtaaatgtcgaattcaacaaagttgtcggacttacgatatcaaacggattagttgcgtttgcaggcggccttctcgcgcagtatcagggctttgccgatgtaaatatggggcgcggggcgatagttataggtcttgcggctgttgtaataggagaggcaattttcggaagaatattctcgaattttgcgctcaatcttattgcaatgtcgctcggctcaataatctactatctggtgcttcaagttgttatctggagaggtcttgatcctcagctcctcaagctgctgtcagcaataatagttgcgatattcctggcgataccatacttcaagggtaagtattttaacggagtgattttagcaagacatagcggaagcgagaaaggagatgccgaaaatgctggaaattaagaatataagcaagactttcaatgccggcaccataaatgaaaaacgcgcgctcgacaatctttcgcttaagcttgatgaaggtgatttcgtaactgtaataggaggtaatggtgcgggtaagagcacgatgctcaacgctgttgcgggagtgtggaaaccggatttgggacaggtatttataggcggcgtagatgtgacgaagatgccggagcataagagagcgaagtttctcggacgtgtattccaggatccgatgatcggtacggctgccaatatgcagatagaagaaaacctcgcgatagcgatgaggcgcggtaataggagaacgttaaaatggtttataaccaagaaagagagagagtcttatagagaaaagcttgcggagctcggactcggactcgaagacaggttaaagagcaaagtcggactcctttcaggaggccagagacaggcgcttacgctgcttatggcgtcgctgaaaacgccgaagcttctgcttctcgatgagcatacggcggcgctcgatccgaaaacggctgcaaaagtgctcgaacttaccgacaagatagtaaacgaaaataagctgacgacgctgatgattactcacaatatgaacgatgctatagcgtacggcaacaggctgataatgctgtcggacggcaagataattctcgatataaagggagaggaaaaaaagcatctgacagtggaaagtgtgctcgctaaattctacgaggtgagcggcgacagctttgccgacgacagtacattgctcggatagataaacggcaaataaaagtatatttataaatataataaataacaatatgttgaaaacgcgccccggtgctttgtaagacaggatcgggacgcgttttctgttttcttttggtcattgcaggtataaaaaacactcctgattaaagaatataagtagcctgaacaaactaaaggaggagtttttatgacgtatatattaaaaaattcaagcattgctgaatataaaaagcatttggcgctggaggaaaaaagtaaaagcaccattgagaagtatatgagagatattcaaaatttttatgcgtatttatcagaagacaagaacattgataaggaaaaggttattcattttaaagaatctttgctggaaaaccgtgcggtcagcacagctaattctgcaattgcagctttaaacggcctgttttcctttctgggatgggatgagcttaaagttaagccttttaagcagcagcgtcgcatttttcgcgacagggaaaaggagctgaataaggcggaatatctgcggcttttaaatgctgcgaagcaaagaaataaccagaggctattttatattatggaaacattatgcgctaccggcattcggatttcggaattgcagtatattacggcagaggctgtgaaaaaagggagatgtacagtaaactgtaaaggaaagataaggacaattcttttgccggggaaattggtcaagtctttagaaaaatactgcaaggtaaacgggattatgaccggtgcggtatttattacaagaagcggcaggcctatggagaggacaaatgtatgggttgaaatgaaaaaactttgcaaagatgcaaaggtagattcgggcaaagtctttccgcataatttccggcatttattcgcagtttgtttttataatttggaaaaagacatagccaaactggcggatattttaggacatgccagcatagatacaacacgtatttatattatggaaagtatagaagaacatgcaaggcagatagagaggctgggactggtcatatcaatatgacagaatgacaattccgttattaagcggctttgcaaaatcatacgtttattctcaatatgtataaaaacaatgctatcacgtataagtatataacagtggacatacttttacaagtaatttactaaaaaagataccacaaatagaccgccaagcaatcttattttttgacggtctatttatagtactgtttttttatgcaaagataaatatgcagatatcacttttcttgcttttttgcattatagaattacttattatgtaattacattctctcataaaagggtttaataacggaattgtcattctgttattaaaccatttttaagctaagaaattagccgcttaatctgtttatttaaaaataaatgacagcttaaacggagggtgtcattgaaagtttgtttttaaacaatgctgattaaaagattttaaaaggaggatgaaaatgaaaagacgaatactgatagcagttttatctctctgcatggttgtaactatgctgccattttccatatatgcagcggaagacgggaatactgatgagataaacacgctttctttggaaggtgaaggaacaaaagaaagtccttatctttctgcggatgaaagtacgctggcagaagcggtggcggcaggcggatatattaagctgacggcttcctttacaggtcaaagtctgacagtagataaagatgttacgctggatttaaacggccagacacttacatttaaccatgtcggcagcgcaaatattgaaactggatttactgtagacgcagacggcagtttgactattacagacagtgcagaaggagccgtgggcaaggtgaccgcggaggaaaaatatattgatgatgaatatgctttttatgtagttaaagtcagtgctaacggtgaatttatactggaagacggtaaattagaaaatacatggtatgatttagccgcatcccctgtaatttataacagcggtacgcttacgctcaatggcggagaggttagcgggactacctgcatctataactgggctgttgaaaatgctgttacaacagttaatgtagaaaaagacgctgttgttgaaggtgtgccttgcacaacggatacactttataataatcgctatctgggtgtcagttacggtcttacctggatgggcttaggcgtgggagaatccggcagagtgaataagacagagacccctatcaacgatgctatgattatcaatattaacggcggtaaaatttccggcacgcaaggtcttggtacaaacgcatccaatggcaagtatgccggctttacactgaatattactgatggattgatcgacggcggcgacgacggcacaggtgcatacattccggctttgggcgttatcaatatttccggcggaactataaccggcgcgcagggcatccgtattgcggccggagagctgaatattaccggcggtgaaatcatcggcacaaagtgcagcgatggcgaagatttaattgccggcggcagcggcggaaccttgggtgctgtcgttatcggcaaggcgagcagcggatatgtcggcgatgtcaaagtcacagtttccggagaagctgtagttaaaaatacttcagatgaaagcgatacaccgagaccggctatcgttgtttctgataagaatatggcaaatgccggctacggctatcaagatgcttctatttctgtagtcgttgatggcggtgagatcgccggtgatattgttaagatctccaatcttaaagaaggaactattacacaggacggcggcaatactaatctcacagttaaaaacaccacggtttccggcgatgttattaaccagagtaaaactggtcttaccgttgaaaatggaacggtaacaggagatataacaaacagctcgagcggctctgttttagcaaacgacactgcaattgagggcaatttaacaaatagttcagacggctccattgtcgtactcggcagttcaaaagtgaacggagaagtgaagaacgacggaaaggaaagcggcggcagcctttatatcgagaacgacgagaataatgccgataaaggtgatactgttgctgtttcaataaatagcggcaagctttatgacagtttggaagaagcaattaacgaagcagtttccggagatacgattacactgcttgataatgtggagcttgcggcgacgcaaaatattacaaaggatctgacgttgaacctgaatggtcatactgtaacaggaaatgacgtccgcgcttttcaggtaaaagaaggtacgctgagcttaacaggtgaaggtacggtgaccagtgtaagggcagaaaacgatagccagcttgccgaaagcagttctgtaatccgcgttggtgacaacgatggtgatggcggcagggacgctgcgcttatcataggcgaagatgttactatcagcgctccagcaacttatggggtatccgtctttggctctaaaacaacagagacagtgactgtattcggcacgattgaggctgttcctgcagcggccattgcgggcaatggctctgccggctatgaaggaactaccattatcattaaagacggagcggtgctggaatccggctctgatgagatcaatgagaatccggcgatttaccatccgcaggcaggtgaacttattatcgagggaggtacaatctcgggtgcaagcggtattgaaatgaaggcgggcacattgactattactggcagccctacaattacagcgacagctgaggtagatcataataaaaacagcaatgggccgtctaccaaaggatatgcggtagttgctgtagaaaatgatgcttatgccggtgcagttaaagtgcagcttgacggcggaaattatgaaggtaaggttgctattgtcagcgataatgatgaaggaaccgacccaggcgaaaaggctggagatattgaaatttccggaggtaagttctcagatacggaggggcttaatgaatatcttgctcctggtaaaaaactgagcagcaacggaactgtagtgagaaaatcttcaggaagcagcagcagtagtagtgctgcatcttattcggttactgcaccgtcaaaagtggagaacggttcaatttccgtttcaccaaagaatgcggataaggataaaacagtgacaattacagcaaaagcagatgaaggctatgaattgtccaagctgatagttaaagataaaaacggcaatgaaatcaagctaacaaatgcaggcaatgacaagtatacatttacaatgcctgctggaaatgtaacgatcgaggcagatttcagcgaagctgtaaaggaattgccatttaaggatgtttccaagacagattggtattatgaagcggcaaaatatgtttatgatgagggaatgatgagcggaacagcggacgatttgttcagcccgaacataagcacaacacgcggtatgattgttacgattctctatcgtttggaaaaagaaccgactgtttccaatagttcgttcagcgatgtaagtgaaaatgcttactatgcgaaagcagttgcctgggcagctacagagaatatcgtaggtggttatggcgacggcaaatttggaccggaggatccaattacacgcgaacagctggcagcaatcctttatagatatgcacagtataaaggcactaacaattccaacactgcggatctctcggtatttactgatgctgcaagcataagtgaatatgcggaagatgctatgcgttttgcagtcggaaatggcattatgaatggaaacggtgatggaacgatcaatccaacaggcacggcaacacgtgccgaggcagctcagatgctgatgaatttcttaaaataaattgtaaat

SEQ ID NO: 1227 - DNA, 2788 bp, Unknown
  16S sequences of unknown bacteria
aagtataacatatataggatctgatgacaacagagtggttacagtcttaggaaacaccagggatacgtcttgcatggtcagatggaacatagtataatgactgcagatttccatggctattgtactatgccaatgaaaagggagtgccaaaaagatgaaagaattatccagaactgcgtcggccattgcgccttcaagtacgctggcgattaacaatttgtataaacaaatgaaggcggaaggaaaggacgcgctgggttttggcgtaggcgagccggatttcaacacgcccgataccattaagctggctggaatccgcgccattattgataatcaaacccgctataccgcggcttccgggacgcaggaattgaaagaaagcatctgcctgcggctcagggaagactgcggcgtggagtatgctcccgcggaaattgccgcagccagcggtgcaaagcacagcctgtatattgccctgcagtgtctgctcaatcccggcgacgaagtgatcctgcctgtgccttattgggtcagctacattgagatgatccgtatgagcggcggcattcctgtaatggtagaagccggccacgagcaggatttcaaaatcacaccggaacagctggatgctgcaatcacagacaaaaccaaggcgatcattctgaacaatccgtccaatcccactggtatggtgtataccaaagaagagcttcaggctttggcagacgtatgtgtcgcccgcgacatctatatcatcgccgatgaaatctactattgcttggtttatgacaacaggccctttaccagcattgcttcgctgggagacgacgtcaaagcgcatacgatcttggtcaatggtgtttccaaagcttatgccatgactggctggcgcatcggttacacggccgcgcctgccccggtcacaaaactgatcagcaattatctgagccattccaccgctgcgcccagtacgatctcccaggctgcggcagcggaagctttccgtggaagccaggaaagcgtcaagcggatgcacgcggctttcgaggcccgccgcaattacatggtggaacgcatgaatgcgatcgattccatcagctgtctcaaaccacagggtgcattttacgttatgatgaatctcgacggcgttatgggccgtacgatccgcggccatgccattggcagttcagcagacttcgccagtgcctttgtgcaggaagaaatggttgctactgttcctggctcagctttcggtgcagaccgctacgtccgttggtcctatgcaaccgatatggataccatccgtaaaggcatggatcgtttagaaacctttatcaaagatctgaaataaaaattctttcgcagcgggaagggggatgctgcccctttcccgttgtgtttgcgttcggcaattgttgacggagcgcgcggggctatgataaaatattaaaatcgtcatgtattttgtttgttattaaaaatacaaaaaatgaggttgaaagcacatgaaaaatatctatgaaaatccgctggcatcccgctatgccagtgacgaaatgctgcatctcttttctccggataagaaattctccacctggcgccggctctggatcgcgctggcgcgggcggaaaaggagttgggactgacccagatcaccgacgagatgatcgctgagatggaatctcacgtcaacgatatcaattatgacgtggcagcagcggaagagaaaaagctgcgtcatgacgtgatggcccatgtgcatgcttatggcgcacagtgtcccaaagcaaaaggcattattcatttaggtgccaccagctgttatgtgggcgataataccgatgtgattctgatgcgcgaaggactgcagctggtgcgcggaaaactggtgcaggttcttgcggcacttgggaaatttgccgatgaatacaaagccatgccgacgctgggcttcacccattttcaggctgcgcagatggtcactgtgggtaagcgtgcaacgctttggatgaatgagctgctgatggacctggaagaggtcaatttccgcatttccacactcaaactcctcggttccaaggggactaccggtacgcaggccagttttatggagctgtttgctggcgatacggacaaagtaaaacttttggagcagaaaattgccgctgaaatgggatttgacgctgtggttcctgtctccggccagacctattcccgcaaaatggacagcgccgtggtgaacacgttggctggtattgccgagagcgcttccaagtttgccacggacgtgcggctgctgtgccacttgaaagaagtggaagagccttttgaaaaagatcagatcggttcttctgctatgccttataaacgcaatcctatgcgctgcgagcgtatctgctctttggcgcgttatgtcattgccgatgcagcgaaccctgccatcaccgccgccacacagtggtttgaacggacactggacgattcggccaacaaacggatttctgtgccggaggcgtttttggcagtggatgccattttaaacatttatctcaacgtggcatccggtttgattgttcatccgaaggtgatcgagaagcacatcatggaagaactgccgttcatggcctcagaaaacatcctgatggatgccgtactccgcggcggggatcggcaggaactgcatgaggagatccgccggatgtccctggaagccggccggaatgtaaaggagctgggcttggccaacaacctaattgacttgattgcagccaatccgaaattcggtat

SEQ ID NO: 1228 - DNA, 32759 bp, Unknown
  16S sequences of unknown bacteria
tttgttgagttcgagccgatagaggggataggtaacataccctgaccgacgggttactttcaagcatttgataaagccgtttttttccagatagctgataagccttttatcgagattgttcacgtctataaaagcagtattttttataagcggcagatccaggttgacggtcagattggcgaaaggttctatataatctccctctttgcaccaaattcctatacaggtgtttccgtttatagcataggtatccgtcgtgaaggcaaattccatgtctttgtaaaacggtattgagaaagttttcattttgttgtcctcctttagtttttttcgagatgctcaataagttttaagtaacaattccaaagatccccgctttcattgtcgaggatatgcaggatttcttctttttccgtttcgctgatgctgccgtcgtccgcggctttgttttcccaaccgataaggaaattcgtacggatatattcataactgtcgtcgcaggcggcactatcatggaaatccacgttgtcaagtccataacctatgtctatgagcagagaatcgcgcaagtccatttcccaaaaaacctccttttttaaacgtcaaagtgtatgtcatatttatcgggatgtagttcgcggttttttaggatttcgcgaatgcgcatcaagatcttgccgagtttatttttgcctatgccgttacagacgccccactcggtgtcgtaccaggtattgccttcaataagttcggcatcgcccgtggcgagaagttgatctcccaggtctttatgctgcgtgaatttggcaagacagatttcatacatgatcgtttccttcgattcttcccagtcgtcgcagagcggaacacgcctgccgagccgttttgcttcggctgcggagagcttcgtaaactcttccattcgctccgggcatttcatggactggaacgccgcttcgttgttctcaaagaccatatcgaagtattcgatctttgtgttataaaaattgctgaggaagaaatatttgccacgaaattctttaattgctttcataattagttattctccatattttcaaagtcattgatgtgaataggctctcggcctgcaacaccgtactcgaagtacaaaccgttttcatcttcgaaaaggtcgtattctataacggatatctttccgcatttggtaacggcaacggtgatcttgtcatcgtctaccgccacgatattgaatacgacggtatcttctccgtcgaagaactgaaactctttgagataaaatttgtttttcatgtcgtacctcctcaatcgaccaacttataccaaacggaatactcgacttcgatttcgcgcgtttcgtaacttccgtttttctcaaattccacttcgcggatctcgtaatgcggacctttgaactcgccgtcgcgtccttgtatcgcatggcagttttttacgcaatcttcaaacacgcggatatacggattgcctttctggctgacgcaggcgataaccaggtctttgtcggtgataaatcctacaccggacattttgttgcttccaaacttattgaatttggaaatgctgtaaacaacttttttcattcgtttttacctccgaatttttattttttgccgttttcggcggtggcaaaggagcaagggacggtcaaagacatacgttctgtaagatatagtgcggaagtcaacggaggaaggaaaaattgccgcgtggggaaaaggaaattgaaagttttaagcgggaatttttccgccgtttacttccgcgaggaaccgtgctacgatagccacaacgaaaacaaaaaaaatcggagaagaaaaaagaagttgtcgcgcctcttgttcctccccgaaaactcattcttttgaaagcataaaaaaatgtctatgaaaacaaaaagagccgagcaaggattggccttgcccggctctgatggtagagagaggatatataaacattcttcttataaaagaaaatcagttttatttaatctttactttgctcccgtttggtggtataatgttttgtatataatataacatgtgcaaggctttataatcgaggacaagaagatgataaagacatctatacgattttttgacgatatacccgtaagagccgtttgggacgagcaatcctctaaatggtggttttgtgccgccgatattgcggaagcgttgacaaagagtaaaaacagccgttcttattggaacgcagtgaagagacgtaagcctgagttgtcgacaatttgtcgacaactgaaattgactgcaagcgacggaaaaaagtataagacggacgtcgttgatgaagacggggtaaatacgctgatagcgcttgttccgagtaaaaaaaccgtcgttttcaaaaaatggctgacggatatgggaacgacgatcgatgaaaagagcaagcaaaaggcatatgaactttttgagtctggcattattaaagatatagaggtcggcaccgtaaagggattgcagcagatccattcttatatctttggcggattgtatgatttttccggtcagatacgcacggtaaacatagcgaaagggggctttgcatttgctcctgccatgtatttgcatgaaaatcttttgaagatagagaagatgcctgaattcaccttggaaaatatcgtggagaaatatattgaaatgaacgtcgctcatccctttcgggagggtaacggccgaagcactcggatttggctggacttgatgctcaaaaagaatctcggtaaatgtaccgattggagcaaaataaataaaaaagactatttggaggcaatgcaaagaagtcctattgacggaagcgatatatttttacttataaagaacgctttgacttgcgagattgacgacagagagatttttatgaaggggatagactattcctactactacgaagaaattgaagaataaggacacaaaaaacaaaaaaatgaatcatgtattcttgacgaattaatttttttatcgagtcaagagtttttgttgatagatcgaaatgttagtaatgatggttcgacaataacttcgtatacgaatatcaaaaaacaacagtctgtacgcattaagttagataagacaaagatatattttatcgaagcaggcgggattcattccgaagcgcaatttcacagttttttaatgtcaatagatttagatccggatgaaatacaagctgagcatatcgttacgctgtcatttggcaacgctgccgaaaagtggtataagtttaattcgaataaaaatgacgtttcggtatttctcattacaacttccgaaagaatgttcgtttacaatgaaaaattcgaaattatagactcaattgatggaacccgtcttgaagttctgacaaaagttgatcaaaaatattttataaaaattatcaaaataggaacaaccgatacaatatcttttcaacatagttataagcctatttcgacaatttcacaaaccgtcggagcgaaccgaatatttttcaaaacctatatcgatattgtcggaaattacggtctaaattttatttcggcctcatcttcatcccttcatattcaaatatatgatgctgatttaagtttgattgaggaattgactggaaatagtctcgataatatatttgaacatacaggattatactttatcggtataaagttgatcggttcgggacccgtaagcgttacattttcaaaaagattgctgatggatagtgtatttcttggagcaaataatattcaaatttatcacagtttggaatataatttatatgcatttcaacctaccgctaccgcaaaatacacctttaccgcggatacgaactcgatctatgttgtagatgaaccgtcaagtttgaacgatttacaaaatactaaattaaatgcaggaaccatttattacgttaaaatctatttaagatcagggtatcgtaatttagaaataaaactaaaagattatcaaactatcggtttgaatacacctacgagcggcaaatttaatgcggacgaatatgtgttttatcaattaagtacagttatgcagggtaagtataaaattgaagctgtaaatgcacaaattcttttatttacttggggtttgagcccaatacatatcaataacgggaatgaatttacggcgctttccgaaggtgtgtattatttaaaactaatcggaggaaacggaaataattatactataaaatactattttgatccggtggaattacaggtaaatcatgcaagggtaatgatgcaagatacgttttatcaagtaaaaaacaatggtcaaaataaatttattataaagactttcggcgtagattcgatttctacgaaaattcgctataccacagatctggtaaattacactgattcgacaaacgtatcgggacatgcgacgttattcgtcaattgttctaaaaacgtattttatgtttttgtagatattacgggcagtggttttgtcggtgtttctgtggagtacgaagatccgattgaatatacgcagggaggataccaacttcgtgaatccgaaatatacgggataaattttttgcgcaaagaaacaaaaaactttgctttcaatattcctacggcagctctaaactgtgcatttgaaattcgtttaaagaaaaacctttttacaaattttcaaatggctgtagacggtaagttgattaaatgtgatgatttggaagaaggaagtgtagcacggtttatcatcgaaaccttacctggaaatcatgttatatctttgcgctatgattgtaatgaggatattgtcaatgaagattttgtcagtctggttgctatccgaaaagtcgaagaactcaatttagcgtttaatgaggtgaaaacaggaatcgccgtccgagacggtattcgcgccggatatgattattctatgtcaatcgttgtcaatggagagcttgttaaagatcatttcattatagattgtatttccaatgaatccaatatcaaagggaatatagtcataacggaagatatactgcatgcttataaaaatttacccttccatagagaagtgacttttcgggtaaattatgcttttgtaaactactatttaactgtttctacagaatatccatatcatttaagtgtggggcttatacaaaatgataatcagttggagtataatattccaatatatgattattatacaagagaattacttcataacgataccgatggtaatacattggctaggttcgatattaaaaatattgaagtcagcggaaaaaatgacgattggaaggttttagacaaaacgatatataattcagacccgcattataagggtgatatatcgttcgacctgttaaaattgaactacttcaaagatgtaccgataaaatgcattattacgctgacagatgatagcactgtcattatgtcgcaactagtgatacgttatcaaacgaatacatcgatcgaaaactttgaccccaataataaaaaggtattatatatagatgtttcggggttggattattctgataattatcgaatgtcttcagttactgtacctgaaagtgtgaaagtggtttgcgtaaaaggaaacggcaattcttataattttcatggttttgaatttttgggtgatacgactttcaacttatataatgtttcgattaccggacaatggagcggtgcgcctgctgctacggaaaaagatttaaccatcaatgttttgggagaggtctctttaaacggctgcgttggttattttggtaccatgcaagccatggggactccggcggtgaaagcgaagaatctgacgcttgaagtgcagttcggcgcagggctgaatttgaaaggcggcgagccgtttaattttgattacaacggaaatagagggacgcgcggttcaaatggcacgaacggtgcgaacggaacttcgggcagcaaaaacggcgaaaacggtaaacagggaggaactggcgcaaccggcgtaacgggggatataggcatttgcggagtcaaatgcgattatctgtatatagttgccgacggaaaattaaagatcgtaggcagtcagggctgtagaggcggttatggcggcgacggaggtacgggcggcaatggcggcgacggatacgctgtcggcggctggggtcaaacgagcggtaacggtggcaatggcggacgcggcggtatgggcggacgcggcggaacaggcggaacaggcggcgcgggcgtcgagtgtaaaagcattactggtatgaatagcaattgtaccattacaggcggaacaggtggtaatggcggttatggcggcaacggcggggctggcggcacaggcggttctggtgcaaaagcgccttggttcggacatgcaggtaacgacgggagtaatggggcgactggttccaagggaagcgatggttataaaggttctaccggaatagctatcaagtatgtataaatttttaacagagggagaacgatcgaatgctcgaattaaaagacattaaaaaaacgtaccaaagcaaaagggttgaggtagaggcgttaaaaggcatcaccttgaccctccccgaaaggggcatggtttttatcgtcggcaaatcgggaagcgggaagagcacgctgctcaacattttgggcggcttggacgttcccaccgcgggcgagttgttgatcgacggaaaatcgacaaaagcttttaaggcgggggattacgaccgttaccgtaatgaatatgtcggctttgtatttcaggaatacaatttaattgaaggattgaatgtaatagaaaacgtgagtatggcgctcgatttgcagggtgaaaaagactacggcgcggtggagcgcgagcttgcgcgcgtggaattgagcggctttgaaaagcggaacgtttccacattgtcgggcgggcagaaacagcgggtggcgatcgcgcgcgcgctcgtaaaacagccgaaaattttaattgccgacgagccgaccggtgcattggacagcgaaacgggagaaagcctgttcagattgctcaaagatatagcccgcgaccgattgatcgttgtagtttcgcatgacctggaatttgcaagacaatatgccgaccgaattatcgaattaaaggatggaaaagtaatcgccgatcaagaatcgagagcgcctatgtcttcggttaaggcgataaaaaaagatgttagagtgaaacgacgcggattaaacctcgccagagtattttgtctcgcgttaaagggtatgaaaaaaaatcctgtgcgttgcgccatctcgcttgttttatgtgcgttttcatttattttgctgggcatcagctttttgtcctcgcagtatgacgtgaacgaaacgatggcttattccctggaaaaatacgatcccgaggtgttactaagtagaaatagcttgtacacttatagcgaaatgcagcaactccgcggaacgtatcccggtcttgaatttaacgcggttttcggcgtcgacggtacggaaacaggaagaatcgtcgtaaccaaagaaaatgaaccagatttatattctgcttatgcttctcaaaatcgtcaggggtatttaacggaattttccactattatatgtaacggctacgagctggtcgaagggcggctgcccgaaaaaaacgacgaggtcgccattcccctgggaatgttttatgcgatgacagagtacggcggcgaaaatctggactgggggatcgttaagaatttcgacgatattttgggcaaatactttcgcgccccttatttacagatcgtcggcatcgtagatactaaaatcgatgcgaaatttgatattttaaaagattatacttatcaagaaatcatggagatcgaaagggaaaaagatagtacaggattgagaagtttgtttgatttatactgtatctatatggaagacagtacacgcagctgtgggtttgtaaaggagggttttttacctgaacaattgagctttgtgaatccggggcttagcactcgcgatggttacgggcttgcctatcaaacggtttatgacactagggagttcgattatatagccggtttttccgatttggcggataacgataaaataaatttatatttaaaagggaataaacaagatatcggcaaggatgagatcgtgcttccctgggcgctgttggatcatatacgaccgggtatttcatcagaagttcaggggaaattagattcggtcgttgatgattatgtggaagaaactgtcggtaaactttatgaagatcctgcgttttgtcaacgatttgataccgagcatgcttcaacgcaggatgtgaagatacaatatgctgcagcaatttgcaattacgatgaatattattatgaaaatccgtttggcaaatctggatatgaattgtcactgcccctacgggaaaaaatttttgatcggacagaaatatccttgcagctcaagaacatttcgccgacaggagagacgggatacaccaaaaaagtagttgggttttttcatgatactcctgaaacagtcaggctttattcaaatcgccatgataactatgctgttcttgctgataatgatattttaagtgtatacgaagcgaaaaagactgccaatatctattgtctcagtgtgaacgtcacaagcggaaacagcggagaagcgtttgtgtcaaagtataagagtcggccgaatagcgaatcggatgatccttttattacgggattttttagaggtgaagtcacaaaagatgtgcagcttgtcgacgaacatttttattatttcaaaacgatgggtttactgttcggcggcgttttggctggagtgtctgtcctgatgatgttcaactttataagcagcaacgtcagggatagaaagcgggagattggcattttgcgcgcgctgggaactactgccggcggagtctgtaaaattttcgcccttgaagcgcttatcttatcgacagtgacggcgatcttagcgagtatcttatcttatatcacgattatacaattaaatagtatttttatcgccgaagttattactccgatcgaaccgttacgatttaccggttggtttatcttattattgctcggggtaagtttattgatttctttggtttcatcgatcgttccgctttgtaggattatacgtatgcaaccggtagacgcaatcagggaataacagttacatgaagaaattattaaggaaaggcaagatcttccttaaaaattaaaattttattattttttaaaattgaaaaagattaatgtaaaaaattgaaaaagtgaaaagtaatttacaaatgaccataaactgtgaaccttgcttttacaagaatatttttgcttcctgcgctgacttgcatctacaaaaatggtgcgtcttccttgtttgaacgcaacttaatcaatctaattttcagttgattacaatttataaacaactgttatccctactacttcgaaaaaattacgaataagtgtaaataaaattattgcttgatcttcataacgtctaaagcaaatttacggcaaaacaaaaccatttgtccgaaaattgtaattgtaggttcggatttgtatggtttctgtccaccaaaatcgggcaaagtgtcgattatctgcccgaaaactacatatttttttggagtaaaagcctgttttagtagtcaaaatacaagtcaaacgggtctttactcaccgaaagcggagcggatttgctccgctttttcgtttataaaatcgctttggatatgggtataaacatcttgtgtcatgcggcttgtggaatggccgagcagatactgctttactttcgaggaaacgcccgcctcttccagccgtgtggcataggtatggcgcagaatatgggcggatacgttaaacccgagcgagagggaaatgcgtcgcagagccgagcggacgtaatcataagtaaagggaaacacgctcttttccgttccgttcgctttggcgatcaatgttaaggcttcatctggtatgggaacggatctcacgcccgcggcgcttttgggcgtatcctgttcgatacgcttgcccgcgataaaaacaacgtctttattgaccgacacggtttttttctcgcggtcaatgtcctcgtgcgtcagagcaagcgcctcgccgatccgcagtcctgtctgcaataaaaatacgaacaacgggcggaggggctgggtttcgatcgcttttacgaaatcggcttgctgctgtctggtaagtgcctctctgtattaacggcaaactataatctcctttttagtttgaaaggattatttaaacattcttttaacccaaattaggcacgacttttttacgtgaatcaaatattaataaagcaacgattgttgaaaaaaaactacgatttgtaaatatcctttgcaatgcatacaatactgtgctatagtgtgatcggggggatgaaatgaaataccaagcgttcaatccgtttcttccgagttgggaatatattccggacggagagccgcatatattcggaaacagagtgtatttatatggttctcacgacaaatttaatggcaacagtttttgcaaaaacgattatgtttgttggtcggcacctgtcgatgatttgtctgattggaaatatgaaggcgttatttggagtaaaaagcaggatcctcgtaaaaaagggaatatgtatgcaccagatgtatgccgatctccggatgggaagttctatctctattatgcctttgctcccggaattacgcgcaaaagttggtcaatccgtgtagcagttgctgattcccctgtggggccattccgataccacggagaagtggatctgtatccttggataaaagaatatctcccttttgacccagccgtatacgtggaggatggacgggtatggttgtattacgggtcaggaatgttttttcccgtgttgggtatatcgaaaaggaacattaaaggcggggcagttattgaactcgatccgagagacatgaaaactccaatcagatcacccaaattaactgttacatcgaacaaaagcagtaaattggcagagcatgctttttttgaagcgtcatcggtcagaaagataaaggataaatattattttatatattcttcacggctcggccatgaattgtgttatgcaacgagcgataagcctgacggcgactggaaatatggaggtacaattgtcagtaacggagacataggattgaaaaaccataaaaatgtattgtcagcctctaatcatatgggtaatattcatggtagtttattagaaattaacaatacatgctttatattttatcatcgccatactaaccgtgcatgtttttcgaggcaagcgtgtgcagaagagattcaaatcgaaaaggacggttcgattcagcaggtggaaatgacaagttgtggattgaacggaaaaccgctcgaggggcggggaacatatgaggcgcggattgcttgtaatctatattcaagaaacggggttcatttttaccgcaatattattaaaaagaagaaaggtatatatccttattttacacagacaggaacagacagagaaagcgaccccgatcaatatattgctaatttttgcaacggaacaacggctggttttaaatatttcgatttaaaaggcatcgatcggatttccgtgactgtcaaaggaaatgcgcgcggtagatttgtcgttcgcataaaagaagacgataaacccgtgtgtataattcctgtttttgcaacagaatgcctcgaaaatttttgcggggagtggaagggcggtaacatcgttgcggcgttgtattttacttatgaaggcaaagggaaatgtgatttttacgcttttacattcggttagtgtctgatttataatttgtcaaaagccattgcaatgcaaacatcagcgtgttataatgtaaaaaaatactacggcaggatcctgccgtttgcgcttaagcgcaaacggagatatttaatcgatatgttttttacttttgtatatgattacatttttattttacaaattgcagcggtgagcctctcgcttttgatcgtattttatccgtttcaaaagacgtttcgctcgatcgcgtttgcggcagcgcaatttgccgctctgtttgcactcggaacagtattaaattggggactgtttgaactatcttcggtttggacatttcttggcgggatcaatttccatatttcttggctgttggtaatcattatttacttattattcaatcgcgtatatataatgagccgtatgatcatgggcgctgtcctttatacgtcggtgattgccgttaccgatttgggaagactcgttatgaatgttttacccgtgggcacggactggtcgttcgtaaatattcttttttatctgttgatcataggattcagtttgcttatccgccgttatacgcttacgcgatatagtgacattccggtgttttccgtggcaatgatcatgctcggcgctatttgttcttcgtcgctcatcattggaaaaacgattttaaatgtaaagatcggaggcatcagtcaagacactttctttatatttacgctcgccgtaatttatattttgattgtttcaagttatatgatcatatactttcattgcaagggtagaaaagaagtcattgaattacaggtcaaaaataaattgttggaggcagataaacagatgctggcggtttctgaacaggcaatttcggagatgcggcagataaagcatgatattaagaatcaacttaaagtgattgaactgatgctcgaacaaaagcagtacggtgcgcttggacggtatttttcatctatgaacgaaagttttttgaaagaaagcggcagttcgttcatcgattgcggaaacgagtttattaattccgtcatcaatatggaaattctcaaagcgaacaattatggcattcaacttgtaacgagaatcaatgttccttcggaacttccgtttgaaaagagcgacctttgcagaattctggtgaatttgttggataacgctatagaaggggtattgcgggcagatagcaaagattacctcgtggattgcaagattgctcggcaggccggtttcttatatgtcagcgttcagaaccacatcagggacgactacgacagggaccgtcttcttgaaatgaatactgaaaaagaggatgccgataatcacgggttcggacacaggatcgtaaaaagaattgtggaaaaatataacggcatcgtaaaatataaagttgaggataacgagtttatcgcagaaatgatgcttgatttcacaagtatggaggttaaataagttggataaagcggtttcgttcgcggtatgcgacgatgacgaaattatttgcgaagccatttgcaacaggatcgacaaattacttgctaaattcgggctgagcgcgtccattgacaaatatgtttctcccgttgcgctatataaaaacatcgaaggcgggcaaagaaagtacgatgctctgtttttggatatcgatatgcccaaactaaacggcatcgaccttgcgaaagcgataaaaaaggcggaggaagcgccggatattatttttgtttcaaaccgcgaagaaatggtgttcgataccttttcggtgcgtccgttcggatttgtgcggaaaaataattttacaaacgatctgatcgatactttgcgttcttatgtcaatacgcgaatgaacaaaaacgcttatatcgggatcaagacgaacaataactccgttgtaagaaaacttaaggtaagcgacatcgtctatatcgaaagtttccgttataagcaatatatctatatggcggataacgaagagatcgaatgcaggatgtctatggaagaatttgagaaaaaacttgcaaactacgatatcgtgcggatgtataagggatacctggtcaatttaaagtatgtacagaaaatagaaagaacgggggttttggtcaattataagggcggggtgaacataaatgtgagcagagacaaagttcaggagttaaaagcgatttatctcaattatttacgaaaaatgggcaccgtactttttaacggagagtcgtaaaaggagcagacggaagtaccgcgttcgataagacgcggtacttccgtttttttgcaatttgttcaaataaaatgctgatttgtactttatcgcgcgcaatgtgggcgattaaatgcaggttgtgcgtgtgctattgctattcgggttttttgattttataattaagtcgttaaaggcggacggtagtgttagccgataacgaattataaacaggagggaaacttaatggcaaaaatcagcagggtcggcaagaaaagggcgtttcgcgcgtttgcttgcgctacaatgcttgccctcggtctgtcgtgcctttcctcgccgatcttgagtgtcggggcggaagttatgggggctaagggcatgaccaagtactacgcggattatgattctttggaagaaactctttcggctgccgagcagttgactgaggataccgcggcggagggcgatgttctgttaaagaatcagaataaagctcttcctatgcgcggcaacgaatggatcagcgttttcggcgttagtgcggacagccttatcggcgcggctcccaccggcggccagtcgaccgcatcggccggcggagacaaggtcgcggatgttttggcggatgcgggatttaaggtaaatccgacgttgaaaaatttctacgacaaccaaagcgccactatagggcaggaagaatatgctttcaacggaaaagtaacgagttcgttcagtatgtatagcgacgcggctgtcgtcgtgcttgcgagaacgggcggcgaaggaagcgatgcgaagcgcgtcacgagcgaggaggccggtaccaatcttctggacgaaaaggacaccgcgtcccacgtagcgcttgcggagaaagacggcaagacgtataagcattatctcatgcttaccgacagcgagcgcgcgcttattaaaatggtagaggaaaaatttgataaggtggtcgtcgtactcaatacgtccaatgccatggaaatagaggaattgcgggacgacgagaatatcgatgcgatcatcaatatcgacagacccggagaaggcgggctcgcagcactcggtaagattttaaaaggcgacatcaatccctccggcggactggtcgacgaatggtataccgactttactgcggatcctacctggtacaacttcggtaacaacgatcagaaggggtcgaagggcgcaggttcgaatacatacatgaacgaagcgggttcttcggcaggaaccactgagggcgccgacggcacgacaaccgacgttatcagcgataccgaaggattccacggcatcgactatgaagagggtatttatttaggttataagtattatgaaacttattaccatgatatgtatcagatcgatgcggacgccgcgcagcagtggtgggaagaaaacgtcacttatgcgttcggctacggtttaagctatacgactttttcttttaaatccaacggaatttacaccgattccgcgcttaaaaataaactgacggcggcggatcaaaaaacgatcgcctcccagttacagtcgacctatcagaaggctgcggcggtcgacacgttatatttgcccgtaacggtaacgaacacgggcagcgtcgcgggtaaaaaaacggtgcaagtctatgtcagcgcgccttacgaaacggatagcgttgtcgaaaaagcgtctgtgtccctcgtgggatttgcaaagaccggcattcttgatcccggcgaatcgcagacggtcgtcgtctcggtaaacgtgcaggatatggcgtcgtggtactcctattatgcgcagagcgacaaagtgaccaaaggtgcttacataatggagagcggcgaatatactctccgtatcatggaagacagtcactacgattgctctacggttgaaaaagacggcaaatattatgttacggacagcgaaggggtcgaacgtgcagaatgttatgcggaagagtccttcacgcttgaacaggatattgccctcgaaaaggacgattattcaggcttacaggtttccagtctgtttacggacggggtaaacaacaacggcgagggtatggacaaagataccgctgtggatgaaagccatttcggcaatatccgcacgaaagccatgatgaaggaccaggcgtccggcatgacgaccatgacgagaaacgcaagcgtttcggctaccgatccttccgttgtcgtaaagaacgacaaaaatgttgcttccgcctcgatagtgaattatacgggagtatccgttcccacgaaaccttccgaagtgaaatccacagtgaacgggtttgatctttctttccctaaggctcccacggcagccgatcttacgtttaaggataacgtgctcgataactggtcgtattgggataactatgcggtcagcagtacttatacaggcgcaaacgatgcgacgaagacgtacaacaagtactatgagaatgacgatgataaaggctatgtctggtcgcatacctctgttcccacggattggtcgcaggcgaagggcaccttgggcgagtatacgaacgcgggtgcgaacggcgataaaggagcgcagaaaattaaattctacgcatcttcgtcttcggtcaatacgatcaagttttccgatatggcgggcgcggactataacgacgagaaatggacggagttcctcaaccaactcacctacgatgagttgtgtcaggttaatacgtactgcggttacggtacggtcaatatcgatagcgtcggaaagaaagtaaccgtcgacagagacggccccaacagcatcaatcaggaatttcaggcatgcgcggaaagtttgcaggccgcaacctggaacaccgaacttgcggaaaaacgcggcataatcatcggcaatatcgcgctcatcacgggattccagggctggtatgctccgggcgcggatattcatcgttctccgttctctgggcgcaataacgaatatttctcgcaggacggtatcctcggcgggtatatcggtgccgcgctcacgcagggcgttcagtctaagggtattatctgctatgcgaaacatactctcatgaacgatcaggaaacggatagaggctgtctgttcacctggtgcgacgagcaggcgatgagagaaaattacatgaagaacttccagatgattttccaggaaggcggatctcaggcaggtatgaccgcttacggaagattggcggggaaggcgaacaccaataacacgaatctttcggtcgaattatatcagaacgaatggggcagtcatgcttatttcgtaactgacggctatatcggctggaatcagagaacgaaccccgatattatggtcagagcaggcgcgcagaccattctcacgacggggaacaccgaatatctgtccggacagacggatccgacgacgggcgaacagccgaccggcggtttctataaacagggcgaaacactcccggacggcaaaacggcagagacggaaggcgtttacatcgtgcaaaagggcgaagacgggaaaacgtattacgaaatctcctatacgcagtggtattgcgtgagagaaatggcgcataacgtgctctatcaggttgcaaactctgcaggtcagttcaacggctacggcgatctggaacttgataacggtaaattggaggctacggaaagtctcagcgtgtcgaacgtaagcgtttcgatcgaaagcaaacttgataaagattccactgtcagatacagtctgacgggagcgcttcccgaagggctcacgttcgacgaaaacacgggaacgatcagtggtacgccgaaggaatcgggaacgtttaatcttacggtaaattatgtgatcgacgggtggatcaacaagagcgcgacttacgtacttacggtagataccgcaattcagatcacggcggaaagcagcaactttacggaggccgccgtgggaacagaattttacgcggagtttacttccgacgtttatacgagcgcggaatacaattctatcacctattctttgaaggagggaagttctctgcccgatgggctcacgctcaatgcggacggaacgatcacgggatcgcccgaaaaggctggaacgtatactttcaccgttgtgcttactgcgaaaaatgaggaaagcggtacgaatcctgccgcaacaccgtttgccgaaggcggcgacaaaggcgacggcggtaaaggcgacggtggcaaaggcgacggcggcaataaggataaaacggcagaaactacgtttgtcattgttgtcaaaggtgaaacgacgggcggtgatacggacatcacgatcgaagatctgaatgacaagataagcgatctcgaatccaccatcaaagacctgcaaaactcgctggaagggaatacgagcagcggttgcggttcgtccgtgaccggcggcgcggcgcttgtcggcgcggtcgttctcttaggcgcgacgatttgtatggtagtatccagaaaaaagaaaaattaaagttcaacgtttgaacagcgggaaaccccgattatagcgtaagccgtaatcgggggaatgctgttattttacaaatttgacaggaggcttactatgaacagagtattgaaaggcctgattagtaaaacattcttatgtgcgttgctggcggcattgctcgccatgagttttgttgcgtgcagcggcaacgatgtgaaaaaatacacggtaaaattcgaaacgaacggcggaagcgatattgcttcgcaacaggtcgaagagggggcgtttgctgtgcagcccgatgatccgaccaaaaccgattatatatttaacggttggtatgaagatgccgatttgagcaaaactttcgatttcgaaacgcaagcgattactgcagatacgactatatatgcaggatggacctccgaatcggaagcgacgtccgcaacggccacattctactggaattacgaaggcgctcccgataacggaatctattcgtccaaaatatttgtgagcggagggcggttgacgaaaccgaccaatcccactcgcagcggatatactttcgaggcatggtatctggataaggaatattccgaaaaattcgtaaacaacagcgtatacagcggcaatctcagcctgtatgcccgctggatgaaacaatatacgttcgaagcggaggatacccaacttaccgggctggatcccgacacggatctgaccgccaatacggaaggcaataaaaagggcgtcggtttttccagcaatttcagcgggaccggtctgatcggcaacgacagcgccgccagcaacggaaaggcagttcacggtctgtattatgaaggcgcttatctcgattttgaaattacctcggataaagcggaaaagggcgcttctctttctctgcgcatatcctccgaatacagggctgtaacgctcacccaggattcttttcaggtgatggtgaacggcaccgttctcgcatataaaaccggcgatatcgaaatggattggggcgaagattatatggacggcgtatgggacagcggttctgatcatcgttatgttacagtcgtcatcaacaatattgatctgaagggcggcgaaaatttgatccgattgtacgtcaacaacgcaaacggcagaccggacggcactgtcgccgcaatggcccctatcgtagactgcatttatatcaatagttcttcggctttgaaaatgactgtttatgaaaacaaataacggtgacggaatgaaaaacaatttgggaaaagtaaaacatatatttgcggaaaggggaatcggtttttacttgaccgtgcctgcgatcgtctttgcggttttggcgctcgttttttacaggcagaacggcgttacggaattcaatcccgaactgaacggctcggcgatcgtgtgtctgatcgtcggaatagccctttccgtggtgagccttgcggcggatatcattccttacaaatggatatccgccgcggcaaagcccgttaggtatgtggcatatctggtcgaactgtacgcttttttgatgttcgtattttcgcaggtgacgtacattgcaaacgtattagtgagcatcgacggcaacactttcacagccggatttatcttgacggcagtcttttttgtcgcggcggcgattttgactcttgtatccgcgtgcttgaacgctttgcacccgtggacaaaaaacaaagcgaggtaaaagcatgaagaagaatttgttcaacagggtactgtgggaatgcctcgccgtatgtatggccagcctcctcgttttaatcacgggaatatatgagattgccctgagccagagtgccgcgatcaacgacgcgctgaatatttctggttcggaaattgattattccgacgaccctgcatatcagtatttcaagagcgattataaagataaggattacgcggagttgaccgaatattttcagagcgttgcagaacagatcgaaggcgaaggcatcgttcttttgaaaaacgaaaacgacgcgttgccgctctccgaaaaggaaaaggtcagctgtatgttgtccggttccaacaagtttaactacggttcatcgggatcgtccgcgtcgaatacggcctcttataaagatttgaaacaggcgctcacagacgtcggactggaagtgaaccagactatgtggaatttctatcaaacctcttcttcgagaaagaagatcggggatacttatcttatcaacgaaacatcgtacgacgcaattccttccgcggcaaaaaccagtcttgaagattacggcacggtcatcgtaacgatcgcccgcagcagcggggaaggttcggatatttccgccacgcgaagcgacggcgaggacggcagttatctttctttgagcgaggaagagatttcagtcctgcaagggctgacaatgttgaaaaaccagggtaaaatcgaaaagatcgttgttttgctcaattcttcggcaaccgttcaactcgattttctcagccgaaacgggatcgatgtggatgcctgtctttgggtcggaaacgtcggttcggcaggtatcaatgcggttgccaaagtcttgacgggaaagatcgttccgtcgggcaaactatccgatacttacgcgaaagataatttttcttcgcctgcggcgatgcaactttcctacaacagcggcaaatcttttgcgcagacctattcgaattacagcgagatgggacttaattcgacccagatgtattacggcatatacagcgaaggtatttacgtcggatatcggtattatgaaacgagatacaccgattatgttacgggaaggtcgaatacgggcgattaccgctattccgacgacgtggcgtatccgttcgggtacggaatatcatacaccgaatttgcctattccgatttttccgtaactgaaaacgaggacggaaagagttatgacgttacggtgacggtgaccaacacgggcgatacatattccggaaaagaagccgtacaggtctacctgcaaaagccctattcggaatacgatatcgaacacggagtggagaaggcagcggtcgaacttgtcggctacgcgaagacggaggaactcgcgcccggagagagcagcgaacccgtcacgatcaacgtgaaaaaggaattgttcaaaagttatgacgcgaactatgccaagacgtatatcgtggacgagggcgattattatctgaccgttgcgaacggagcgcatgaggctgcgaataatattctcgcagcacaagggaaaactcccgaaaataccgatcagagaatggacgctgcgggaaattcagttcttgcgggcaagatcgcggtcaatgcttttgacgataaaacttattccgtttcctccgaaacgggagcgtcgatcacaaatcaactcgatgacgccgatctgaataaatacgagggcagcaacacaaaagtgacttatgtatcccgaaacgattggcagggcactatgccgaaagcgagtatatccttgaacgttaccgcaaaaatgaaagaggatctgcgcagcaataaagatatcgaaacggatcccgaagcggaaatgccctcttacggagcaaataacggcctcaccttagcgatgcttaggggcaaagattatgacaatgcgttatggcaagatcttttggatcagatgacgtttggagaacagtcgtacctgatctccaacgggcaatacgctacggtcatggtcgaatccgtctgcaagccggatacgcgcgaggcggacggacccaccggttacggtaaatcgcagggcagtctgtcgttccccagcgaggggatatgggcctcctcttttaataacgaactgattgaaaaagtaggcgactgccttgcggaagacgctctgtatcacggcttgtccggcttatatgccaacgccatcaatattcacagaatgccgttcggcggaagatcgcatgagtatttttccgaagacccgtatcttaccgcaatagcggcggtgtatgagatacagggaatgcaggcaaaaggaatcatcgcgaacgtcaaacattatgcgtttaacgacgaagaggcggcaagaaacggtatcggcgtctggctgaacgagcaggaggctcgcgagatcatgctgcttccctttgaatatgcgctatcctctgcggaaggcatgggcgatgctgccgctgtcatgagcgggttcaaccgcgcggggaccgactgggtaggcgcggatcaagaattattggacatcatgcgcgaggaatggggattcgacggttactgtattaccgatatggcgtcttccaacggagcgtcgtatatgacctatcaggacggcgtgacgggcggaacagacgttttcctgggaagcggttcgcaaacagccttgaacgacttccggaagaatgcgacatattgtctggcaatgcgcgaggcatcacacaggattctgtattccgtttgcaattacagcgctgctatgaacggtatcggtcccgatacaaaagttttggcggcaagttggtggtggaaagatacgctcatagccgtaatcagcgtcagcgcggtccttgcggccggtttcggtacaatgtatgcgatcagccttataaaagagcgcaaaaagaaaatagatatcgaataagcattaaaagggcgctcttgttagttttacaggagcgctttgttccgtatctgtaaagcggaacgaataggaaaggggcgggatatggaaaatatacgtttaaaaagatttaccgcggtagttctggcgtctttctttgctgtatttttactcgttgttccgtttttgacgatttttatcgtaggcacagcgacggcgccgcaatacgcgcagacctattacggcgaattgtcgaaaatgtatgaaagactgcaagaaaccgagaataaaaaaatcgtggtcataggcaattcgaatgttgcgttcggcgtcgattcggcgctcttcgagcgcttgctcggccaagcaggcttggactttactgtatgtaatatgggattatacggtgcgttgggaacgaaaatgatgatggagatcgccgatgcttatatcggcgaaggagatatcgtcatttttacgccggaaatagattcgcagtcgctctctctgtatttttccgccgaagaggcatggatggcgctcgattccgatttgagcatgttcggtgaattttccgcgcagacgaaagggaatctggtaggcagttttgcttcttacgcttcgaaaaagtaccgattgtggcaaagcggtctgcctgcgcagccgagcggtgtgtatgcgcaggcatcgttcgacgaacactgcgaccttaaaaatttcgggcggccgttcaatatgcttgcggacagtgtagacatgaacaaccctatttctttggacgtttctttatatcgggaagaatttatcgcatatgtaaacgagttttttaaggaaatccataaacgcggcgcctcgatgtattattcttttccgccgatgaaccgagccgcggtgaccgaaaacagtttggcggggatatctgaattttacgactttgtgtgcgatcgttttgattttcccgtgatcagcgatatcgaagattatattatggataaagaatggtttttcgattccaattaccatctgaacgacagcggcatggcggtgcgtaccgttcaactcgtaaacgacttaaaaaatcaactcggcaatacgaccaaaacggaatacgtattaccccaaaagcccgtaaaaccgcaggaagacatcgagggcgagggggataacagttgtgcggaatatttcacttaccaacaaaacggaaattattatgccgtaacgggacttaccccggagggggcgcagaagaaacatttgatcgttccctaccaagtaaacggattgtatgtcaaatctttttcggcctcggtattttcagggaacgaaatcgttgaaagtataacgattcagggaaatatccgttcggtgtccgataacagtttcaaaggctgcacgaatttgaaaaaaatcgtattgaaacataccgaaccgtcgcaaattacggtcggctacgggttgctgaacggtacttcttcggcgatatatgtttcggaatcgtcagtgagcgcatttaaaaacaattatttttgggggcactatgcggaaaatatctacggaacggaatcattcggttaaaattctgtttcggttcattgtgttgttggccgcagtcgtggtactattcacgggatgtacggactcttccgaaaaaaaagatatgttcgtcagggtcagtatcgtcgaaagcgtattttttacggcggaaaatccttccggcacggtcgaacgcggcggcgactataccgtgcgtttgaaaatgttgaaaggatacgagcctctgtcttgcgatcatgcgtcgttcagcatagataagaggggggacggagaatatgagttgactctgcggaatatcgagcgccccgcaagggtaactttgttttcgaaaaaaacggaaaaagaacccgccgaaaatccggcaacggaatgtgaaatattatttgtttataacgacggcacgtcggaatgtgaaactgtaaagtacgaactttccgaacatatccgtccgaatacgcgcaacgggagcgggatttcgcgaaagggatacactcttataggctggaatacaaaggcagacggctcgggcgagcacgtagggctgggcagccgatatacggttgcgcaaggtcagaaggccgttttgtacggagagtgggtcaagtgtcagccggaaagcgattttttgtacagcgtgcgggcagacggtaccttaagtcttacaggatataaggggacgggagatcaggagccgtttgcaattccgtccgaaatcgctggaaaaacggtctctgatatcggctattcttttacgacaaacattccctgcggcgagatatccgcaaaaacgctgattctgccggatacggtcaagacagtatccgattacgctttcaaaaattcacgcttcgaagaaatttactttttcgacaatctcgaagcggtgggcagtaaatcattttcgcagaagatcaaaacatatcacgtcaatgcggcgaaggcgccatgtttgcttaaatccaattataacgcgaggtttgcggacaatattgatattttgatcgtaaacaaagacaaaagaaaattgctgttttttgcaggatgcagttttgcttacgggctcgacagtgcggcggtggaagaggctttcgggggcgaatacgtcgttgccaatttaggcatcaacggtgaattcgacgcgctgtttcaactcgaatgtatattgccttacatcggcgtaggcgacgtattagtccatgctcccgaacaaatgagcccttatcagtttttggcttccatgcgtttggacggccgcgtattcgccatggtagaggggaattacgatttgctggcatcggtcgacttttcctattcggacagcgtgttcgaggcgtatatgatgtataataacctgcgagcgggtcagccgccctgtaaatattcggacgatgcggggctgttcaataaatacggggattactccttagaacgtccgtacgacgaggctacggaagtagaaagagatgttgcttacagcgaatcttacatatatgatacgggattgctgacggaagaaaatatcagccgcttggcttccgtctatgaaaagttcgaagatctgggggcgcgcgtatgcgtgtcgtacgcgccaatgaatcgtcattcggcggaatctgcgcaaatttttgaaaaggcggcgaattttgaggacgagttggtgcgcttgctctcgccctatggctgctttgtgatttcggagatatccgattacattttcgacggacgatatttttatgattccgattatcacctgaacgacctcggcgtgctgttgagaacggaacggctgatcgacgatttgtttgctgcgggtatcggaggggaatgatgaatagcgtgtttttacgatctccgctgttgattgcattgatagcggcagcgcttgcaatcaccgctgtttcgcttatctggcgccagtcggaaaaatcgggtatgtgcataagtttcacgatcgttgcaggcgctttggcatatgcgctcgtcttgggggcgagtctttcggaatgcgcggcagtcagcatgatcttttttctgctgaatctcgtgaggatcatgaaaagagggggaaagggtcgatgaatttcaactccttgtcctttttattgtttttgcctttggtcgtatgcctgtattggtgcctgccgcataaattccgttggatactgctgctgatcgcgtcgtactatttttatatgtgctggaacgtaaaactgatttttttgattttgacaacgacggcggtttcttacgtttcgggactctgtatggagcgtgcgtcgaatatccgcataaaaaagttgatgctcggcatcacgctttttgtttgcctcggtctgctcgttttctttaaatatgcggattttttgttgcaaagtattgtcggcgcgctgaattttttcggcgcggatattgtcggtatttccctcaatattttacttcccgtcggcatatcgttttatacgtttcagacactttcgtatgttatcgatgtttatcgggggaaaatccgcgcggaaaggcatttcggatattttgccctcttcgtttcatattttccccagttggtggcgggtccgatcgaacggcctgaaaatttgcttccgcagttgaaaagtccgcagaatttagacggggagaacgtgaaaacagggttgaagtttcttgtttcgggttttgtccgaaaatgtgtgatcgctgatttttgcgggatatatgtagataaggtttacgcaaatctcgcttcaagcaatgctctcgccgtttttatcgcttctgggttgtttctcatccagatgtataatgattttgcgggttattcagagatagcaatgggggctgcaaggctgatgggcgtaaaactcacgcgtaatttcaacgagcctttgcgttcaaaaagttatacggaatttttccgtcggtggcatattacgctcaaccaatggtttacggattatgtatatattccgctgggaggcagcaggaaaggaaaattgagaaagatcgtcaatacgttggtcgtcttttttctgtgcggtctatggcacggggcggattggacgtacgtattatggggattaacggccgggatctttgtctgcgcggaaagtgttttgaaaaaacccgccttaaaattgtgcggaaaactgcatatccgtcccgattcgggcattttgccattgctgcgctggggtatcgttatggtattgttcagtttgtctgcgatactgttccgcgcacagagtataagcgagatcattacggcgttcaatcgaatatttacggcgaacggattcggaacgggttactggtcggaatgcgccgaacaactcggactgaatgcgggaaaacttttattgctgctcctttcactttccgtaatgattctgttgccgaaattgaccgaatgcaatcacgcgctgtttcttggagagaaaagagttttgatatccgaaaccacaggagcgatgttcttcggaatattttgtatcgctttttgttggcttgcgcttctctcacagacagacgcgagcggatttcaatattttcagttttaaggagaaaaaatgagaataccgaaacataagtcggagcaatgtaataaaaatttatacgactatctgcgttcttatgcagaaatagatgcggccaggccgtatatggtcacggaacagggaacgacgacgtacggcgaggcgttggaaacagtggaaagtcttgcggcgttttttatgtcgcaaggattaaaaaaaggcagtttggtcgcattgcgtgcgacgcgtaatcccgatacgatattgttgacgatcgcgctgggatgtttcggagccgttaccgttatgacggatcctcatgtaaaggcgagggattatgtggcgcagacaggtgtggatatccgaccggatttttacttgacgaatgaagatttttccgaagacatcagtgccggcggagcctggaaactgatcggggaacatagtaaaagcgatgtggatctgcgtcaaaaattattaggacggaaagattttgtgcgtgccgccgcaaaacaaacgaaacccgacgacccttttatgatcatatttacttccggttcgacgggaaaggcaaaggctgtattgctcagccataaaaactgtattgcaaaccctgtggatgccatgcctctttttgaagaatgcgaaaaagacagggcgatcgcattgcttccgttcaatcatgtattcggctttgcggtcgccgcctgcgcaactttttgcggacatggtatcgtgtttccgacggatacgaatatagatcgggtgctttggtgtatcgaaaaattcaaaataacttgtatctatgccgtccctacatttttcatggaattgttgcgcgacgggcggcatacgcgctacgatttatcgtcgctccgtcttggcttgatggcgggagcgcctttcaccgcagagcagatgagatatatagaggggcaactgggattacggctgatgcccggttacggcatgagcgaatgcgtcggtatcagcacgtgcagatacgccgattcggtagaagagcgctctgcaggagtggggcggctgtatcccatgaccgaagcaagattgacggatgaggaaggaaatattctgccgacggggcaggagggtgaagtatgcgtgcgcggaatgacgctgatgttgggatattataacgatgaaagcgcaactcgcgaagtgatagacaaagagggttggatgcatacaggggatctgggatatttcgactgcaaaggcatcttacatatcagcgggagaaaaaaagagatcattatacgcaacggaaataatttatccgcagtagagatcgaaaagaagatatgttctcttccgcatgtttatatggcggcggtggtgggagtgtcggacgaaaactgcggagagattccttgcgcggcgatcgtcttggaaaaaggttgttcattgaccgtggaaaggataacggaacttgtaacgagcgtcctgaataaactcgaaatgcctgaaaaaatcataattcttccgagcattcctcttaccggttcgggtaaaatcgataaacaggcgttaaaagacctttttaaaaatgacgaaatatcgagtaaaagcaagatgtgattaccttttgttttaaaaaatcgaccatatgtggcaggcatcttccttttattttgtctgcatgatataatttaaatcataaattatataaccgagcgtacgaggagaaaaaatgaagacggaaaaaagtatattcgaaaagggcatactgcgtacgaaagtgaagacggcgaacgtgaaacccgtggaggcaatgatcggttatctgatcgggccgttttgcgggatgctggcgaactgcctgttcggtacgtatctcgtggagtatttccgcaaggtattgtttgcgcaggaactcgcggcggggaacacggggatcgaaacgtttctgacgttgtttccgatcctttccgcggtgctgatcgtggcagggaaccttgtcgcgggtcagatcatagaacggacgcgcacgcgtgcggggaaagcgcgtccgtacatactgctctcgtcggtgacggtagccgttgcgagcgtgctgatgtttatccagcccgtagaaaatgcggtattcaagatggtatggctggcagtggcgtacaacctgttctatgcggtggcgtttccgctgtacaacacggcaaacagcgcattggttcctatgtctacgcggaacggcaaacagcgcggctttctggcgtcgctggtgaacatggcgctgttgggcgggtcgggcgcgggctctatcgtgatgccgatgatcattttggcctttgcgaacgggtttcccggtcccgcggaaggattgccctcctcgaacggatatctcgttttgtttatcgcgatcggagtaatcacgtttctgggttgcatattgcagtactattttacgcgcgagagggtgactgaggaaagcataacgagtcttgccgaaacggagaaagtgaaaggtccgacgctgggaaagcaggcgaaagcgatatttggcgaccggtttttcgttacggcgatcatattctatctattgttccagttatcgggcggaatcaagaacggatccatgatgtcgtttacgaataacataaagttcgcgggattagagcctgcgttcgcgatgtcgatcttaggcatagtcggcgcggtgccgatggccgcggcgatcctgttcgtgtcgccgttgtgtaacaaattcgggaagaaggcggtcgtgttgacgggcatgacgctcggcgcggcgggcggcgtgctcgcggggatattttacgataattttatcatggtcgcggtgggcgtggcggtaaaatgtctgggatccgcgcccgcgggatatatgatcctggcgatgcttgcggactgtctggatcatatggaggcgaaaaacggcttccgctgcgacggtttggcgatgtcggtatacagttcaatcatgatcgcgtcggtgccgctggcgacgggcatcataagcggtgtgttgggcgcgttcggggacgcgatcggatcggttgtatcgtatatctggatagaaacgatcgcgtacgcgctggcggcgctggtcatgctctttttcggcgtggagaaatatctcgtcaaagaccgcgaaacggtgctagcgcgacaaaggtccgaggccgaggcggccggcatcgagtgggtggagccggaagagcgtcttcgtcgggaagaggcggaagcggaccgtatggcggaggaggcccgcatcgcggacttgaaagcgtattgcgaaaagaaaggtttggactttgctgcggaggaagcgaaatatcaggaaaaacgccgcaggaaagcaaaaaaataaagagcggggcgagcggaaatgaacaaatccgaaatcataaaaaagatgacgatcgaagaaaaagcgtcgtttctgtccgggcgggatttctggtctacgacggaatacgagaaatacggcataccgtcgatgtttctgtcggacgggccgcacggcgtgcggaagcaagcgtcggcgagcgaccatctgggtttgaacgcgagcatcgcagcgacctgttatcccactgcgtctgcgatggcgaacagttggaatacggcgctgggcgagcgtttgggcgaaagactcggcgaggaagccgcgtcgcagcgggtgaacgtgctgctgggaccagggctgaatatcaagcgaaatccgctgtgcggcagaaatttcgaatacttttcggaagacccttaccaggcgggcaagttggcggcggcatatatccgcggcatacagaaaaacggcatctccgcgtgcccgaaacactttgccgcgaacaatcaggaagagcgccgcatggtcatcgattcggtggttgacgaacgtaccctgcgggagatatatcttaccggtttcgagattgcggtcaaagagggcgagccgaaaacgatcatgtcgtcgtacaaccgagtcaacggcacgcacgccaacgaaaacgaacatctgttgcgggagatcctgcgggacgaatggggttacggcggcgtggtggtgagcgactgggcaggcagcaacgaccgcgtggcgggattaaaagcgggcaacgaattggaaatgccctgttgcagatacgggaacgaggatatcgtgcgcgcggtcaaagaaggccgtctggacgaaaaaatcgtgaacgagagcctggtacggcttttggaccttatattcgaaacggacggcgcgctgaaagacgcccccgaacaattcaacgagtcggaacatcatttatttgccttggagtgcgcgcgcgaaagcgcggtgctgctgaaaaacgaaaaaagtgcgttgccgctgacgaaaaaagaaagggtatgcgtggtaggcgattttgcgtgtaagccgcggtatcagggcgcgggctcgtcggtcgtgaatccgacgcgtctcgatagcgtgctcggctgtatcaaagaatatccgctgcaatatgtcgggtatgcgcaagggtacg

SEQ ID NO: 1229 - DNA, 17699 bp, Unknown
  16S sequences of unknown bacteria
agtagcttgtcagggcaggttgtcccccataggtcacaacgctgtttataacccggtttgcacagcgggtaaatttttcgtaatagtcataataacttgtaccccaataccgatttaaggtttctttgctccgccaggtttgcatattgctctcgttaaaggttatataatcggtttctatgctgccggggttttccttgcagtacaaatagtagctgtgggcggctatcatttgggcttttatggcgttttcttcgtagcttgcaggcatttcacaggcggcgcacccgataagataatccaaaagggggatttccgtaaccttttctttttcaaggtcgtataaaaataccgtctgccgattttcccgactgttgtcggtttgtccgccctccggggcaggctctttgcctttgccgtaaattttgctgtatgcaaaaggcaccgccaaattaactgcaatcagaaaaatataaatcgctaaaaattttttcatataatcctctatgtattgtaattttcctttgtttgtattagaattatattcagagaataaattttttattaccaaggagtagattatggctttctatgttatttttatggttgtttgccttatgttttttgcagggcgaatatatgaacttttaaatcttactgactttaccacaggttttttgtccgcaaagggaattgtggcaaatccgcttaccattgcccttattgtgcttgtggcggtttgctgtggggttataatcttttccggcaagggtgcgccgcaaaagcgcaaatatgccaccggtttgccctggtttatatccggcatgctttttatagccggggcaattttcagcattatggacacatttaagcacggtggatttttgggctttgatattgctataataattgcctctgccggtgtgctgtggctgggcattttggatataaagggcaaaaaaagagagaaaataccatttttgcttacaatgcttttacctgtggcgttttgccttaacagtgttatatacgaagtttccaccgtccacaacagcctttataccatgagagttttgtcctatatgtcccttttggtatttttgcttatgctgtttaagtcggtttatcagccggacagcaaatccgacggtatgcttttttcggccgcccttgtaaatgtggctttttcacttttcggcataggtgcggttgcaatttgctcccttgtaaaaagaagcatcgacctggggggcttaatgtccgatttgggctttgtggttatgggcgtttactcattgacggtgtctttgattgtacttgctaaggcgaaaaatcgaagccctgttaaaaagaagattgtagaagatgaggacgaagactttgatgaggacgaagattttgaagaagaatttaccgatgtttttgacgaaataaaagaagaatcgaaatcccgtgtatatacacctaaaaaggaaatcgaacagacacgcccggtaaattacaccgcaaaaaataaaacccgccgggcggaacacagatcttccaacggcaaggtaatatacaaggcaagaaaataatatacataaagtgataatactaacaaataaaactgttagtattattatttcaatttaaaatggtgattataacctaaaatataatatatagttgaaaatattttgtttaatttacgatttattaacaaatgatgattgatattatgttaatatataggtgaagatataggtgaagaaaattcaatttcggaaaaggggaggacggttatgaacgaaagcacaagaaaaactataaacgaaactataagcgcatttaagtcaataagaaattattccatattaaatatagtaatttgtgtaataggtttagaacggttttttaaacttgatgtgtattcatttgattacataaaaacatttgatttttcccccggtagcatagtgagatatgttcttgttctttcgatgttgcggtctattggcattgcaagattttcaatggtgaaaatcaggacattaaaggagagccttccgccacgggatgacggttcgcaataaaataacaacagcccggcatgccgccgggctgtaatttaaaaacaaacagtcatttatatttacaaaatataaatgactgttttggtatttatgttgttagaaccgagcggtaacccttaaaataaattttaattaaaattcaagtttttgcagttcgtacataccgcatattaaaatttcaagtgcttccataagtccgtctatggagaaaccttcttctgccatatgctctgtgcctatgtaatcagggttaggcacattgcgtgaaacaatgccgaaagcggcaccggcaggaaaggctctccggtatgttccgccgccgatagtgtacggtttttcatctttaccggtaagttcattgtaaacgcctaacagagcttgtattgccgggtgttccgggcctgagcaaaatggcggattgccgcttgcactcgtaattcttccgcctaccgaactgagcttttcgcccagctgtttttccatcttttcaaccgatgtgcttgtggggaagcggatatttatattttgggtgaacacgccgttttcaaaatctataagaccacctataaccgtaagggggtcaaaaacatcgtctttggcgtcaatacccaatgtgctgccgtcataattgcggtgcatatcccggattagttccatatagggcttttcatcggcggtaaaaaggttattttcaaggccgtagtccataatcatacctatggcgcttactttgccttggggccgcattgcgtggccgcctatgccgtgagccgtaatcgttactgtgtcgccgttgtcggcaatttcaaaattttctttttcggggaaattgcctgcggattttttaaattccgcctgggcaagatcggatattacattgcttgccactccggctttaaattttaccacatttccgttttcaatctttttacttgcaagagagaaagaggcaatgcctttttcgccgcagcaaacagggaagtccgcatccggagtaaaaataaacaccggcggtttttcttgctgtaagtagcagcgcacatcggaagaacctgtttcctcatcactgccgaaaatcgctctcatggtataaggcaagtcgaggttttgctccttgaaaaatttcatcatgtaagatgtcaaaaccgcagggcctttatcgtcgcttacgcctcgacccacaaggtaaccgttgatttcacgaacggtaaatgggtcggctttccaaccgttgccccgtggtacaacatcaacatgggcgatagaagcaaggtatttttcacttttgccgtctatttgtgcatagcctgttctgttgtctaaatttttcaccgacaaaccgtttttctttgaaatttcaagaattttttcaagagcttttttaggcccccggccgtaaggcgcattctcttcgggagtaccctgtacgctgtttatgcttacaaggtccttgatgtcggccactatgtcctctttgtttttttgtacaaaatcctttactttccgcttaaattcactgtcaatcatatttgtcctcctatgactgttatatacttaaattatacttgcatcgtatcttttttacaagtcaatatgtgttttttatgggaaaaaatatcgcagattttttgtgtaattgttacaatgcctattgcgcttacaataaaaaataaactccactgatttataagttggcggtgattggactcccaaagcatcataaacagccaaaagcccacaagccccaagtacggggcaagggttgtgttaaattttttctctttgagcattacaatcgcacccgcaaccccggtgacaatcataaacagatagaaggaatttgaaaaattgttgtatatgccgtagtaaggcccgttttccaaaacaagtttatacactgtgtttacaggttccgaaggttcggcgtacaggtagctgtaacgcatatcccggttgccggaaccgaatgtgcggcaggtttttctgtaaagtaattttaaatatccgctaaaacccatttctttaagtcggtttgctatctcctgtttattaagttctatcctgttggcttttccgcctacggaacaggttatttcccattcgtcaatccagctgtaagagccgtctttttgtaagcccatcatcaaaaagtgggttaccggcattgcctcatcggcacggctttcttccattacggtgccgtattcccaccgatgaaaagcggtgtttacaccgagaaatacaatgattgcaattaaaaattttggcagtgattttttaaatttgcccttgaaaatactttctgtaaacagcgcaataaatataattgctaccgtagcttttatctgcataccaaaaccaagacaaaccccggccaaaacccggtacaaaattgattttttcttatctgcacactccaaagctctgtgcataaacaaaagaatacagcgaacgacccaaaccgagtaagtatccgtataactaacacagctttgaaaataaacgggaatatagcaaggggttataaacaaaaacacaagtgcggttttactgccgaaaacctcgtctgtgtagtaaaaggcggcggctatcataattgtaaacagaatatgccccacaaccatggaaacaaagtagtaatccgcaaccccaaaaaggcggacgattttaaacaaggcctgtaaaagcataagttctcccacattgtttgtatagtggtgcaggtagttgttgtaaagctgaaaatcttcactgttgccctgccgagaatatataacggcaccgttgaaaactttttcgtggtcatatagcggagagttcatattaaaaaggctcacaacaaattgaattgcaaaaattaagatcaaaaatacaatcaaaatctttttgcggttttcaatcaatttttccgagtgttttgagaatataaaaataactgctgctgttaaaaaagcccagcaggccattaaaattatctgaactgccgggttgtaattaaaagaaagatttttgcccagccgccggaacaaaacaagacaatatgtaaggcagaacaaaaccaaaacaccttttgaataaaatttattcacctttgagttaatggcggaaaaacagccgccgtccgtatttttcatatgtatagctcccaaacttgcgataaattaacataattatagcaatatcacgaaattttttcaataaattatggaaatattcacatttctgtgttataatcaaaattcgagaattcaagagaaaaggaatgtataaatgaaaaaacatcttaatgtaaacaccgtgcttataggccttttgattatagtttcccttggtgtgttcggttatcaaaagttctttaaaaattcactttccgccgataacggcattgccgaagtctatgtgggcaatcaggttgtaaaaagaataccccttaacaaggatgaaacatacacaattacacagggcttgctcacctgcaccattgatgtaaaggacggcaaggcggcgtttataaacagccagtgcccggatcacctttgcgagggtttcggttacataggcaacgaaaacgattttgccatttgcgccccggcaaatgtaggtatgatgattacatcgcctgtaaaaaaataaatttacattgttaaatagttgtttgatttgtaaagctcccggtgggggctttctttttgtcacaaaagccaagactttcccggctcggctttgatgtataagatgatcggtggatgattacatatccccggtgggggaaattcccgggcgattttttatctttataaaaataagctccttttcggttcacaatttttaagtttattacggcatttgcaaaacaatgtgtaaatcaggctgttttgtgaaaaaaccatagaaaaaaataaatttatatgttatcatatacagtataacatgaatgatacaaaagaggataaatttatgtcaaaacttatttcggtgatagtgccctgttacaatgagcaggaagtccttcaccttttttatgaggaaattacccgtgttgcaggggaaatgccaaattacaattttgaatttttgtttgtaaacgacggctcaaaggacaaaacccttgaaatattaaaggaatttgcacaaaaagacgagagggcaaagtacatatctttttcacgcaatttcggcaaggaagcagcaatttatgccgggttggaaaactccaaaggggattatgtatgtatgatggatgcggatttacaggatccgccagcacttttgccggaaatggtaaagtatattgaggaggagggctatgactccgttgccacacgccgtgtcacaagagagggcgagccgccggttaggtctttcttcgcccatagattttaccatttgatgaataaaatctccaaaaccgagatagttgacggggcaagagattatcgccttatgacaagacagtttgtaaattcactgctggaattaggcgaatacaacagattttccaaggggcttttcggctgggtaggatacaaaaccaagtggttggaatacaaaaatgtggagcgtgccgccggggaaaccaagtggtctttctggaaacttcttctttacagcatagagggcattgtggctttttcaactgtgcctttgacaatcagtatcacagtcgggcttttgttttgccttatagcccttgtcggtgttatatttatagtagtcagaacatttgctttcggcgatccggttgccggctggccgagtatggtttgcataatacttatgataggcggcatacagcttttctgcgtgggtattttgggagaataccttgcaaagacatacttggaagttaaaaacagacctctgtatatatgcaaggaaacaaatatagaaaagtgatttaaagggcaactcacggtgatttatcggggttgccataaataatggggttgaaatatatcactaaatattgtataatctaattcagataaatacaatatatagcgttggaggataaaatgagatatgcacaaatgcgaagatacgacgttgcaaacggcgtgggcatacgcaccacattgtttgtaagcggttgccacttccactgtaaaaactgttttaacagcgaatattggccttttgaatacggcgaggaatacaccgacgccgaaatgcaaaagtttatagatatgggcaaagtcgacaatgtgacgggatattcgattttaggcggtgagccgatggatcaactttcggataatatgttgcttaaaaccgtacaggaaataaaaaggcaaacaggaaaaacaatatggatgtggtccggctggacatacgagaatatgaacgaaaaacagcgtgaaatattaaaatatgttgatgtgcttgtggacggacagtttgttgacgaaaagaaaaatcttaaattgttgttccgtggcagtgaaaaccaaagaattatagatgtgcccaaaacattggcacggggcgaagtagtgttatgggagcataaagaatgagcagcgaaaaaataaaaattgtgtatcactcggataagatagaaaaattgcgctatatagacggcaagtccgactggatagatttgcgcagcgcagaagatgttgttatgaaaaaaggggagttccgtttaataaatttaggcgttacaatgagcctgcccgacggatatgaaatgattatagcaccccgttcttcaacatttaaaaacttcggtattttgcagaccaacagcataggtgtaattgatgaaaagtacggtaaaaattcaagcaaagatgtgcttatgtacccggctttggctgttcgtgatacggaaattcatataaacgacagaatttgccagttcagaatacaaaagcaccaaccaaagattatttttgaagaaattcagccggaggacttagacggcgaaagccgtggcggttttgggtctaccggggttaaataaatattttataagattataaagcaaaacggaacttatcaagatgataggttccgttttatattttataatttaactcttggaaaagggaaaagaataatcagaaaagtatgggtttgttcacaaagtttttaaaaatcaaaaacagcggatttctccgctgttttattttatatattgattatttacacaaaatgctctttgcaaattctatctgttcttttgtaggcatcggcacaccttcaaggcggtagggaatacctaatttttcgtattttgcaatagccattgtgtggtacggcaatacctccacacgctccacaacaccgggatttattgcgttcaggctgtctataaattcccttgtggctttcaaatctttctcgttgtcggtacagccgggcaaaagaacctggcgtatccacatttttttattttgagcagcaaggcgctttgcacaccgcaaaatattctcgttgccgtggccggtaagctctttgtgctttacgctgtcaatctgctttatgtcaagcaaaaccaaatcggtaagctccataagattgtcgaattttttaagccattcttcatcattgcagaatgggccggcagatgtgtcaatggtggtgtttacgcccttttcctttgctatgcggaaaagttcggttacaaagtccatttgcattaaagcttcgccgccgcttacggttataccgccgccgtttttccaataactgcgatatctgtatgcaccgtcgaaaacctcttgtgccgtggctgtataagagccctccgccttgtcgccccatgtttccgggttgtggcagtatttgcagcgcatagggcagccctgtaagaatacaatgtatcttacgcccgggccgtcaactgcgccaaaggtttctatgctgtttatattgcctttagtttccataatttatttaatattcctttgcttttcagtgataaaaaagccccgcctaagagggcagggcttgaagggggataatcccggttttatcagaatttatcgtggaaagttctgcttataacgtcaagctgctgttctcttgtaagagaaataaacttaacggcatagcctgaaacacggattgtgaagtttgcatactccggcttttccgggtgttccatagcgtcaataagtttgtccttgccgaatacgtttacattcaagtggtgtgcaccctgatcaaagtagccgtccataacatttacaaggtttgtggctctttcatcatcgctgtgacccaaagcgtccgggttcatagcctgtgtatttgaaataccgtccaaagcccagtgatatggaagttttgtaagtgagttcaatgaagccaacagaccgctcttttcagcgccgtatgatgggttagcaccaggtgcaaaaggagtccatgcccgacggccgtccggcaattcacctgtgaacttgccgtaaacaacatttgatgtgattgtaagaattgatgttgtggcctctgaatcacggtatgtgtggtgcttcttgatatcatcaaggaatgttttaagaagccatacgccgatgttgtctgctctgtcgtcatcgttgccgtatcttgggaagtcgtcgctgtcacgctcaaaacctactgcaagaccctgctcgttgcgctttaccttaacttttgtgtacttgatagcgctcaaagagtcgataacatgtgagaagcctgcgatacctgttgcaaatgtacgacgaacatctgtgtcgataagagccatctgtgctgcttcatagtagtacttatcgtgcatgtactggataaggttaagtgtatttacatacaaacctgcaagccagtcaagcataaccttatacttagcgataacttcgtcataatcaaggtaatcggatgtgataggtgcgtagttcgggccaacctgtttgcctgttctgatatcaacaccgccgttgatagcgaacaaaagtgtctttgcaaggtttgctcttgcgccgaagaactgcatttccttacctgtctgtgttgcggatacgcaacagcagattgagtaatcgtcgccccaaaccggtttcataacatcgtcgttctcatactggattgaagatgtcttaacagagatcatagctgcatacttcttaaagcctaccggaagtttgctgctgtaaagaactgtaaggttaggttcaggtgaaggacccatgttttcaagtgtgtggaggaaacggaagtcgttctttgtaaccattgaacggccgtcaacgcccataccgcctacttcaagtgttgcccaaaccgggtcgcctgagaacaattcgttgtaagatttaattctggcaaattttaccatacggaacttcataaccatgtggtcgataagttcctgtgcttcagcttctgtcaacttgccgctttcaagatcacgctgaatgtaaatatccaagaatgttgaaatacgacctacagacatagcggcgccgttctgtgttttgattgcggcaaggtagccgaagtagagccactgtacagcttcctttgcgtcctttgcaggtgcggagatgtcatagccataaatttcagccatttgcttaatgccctgcaaggctcttatctgctctgcaagctcttcacgacgacggataatgtcatctgtcattgtgccgtcaccgcagttcagcttgtcctcttccttccaagcgataagctggtcgataccgtaaagtgcaatacgacgatagtcgcctacaatacggcctctgccgtatgtgtccggcaaacctgtgatgatgtggctgcttcttgctgcacgcatttcaggtgtgtaggcatcaaaaactgcctggttgtgagttttgtggtaatcgttaaatattttgtgaagctgaggatttacatggtagccgtacatttcgcaggcttcctctgccattttgataccgccgtaaggcataaatgctcttttaaggggcttgtctgtttgaagacctacgattttttcaaggtctttcaaagattcgtctatatatcccgggccgtaagaagtaaggccggatactatctcggtttcttcgtccaaaacgccgccgttttcacgttcggccttctgcaattcctgcaatctgccccaaagtttatcggtggcctctgtcgggccttcaaggaaactttcatccccatcgtaagatgtgtagttgttctgaataaagtcacgaacattgcattccagcttccaaatacggccttcaaaaccgttccatgcatcattttttaacatacagattctccttcatatgaaatgatgataaataaaattgcttgcgtgattttcacatttgttattaaagttatatttaacgcaaaatcacggcagtatatgtgatacgaagaaaagctccggcaatccgcacacggtgcaaataggatcggcagggtgttttataaacctacttagaaactatcttgtgtattgagtattcacatatcttgcggttagattataacatccacactatatgtatgtcaatgaaaaacagtgaaaattttatcgaattatgtaatctgctttgaacacctgttgtatcaatgaaaaattctgtgtaaaacgcacaatgaaaatgttagccgaacagaacataaacacgggataaatcctattttattgtaattaaaattatatcatatttaacttgtgaaaatgttacacaagtctatttattgtcaatgccttgacatagaatttgccatgatttataatttaagaaaacaaaggagaaataaaatggacgctttgaattacgcaaaagaaattaaagaacaaataaccgcatggcgcagagacttgcacagaattccggaattgggtcttgacttgcctcagacaaaaaaatatgtctgtgaagagcttgaccggtggggcgtgccttacaccgagtacgatgattgcagcggcgttgttgccctgcttggcaagccgggcaaaaaagtattggcccttagagccgatatggacgctttgcccataaaagaggaaacaggttttgaatattcttcaaccaacgaaaatatgcacgcctgcggtcacgactgccacactgcgatacttttgggagtggcaaagattttaaaagaacacgaggacgagctgaacggtcaggttaaattattcttccagcccggtgaagaaggccccggcggcgcacctgttatgattgccgacggctgtatggaaaatcctcatgttgacagcatctacgcactgcatgtaggcgaaatcccggagggggcaaaagccggagacatcaccctccactacggtgatatcaccgctgccgatgaccagtttgatttgtatgtaataggcaagggcggccatggtgcggcacctcatatgtgcgttgacccggttgttgttgctacaactattataaatacatttcaaacaatagtaagccgtgaaatggaccctacggagccttgcgttatcactgttgccacattgcaggcaggcagaggagctgaaaacataatcagcgacacctgctatatgagaggtacggttagaaatgccaatatgaagaacagaaactatgttcttaaaagaatggaagaggttgtaaagggcatttgtatggctatgagagccgattataaatggaagttggactatggctatcagcctgttgtaaacgacgatgcaatgaccgacaaacttattgattctgcctgcaaggtaataggggaggaagctattcatgtaggcggaaagcagcagatgggcggcgaggacgcaggtttctattaccagcttgtaccgggttgcttctttaacctttgctgtgttgcaccggcaagtgacggcaaggtttatcctgttcacaactgccacatgacagttgacgacagcgtgctttacaaaggaactgcgatttttgtacaggcaacttttgattacttgaacaactgataaaaataaaattcaaataaaaggcgaaccaaagggttcgcctttttgatgtgaaactgttattcagaaaagaaaaaagccgaggctattgccccgaccgatttgtggtgcggataacaagacttgaacttgcactgcatttctacaactagcccctcaagctagcgcgtctgcctattccgccatatccgcatatttatatgttcctgtgtgagaacaagatatatgataccacaagaaattatttttgtcaactgcaattttacaaaacaaaagattttttgaattgcttgttatctgttaaagcataacagtgaaaatcaacctgattttaaatcgtttgcccttgaaaatttttaataaataagtaattttatatcgtgaaattttcagcaatttaaaattcaaacaaaaataaaaccgaggaattatcctcggttttactgtggtgcggataacaagacttgaacttgcactgcatttctacaactagcccctcaagctagcgcgtctgcctattccgccatatccgcatatttattctgtctcatgtgagaacagaataaatgataccacagagtttgcgttttgtcaacaatttttttaaaattattcgttttcttcaccgccggcgatttgtacccggttgtcagaggtgtaatcaaatgtagaaacatcttttaattttctgttcattacattcattcttgtgccggataatgtgttcagttcatcttgtgccttagacataattctctttgttttttccaatgaatcgctgaattttgcaaattccgttttaacctccgccaaaactttccaaacctcggcactctttttctgcactgcaagggttttaaagcccatttgcaagctgttaagcagggcggccattgtggttgggccggctatattgattttttccctttgcagttcctcgattaagcccattctaacaacttcggaatacagcccttcggtaggcaaaaacataatggcaaattccgttgtgttgggcacatctatatattttgtgcttatgtcctttgcaaagcctttaattctggttttaagctctttctgggcgtcctttacaaaatcccgattccggctgtcgtatgcgtcaagcagcttttgataggcgtccaatgggaattttgcgtcaataggcaggtacacaaagccgctgtctgccccgggcatcttaacggcatattcaaccctttcggttgaacctttttttgttattacgtttgtgtcatactgttccgggcttaaaatctgctccaaaatggaacccagctgaacctctcccaaaatacccctggtttttacgttggaaagaactctcttcaaatcgtctacgccggcgcttactttttgcatctcaccgagagatttgtaaacccgttcaagtctttcgcttacctgcttaaagctctcggtaagtctgttttcaagggtcttttgcagcttttcgtcaacggtggcacgcatttcgtccaattttttctcgttgttttgctgtaagtcggacattttcttttccattgtccggttaatttgcttcatttgctcggcgttttgagattgaaaaaagttgaaccttttatccatggaatttgaaaattccgccacggtttttctcaaatcctcaatatttttagcggtattttcacgaaaatcgctaaatcgtctgtcgtctgccgccgcaagcctgctttgtaaatccgcctgtgcgtcggcattttgttttaactgtctttgcaaaaagtccaaggtggaggcacggcttttttcgctgttgtcggcaatgtttttttcaagctccttaaactctttcccattgtcatctttttccatccttgtaagtgttaaaagatttaaaactatgcttactatgcctaaaccaatggcgattattataagtgtttctgtactagtcatgatcagtttgctctgttctccttgtctcttgcaagtttttcaatggcgtcctttatcatctgtataaaaggaactctgtccacatccagggaaacccgagcattgggctttttgtgcaatgtgttgtttacatcggtaacggtcataccgtatgtatatctgccgtctatatcaacggttacatagtaatcctcacatttgacaagttcaggctttaaaatccaagcaagagtcatactgtcatgcattgcaagaccggggtttttcattctttcacggtagtgttccgcataaatgccgcacatatcgcagagaacttttgaaatgctgttgccgtttgccttgtattcttcaagctcgtcaaatccgatatagccgttccaggtggcatcaagacaagccattttgatgggaacgccggaagcaaaaagaacataagccgattccgggtcctgcattatgtttgcctcggaaacaggggaggcgttgccctttaaggtggaaccgcccatcataactatttccttgattttaggcgtaagttccgggtgggtcataataagggtggcaacatttgtcataggtcctaccggcacaagcgtaaccggctcccgactttggcgcagccgatttgccataaattcaactgcggatacaggttcgatttctttttttggcttcggcaaaggattttctatatccccaaggccgtccttgccgtgaactatgcttttttccggcgggttgtaaaattttaccataggctttccccggccttttgcaacgggtatatcttctctgccgataaattcaagaattttaagggtgttctcggttgttacatctatcggtctgttgccgtaggtggtggttatgcccaagacgtcaaattcttcgctgccccgtgcaagacaaattgcgaaagcatcgtcaatgccggtgtcaacatccataataattttaattttttccatatctgtcctcttagaattttgctattgccttgcgtatatgggcaaggtattcgtttttatccatacttatgcacaggtcaatattcggcaggcgtttaaggtgtcctttgtaatcaaataccgtctgcccctggtttgtactgctttgtgtctcgcatataacatagtagctgtttgttacaagacttgtgtcccggcttaacagcgccccggcgattgtcgggtcacaaagctctatctctaaattctcgtcctcggcgatgccttgactgagagtgaattttttgaaatggttatagaaagatgtgagcaacggctttaatctcggcgaaatttcgcacagagctttaaagtcggcgttctttaatttattttcggcacagaagcgcagatccgacattgtaatgggtattccgctttccaataccacatggcaggcgtggggatcaccccaaacattaaattccgcatactgtgagtggttgccgtaatctctggaaccgcccatcatataaattctcttaatgtattttggcaaatccgggtatttcataagggcaagggcgatgtttgtaagggggcccaaggctaccaagacaagttcgcctttttcctctttggcaatgttgtaaataacatcccatgcggctttttcctccggctttttaacgggggcaggcagaatgtgaccgccaaggccgttgcttccgtgtacatcgcttgcgcctttagccggtacaatcattggcttatttgcgccctttgctacggggcagtcaaggtttaacagctcacacagtttaagtgcgttttcggttgtaccctccaaacctacatttccgtgagttgttgtgatagctttgatttcgacattgtctgagccggcaagggtgatgatggcaatgctgtcgtcaatgcccgggtcggtgtcgattataatcggtgtttttttcataaaattcctttcctttttgttttatattacaaacattgtaacacatggcggcacttttgtaaaagatgttatttacatatttccgtcattgttttatactatactccattgagaggaatgaagttatggtaggcaatgtcacccctgttttggaaaaattgaatgataaagacaggaaaacatatctttccgtctattgttcgctgtgtcacgaactgagccgcagatacggctatttcgctcgatttctgttgagttatgacatggtgtttttagctttattggaggacggtttaaacggccggctgtacataggcgatgagaaaaaatgcgttgccgggattttggggaagaagagaaaaattttttcttccgcaggggttaaatatgccgccgatgcttcggttatactggcctactttaaaattttggacaatttgaaggacgaaaaacttttaggtaaacttaaaaatcttttgtttttgccatacatattttttaaatatcaaaaagttaagaaaaatcgtccggctcttgcaaacagcatagaagaacggcaaaaaggccaaagggacgcagaaacccgatttaaaagccttgatgaccgggcgtttgccacggaagaaatgacaaagtcgctggttttaaagggaactgtctatgatgacaaaatgtctctcggccggttcggctttttcttgggcagggttatttacattcttgacgcaataaaagattaccggcaggacgagaaaaacggttctttcaatccttttctaaaaggccgcaacagcccaaaggaggctcggcgggagtgttatatg

SEQ ID NO: 1230 - DNA, 14493 bp, Unknown
  16S sequences of unknown bacteria
ttcggataatggttcagcacttcgcagccgtcctctgtcaccagcaccagatcctcgattcgcacgccggtatctccctgtatatagattcccggctcgatggagaaaatcatccccggctccgctttctgcgtgttaaccgaagacacgtcgccgtattcatgctctcccaggccgataaagtgacccagacgatgattgaaattcggtccgaaaccttcgccgccgatcagatttctcgctgtcagatccagttcacagagaggaacgcccggcttcaccttcgcgatcgcttcttcatttgctctgcggaccgtctcatagatatgccggtgatcgtcgcttacttctccgaaataaaatgtacgcgtcatgtcagaacaataactgtccttgacacagcctacgtcaaataatacacagtctcctcttttcaggaccgtatcgtccggtccgtgatgcggatccgctgcatttgctccgaaagcgaccagcggttcaaaagaaaaaccgtccgcaccaagcttcaaatagatcttcagcatctgatcggcgacctctctttccgtgatcccctcccggatcagtttcttgaattccgccatagctctgtcattgagatcggaagatacgcgcattttctcctgctcttcttcatcctttacgcctcttgcggtatctacagccacagaagtatttacaaagctctgcgccgcctgcatttccatcaggggcagcagaaatctcgccttcagatccttatccactcccagcggcgcgtcccggtcgataaattccgctactctgtccattaccggatcggtatcgtaagaccatacctgctgtactccggtgacttccggtacagaaaacagatgattcagaaaaaatatatgatcgccgttctccttcagcagaagagcgtaaaaccgctccatcggctgtacatagacatctgtgagataataaacggacatcggatccgtaatcagcatctgagtcacaccttgttttttcagttccgctataacgcggtccgctctgttttgtttcattttcccctccgttttccaccgcgtccaggcggctatttctatctgtacggcgcgttttccccggcagtcatctttgcctttgcagaagctgctgcagaaattccatcagaacaagactctggacagatcgcctgatcagagagcgcagacgatttcagggcagctccgtgaggtcgttcgctcctgcagattttcaaaaaagactgcgtctctcctgaaaatccgaacatctctcccttctccgacggagacggggatataagtatgatgttattataccatgccggctatagctcagtcttcgtctttttctttctgcccgactcgcctgctgccaagggagcaagtataagtctttctacgctctcgcgctcttcgattggcggatcgccgagaaagagctaagataccatgacggctacggttcagtcctcgtctttttcttcctcgatctcccgtgaaaaagacgccggctctgttttaccgtccaatataccaaacagatagatgcgtcttcctctcagaatatacgtccgtcaggcacatgaaaaaaggagagaattttttaattctctcctcaattctctattgattccttttctcttccggacagaaggaaaaagactgcttatctccgccgatccggctaaaactcctttctcagcttcggatccagcagatccctcagaccgtcgccgataaagttggcccccacggccatagtgaagatcgccagcccagggaaacccgcaacccagaatttattgaaatagtccacgccgtcggataccatcataccccattccggcgtcggcggtgcggatcccaggcccaggaagctcagcgtggagaacatcagaatctgatttccgatatctgtcgtagccatgatcagtacagaactgatactgttcggaataatctcctttgtcagaattctcagtctcgaggagcccaaggcttccgccgcagtgatatattcgttttctttcacgctcagaaccacacttctcatgagacgcgcataattcggccaggctacgatgaccagcgcaaacatcgtgttaaagaggttggaacccatgatcgcattgataatcatcgccaggatcagcgacggaaatgagaggatcatttcggaaatacgcatcatgatcgtatctacctttcctcccacataacctgccacagctccgtaaaatgtaccgatacatcctgcgataatcaccgtcagacagccggcgagaagagaatatcttcccccgtagatcacccggctgaagatatctcggccgaagttatcggtaccgaaccagtgctccgacgacggcgccgccagctttcctgccagatcctgagccaccggatcataaggcgccaccagaggcgcgatgaccgccataacaatccagaacagacagataatgacgccgaaagtaaataaataatttgaccggaataattttttcaaagaacgtatcatcagctgcacctcactcttggatctatgattccgtacaggatatctacgatcgtgttaattaccatataattcaatgcgatgagcagagctacgccgatgatcgacggataatccgtagacataaccgactgataagcgaactgacctactcccggccagttgaaaatcgtctctacgagaaccattcctcccagcagatttccgaagcccaggccgatcaccgtcagtaccggaatgatggcatttcccagggcatgtttcacgatgagccccgcattggacagacctttcgctttcgctgtacgaatataatcggtagacatgacgtccagcagattggacctggtcgttctcgtgatcaaacccatcgtaaaggccgccaatacgatgcccgggagaatcagatggctcagcgcatccatcgctttcgccggatctccctcgatcaggctgtctatcacgtataaaccggtcacggtctccggcggtgaaaacatgttgctcagccgccccggtcccggaagaattcctaatttgtagtagaataaatacaataccagaagcgcaaaccagaagctcggtatgctgacgccggtaacggaaatcgcgcgcaccgcctgatctgcgatgctgtttcttcggatcgcggagatgataccgaacagaataccgaagatggcagcgaggatgatcgcaaagagcgccagctcgattgtcgcaggatagcatcttgcaagttcggacagcaccggattgttcgtgcgtatcgatgtgcccagatccagctgcagcagattctttatatacagaaaatactggacgataatcggctcgtcgagaccatacttcgcctcataagcggccacgatttcaggatcgctgagcgctctctggctcagattggcggtcaccggatttcccgggaccaatttggtcagtataaaaaccagcgttgcaacgccgaacagcatgataaccagatataccagtctctttcctataaatttcagccgttccatacaacacctctctctaaatcatttatcatttctattgtcagggatgtttcaacttttaaagaatgaaagccgcagaatgttccgcccctgtttgcggcggaatgaaaacgcacggccccggttgcttttccgcagatatttccgtcatccggcctgcagcagatatcagatcacggaaatacctgcatgtataattctgcaccggctaagaccgcttcttcctaccgggcctgtgcaaaagcggatatttaaaagatgacatagtaccggtaaaactcgcccccttaagacgggagggttccattcccgggactgcgcaagagcggaaaaccctcgcgcacccccgcgggaacagaagtttcccggcgctatgccaaaatcgtcggctcgctctaatcagactgacgcgtcagagcttcgccttgatttaaatattttatcagtctatttaatattgatctgtgtcagatccagggtatacggatcggaagcagccacgccttccagtctcgtgttgtagccgatatgaaccggcgcctgagcgatgaagaggaatggaccgtcgtcatacatcttatcctggagctcttcgagaacggcaatgcgcgcgtccgtatcggtcgccgccataaccttgtcataatatgcgccgatttccggactcatgttttccgtccatcctgctctcgtgcctacggatgctcccggcaggaattctaactgtacgttagggtcattgtaatcggtcgcccagtacattacggtaaaaggaattttaccgtcgcggtagtcgtcaccgtagccggcagcccaagcctgcgttacgatattgacattgataccgatcttggagaggtcttccttcaccttctgagccagatcggtcagaagaataccctccatatccagatcgcagactgtcagatcgatatcgaaaccgtcagggtaaccggcttctgccagaagagcctttgcgtcttcgatattcgtataatcgacagatctctctcccttgcttcccataaatccggactggattacgctgtacggcgtgatcgtgccttcaccgcagatttcatgaacacctgcgtagtcgatagccttgcggatcgcctgctgcaccttagggtttgccaccggtccgccgatggactcattcgcattcatgaggacgaatccgactgtcttcgacggtgaattgattccttttaaattatcttttccttctaattcagccatcgtgtcatccgtcagattcaacgctacatccaggtcaccgctggacagggtcatcatctgcgtattcgcgtccggctgaatcttaatgatgtacttatcaacatttgtagcctcgccccagtaattcggattcttttccagaacgatttcctggtcaggcttgtagctcgtcatgataaacatgccggaacctgcgctcgtcgtatcgagataagcctgcgctttgtccgccgtagatgcgtccgcagcgtcggtaccaccgttttctttaacgacagcgctgtccacgatagccagagagcagtaagtcagcttcgagagaataccgctgtccgcctgtgtcaggtggaatacgacagtcttgtcatccggagcttccatactctcgatcgtatcgcagataaaagaaggatttcccttcagattctttgtacggttgatgctgaataaaacgtctgcagaagtcatctcgtttccgctggcaaatttaatattgtcctttaacttgactgtcagcgtctttccgccgtcggaaaattcataagtatccgccagacaaggctctgcctctccgtcattggaatagaacttgaagagattttcgtagcaggcattgatcacaaccggcggattcttttcgtatacatatcccgggtcaagggaagtaaaaccgccgcccattgccacgactaccgtatttgatcccgaagaatcagccgagccgccgtcgttatttccaccgccgcaagcgccgagagtgaaaatgagagtcaggcacaaagccaaggctaaaattttctttttcatcagattttcctcctaatgttttcctcctgataaaatattgagacaccggaaatccggcgatatctcctgatcagtcgtacagatgacaggctacaaaatgccccttctgtatctctttcagctccggcgcttcgctcctgcaccgttcgcataccttaggacatctcgtattgaaatgacatcccttcggcggatcggaaggactcggaacttctccttccagatgaatgcgctgtccggtctcctccggattcacctgcggaatcgcagaaagcagcgcctccgtatacggatgatatctcttttcgtaaagctgcgcataatcggcaatttctacgattcttcccagatacatcaccgcaacccggtcactcacctgatagactacattcagattgtgagaaataaagaaataagtgagtcccagcttttctttcagctcctgaagcagattgagcacctgcgcctgcacggatacgtcgagagccgagaccgcttcatcgcagatgatgagtttcggattcagtgccagcgctctggcaataccgatcctctgtttctggcctccggacagttcgtgaggataacggctgagatgataggcgtccagaccgaccagctgcagcagttccataatccgcgcctctacatcgatctctcctttcatcttatgaatctcgaaaggctccatgaggatctgtttcaccgtcctcctcggattgagacaggcggaaggatcctgaaagataatctgcgcctcttttctcatctgcttcagatcatttcccttcagtttcgaaatttcccggtcttccagaaaaatctgaccctccgtaggctccagcagccggatcagcgtcttgcccagagtgctctttccgcatccgctttcgcctacaacaccgaaagtttctccccgcataatttcaaaactgacatcatccacggctttcacgctgccggactttttatttttacctttaaaatacactttgacatggtcggctttgaccagcgcttcctgcgcacctgctgtcatatatctaagcctcctttttttccgccgtttctctgtccgcttcctccgcatacagccagcattttacagaccgttccccggtcagctgcttttgaggcgcttccgctcttttgcagatctccgacgcgtgaggacatcgaggccagaacgtacatccttcgattctctccgtcggattgggaactgcgccttcgatggtcagcagcggttttcgctctttggtgatcctcggaatcgcgtggagaagcccctcggaatacggatgtttcggatcggcgaaaagttcgtccaccggcgctttttccacgatctgccccgcatacatgacgatgacggtgtcgcacaattcgctgacgacacccagatcatgagtgataaataagaccgaggtatccatagtttcgttgagctggcggatcagatccaggatctgagcctgaatcgtcacatccagagcggtcgtcggttcgtctgcgatgagaatctgcgggctgcaggccagcgccatagcgatcataactctctggcgcatgccgcccgacatctggtgcggatactcatatgctctgacttccggattggcaatgcccaccgcatgcatcatgcgaaccgcttcctgcattgccgtctttttatccataccgcggtgcagccgcagagattctgcgatctgttttccgcatttgacaatcggattgagagaggtcatgggttcctgaaaaatcatagaaatctcatttccccggatcttctgcatctctttttcctccgctgtcaccagatccttgtccctgtacaggatacttccgtttgtaatctgacccgggggattgggaatcagctgcatgattcccagggaggagacgctctttccactgccgctctctcctacgatacccagcttttctcctttatgtaatgtataactgagattgtttacggcctttaccgtaccttccgcggttttaaattccacgcataaatcccgtatatctaaaatcgtttccatctgtttcatattaccttacattctttctttcggatatatgtatacaatatcagtataacgctttcgcatcatcacgttcaagtacaaaagtgataaagtcataaatatttgtcagaactacaaataatatatagatttatattttaccataatttacggttccgcgccacataatcctgcagcctcgcacgcaatgattcgcagaacatgtattgatccgctgttgcccccatcacagattataaattttaagcgcgggaccctgttcttctgtccggtgtgttacaaaatacaaaaaagaggctgtctgccagcctcttctcttttatcgaattaataccgcgtgaccggaagaaagctcccggcgcctgccctgcttacggcagcctatttttcgccggtattttctgcacccgcactggaaagcggcgttccgaatctcttgatcttcttcgtactcgtcttttcgaattcctcctcacgaatgacgaaacgctttaccctcttgtaagaaggcatctgatcgttggtgtcgtcgatgatctttttgaaaaatttcttcatctgttcattatccagatctccgacctgttcctgaatcgtctccctgtccgggacgatatgagccgtcacgatgagttctccgtcagactgcggaacgccctctacgataacttcgctgatatactgactcttgcccagataatattccacctcttccgggaagatatttttgccgttttttgtcacgatgacattctttttccgcccggtgatgtagaggaaacctctgtcgtcgatatatccgtaatcccctgtgtagagccagccgtctttcagaactttcgccgtctcttccggattgtcgtaatatcccagcatgacggaatcactcctcgtcacgatctctcccacgccgtcctcgtccggatttacgatgcgtatctccgtgttcggcatcgccgggcccaccgatgcggaatcataataccggtctctgtgaacagcgataatcggactgttttccgtcattccgtatccctggaacatcgtgatacccatgctgttgaagtcttcgataatctccggatccagagccgctgcgccggagataaacatgcgcatatttccgccgaaagcgttgtgaacgtctttaaacagttttctcatcgccttgatattaaagcggtccagcttcttagccaccgcgatgcccttcctgagcttcgccgcctttccggtcttctccgcctgtttccagactctcttgtgcatcatctcgaatacgagaggcacgcctacgataatcgacgctttacattcctccatatttttgatgatatatttcagtccctcgcacagcgctaccgtacctccctgataatgaacggtcatgtgcaggatcgtaaattcatatgtatgatgtatgggaagaatcgagagggccacgtcctcttcaaatacctttacaaacatcgacatattcatgacattcgccacgatatttttatgagacagcatgacacctttcgccagacctgtcgtccctgaagtaaaaagcaggatgctcatcgcgtccggatcgatctttgcatcgataaaactgcggtcgcctgcggctaccagctttcttcccttcttcagcagcgcagaaaaagacagacgtttttcgtcgctttcctctgcatccatactgatgatatattccatgctctcgatgccttcgatggctttcagcacggccttctccacttttccggagtagataatagcggacatattcgcccgctggcagagattcgtcagctccgcctgaggaagatctttatcgagaggcaccaccacgccggtaccattggcaaccccctgattgccgacaatccactcatagcgcgtctctccgatgacgcccacatgcttgcccttcaggcccaggtcgatcagagccgtaccgaaagcatcgatatcctctttcagctgtctataggtaaccggaacgaatttgccgcccggaacatttttcttgagataagcggcatgatccccgtaaagttccgcggaactgttgatcagatccttcatgtccgtcacggttctcacaggataatatgcgtctttatattttttattgctggccatatttcaacctctctgttctctttttatttcacaatatataattgtagggaaaaagctgccgaaaagaaattatccgtcagaaacgatttccgtcatttacagctgaaatccgcctctcacagccgtatttaccgtacggaacgggggatccactgtccccgttctcttgcaactaaagattttatcattatcggtttaaaatggcaatgattttatcgccgcaatatttttatcgtcaaactaatttgtgatttacttatcagaatctgcgtcatttatttcgtacgcatatcgtcttattctttaaatacattgcaacgcctcgttttgtggtgaattttgttgattttcagggaagtttgttgtatacttgatgcgcctcagacggatcttctacgtatattcttatacgatttccgcatcggtccgcagaggacatatgattctgaaaacagcggtgattcagtaatatcatcctgttcagactgcaataataattttttatgaaagggagagagacatatgggtttattttccaagcatatgcacagtattcacgtcggccatcacaaagataccgccgactgtgaatcggttgtcattcctgtacctgaaaaagtctacatctctatgtcacagcacatcggaaggccctgtcagcccctggtaaaaaagggcgacctggtcaaagtcggtcagcggatcggcgatgtcgatgctcctgtgagcgctccggttcatgcgagtgtttccggcgaagtaatatccatagaggaaagccgtacggcgatgggcagcacagatacgtttgtcgtcatcgcgtccgacggacgtcaggaaccgtgggagggacttcagatcccgcactgcgagacaaaagatgattttatcaaagctgtcagagacagcggcctggtaggactgggcggcgcatccttccctacccatgtaaaatttaatccggcgaatctggacgaatgcgatacgctgattgtcaacggagcggaatgcgaaccgttcatcacatccgaccacagaaatatgctggaacacactgacgatatcatctccgggatccggctgacgatgaaatatctcggtctttccaaatgttacgtaggcatcgaaaacaacaaacccgatgcgatcgaaaagatccgaaacggactgaaagagatcaaaggcgcggaagtcgtggaactgagaagcacatacccccagggggcggaaagagtcctgattcacgaaaccgcgggaaaaacgctgaaagcaggtcagcttccggcatcggcgggctgtattctttccaatgtgaccacgatcatgttcgtcggtcagtatttccgcacgggaatgcctctgattcagcgaacggtaacagtggcgggagatgcggtggcaaatccgtccaatgtcgtggttcccgtcggtacgaaatactatgatctggctgaattctgcgggggatacaccgctccgccgaaaaaaattatcgccggaggtccgatgatgggtaaggcgcagaacagcgacggcagtgtcgtcgtaaaaaacacgggggctgtcctgttcttcgatgaaaaacaggcccgtctcagcgaaccgactccctgcatcaactgcggcagatgttatcgcggatgtccggtgggcctcatgccgaaagaattcgccaaagcatacgaggcgaaagacgcgaagcgtctcagcgatctcaagatcatggaatgtatgagctgcggcagctgttcttatgtctgtccggcgaaaaagcctctggcatttgtcaacacacttgcaaaggaaatggtaaaggaggccggtctttaatatgaaaacagcgaaaaatgaaaatatgtttgtgacctcaaatcctcatatcacagattcaatgaacacgccgaagatcatgtcgctggtaattctggcgctgcttccgtccctgatcgcttcgatctacatattcggcttccgggcgctgatgctggccctggtctgtgtgatttccgccgtatttttcgaatgggcctttgaaaagatcacgaaaaaaccgaataccgcaggtgatatgagtgcggtgctcacaggtcttctcatcgctatgaacgttccggtcaccctcccttactggcagggcgttatcggttctttcgtagcgatcgtcatcgtaaagcaatttttcggcggtctgggacagaatttcgccaatccggcgattaccgcacgaatcgttctcttcgtatccttcgcgacggatatgacaacctgggccgatccgacaaaaggccgcgtgttcagcgcctccgacgcagttacctccgcgactccgctgggagtatttacggaaggcggcgctgcggaagcggaagcggcattctctctgaaacagctcttcttcggaacggtcggcggctccatgggtgaagtatgcgcccttgcgctgctcatcggcggtctattcctcatcgtaatgaagatcattcctttctcgacacctgctgcatttctcggaacggtagccgtcgtttcactgatcgcaggtgtggatccgctctggcagatctgtgcgggcggcgtcatgctgggagctttctttatggctaccgactacgcgacgacgccttccaccacgacaggcaaaattatcttcggcgcaggctgcggactgatcaccatgatcatacggcttttcggcgcttatccggaaggcgtatctttctccattctcctgatgaatattctgacgcctctgatcgacagtttctgcgaaaagagactctacggaaatccggataaaaaagcgaaaaaagccgcaaagagatctgctgcagaaggaggtgccggtaaataatgagtaacgaaactaagaaaacttctttccgggacggcatgatcggtcctacggtcattctgctcatcatctgcctcgtcatctccggcgctctggcagtgacatatcaggttaccgcccctcagatcgaaaaaatcaacaaagaaaccgctgacgccgcccggatggaggttcttcccggcgcaggctccttcaccgccgccgacggcgacctgccggaaggcgtcacagaatattacaccgaagacagcggtctgggcgtcgtcgttaccgcgcagaacaaatccttcggcggtacgatcactgtcatggtgggtatcgatgcgaaaggcgccatcacaggcgtaaaggtgacggaccatgcagatacgccgggtctgggcacaaaagccatggacagcggttatctggcacagtatcagacgctgacgcagttagatgacgtcgacaacataaaaaaagacagtcaggtagacgaagttaccggcgctacggtatcgtccaacggaatttatggctgcgtaaaatatgcgctcgccgcttatgaagagatgggaggtttaaaataatggaaaaagaatctaagctcaccatactcactagaggtctgatcaaagaaaatcctacgctggtactgcttctgggtacctgtcctttcctcgccacgtccacatctgcgctcaacggcgcaggtatgggactctccacgacagcggtgctcgtatgttcaaatatcgtgatcgctcttcttaagaacgtaattccggaaaaagtgagaatcccgtgttacatcgtagttatcgccggattcgtaaccgtcgttcagtttctcctgcaggcatacctgccgagcctgaacgcttctctgggattatatattccgctcatcgtagtaaactgtatcattctcggaagagccgagatgttcgccagcaaacattctgtcatcgattccgcgctggacggtatcggaatgggcctcggctttactctcgctctcttcttcatgggcgctatccgtgaacttctcggtgcaggcacaatcctgggctttgaagtcactacaaacctcatcactccgatgagtctctttatcctggcgcccggcggcttcttcgtcttcggtattctgaccgcgattgtcaataaaatcaccggaggaaaactcaacagagagttcagctgctccggctgcccgggcgatccggaaactatcgccgaactggaagcgcaggccgctaagatcgcaactgcgaaagccgctgcagaaacgaaaaaagcggaagctcaggaaggaggcgataaataatggcagctattttaagtattatgctgggcgtcattctcgtcaacaactacgtactcgctcagttcctgggaatctgcccgttcctgggcgtctccaaaaaactcgactccgcggtgggcatgtccctggccgttactttcgtcatggtgctggcgacactggctacctggccgattcagacgtttctcttagaccgcttcggcatcgggtatatgcagacggtggttttcattctcgtgatcgccgccctggtacagttagtagagctcacgctgaaaaaatatatgccgcctctctaccgatctctgggcgtgtatcttccgctgatcacgacaaactgcgcggttctcggcgttacggtaaacaatatcgacaacagctacggatttctcgaatctctcgctaactctttcggtgcgggcatgggcttcctgctcgcaatggtcttattcgccggcatcagaggaaagatggagacatcggacataccggaagcgctgaaaggcgttccttcggttctcatcgcggcttccatcctgtcgg

SEQ ID NO: 1231 - DNA, 4587 bp, Unknown
  16S sequences of unknown bacteria
ggctcggagatgtgtataagagacaggaattggctgttgaaaacggagaaatcgaggtcgaaatgtccagtcccaagctgtagtattttattaggaggagagtctcggctctcctcctctctttctggttaaattactctcgttgttgtcttctattcattcagaaacgtctcctgctcgattgtgacgccataattcaggattcgctctatggcatcccggaacaacggatattttccgttctccatatcgattctcagggatgataaatacgcttcggaacgtgctaggccatgctcgtgaaaggaatccacaaattcgccggacatacgcatgggtgtcagagagggaatcagctcctgcaaatggcggaacatccggaatccgccgatgtcgatatccgcccagaagcgtatcttcgtggtttcggacgctgcatgggcaatcagcgtgaccagccttttcttttgagggctgaggaatccgccgtgatagaccgccagctcctccggttgcttttccgacatcacatacgcatcatagttggtcttgttctcaatgaacgtaatgcaccggatggcggtcaggtcgatttccgcaatgcaatccaccagcgtgctgggtaaagccagcccatacggcgcggcgccaatacaaatacttccctgattggtccggatcgtgcagtttccggcaagctcataaagttccgggcgggcatagatgcctaagtatgccagctgttctctttcccgcaatttgttttcatcgcaggcaagcgctaactctgtgtcatatttccttgcaatggtcaaaaacaaatcgcgtacatttcgttcaaagtactttgtgtcggaaaagcacctgccgctgaaggcccgcatggttatgctgtcggacagtgcggcatactcacgaaacgcgcagagcagatcgcgcaaaattgcggtatcctttttgcaaaatgccggaaccttcatttcctcatcggcagacttgcagacgtcgtccctccaggccgcgatccagggaaccgcagtgccgtccaggccagcgcgaaccgcgtcagtgacctgctttgccctcacccggggatgcactcgttcagccgcggcatagcacggcacgatccggtccaagcaaagcacaacggccgaaagcacggggcgcccctttacccactcaagctgcaccagatgcttcttttcaagctccaaggccgcttcgttataggaatcccgtatggccgcgtcctcgtagaggtacccgggcagctctttcttttccactctcagcatgacccgtcgggtggatgccccgggttcggagagatgcctgctgttttcgtacttgtccaacagccggttcagaatcatcctctgttctgtcatggagcaatctccttgccaaagggcagaatgtgcattctgtacttgtctttgttcaccagcagcgtgcggtctgcgatcggcataatatccgaaaccttatcgggcggtgtgcagataatggcctgcaggcccatctttcgcagaaggcggacgctttcaataatgcggtcactgtccatcttattgaacgcctcgtcaaacaccgccagtcgaacggtattgccgaagctggaggtgtcgttgacgcgataaagctgggcgaatgacgccaaaaccgcaatatagaaaggagtctgcgtttcgccgccggattttgtgttcagcgtctgcgaaagcagctgctttgctccattctggtcggttgtttccagatcgaacttcaggtaggtcctgaagtctgtatatcgctggatgttttcctgcaattcactctgctttctggcatttagctgcgtatcgtccgccatggtgatttggctgaacagcttctctatcagctggccatatttctcctgaaacggcagtgcaaacaagcccatgtctccttccataagctccggagccataatcatgtcatagtattctgcataatccggattgcgctccacgcggaactggtagctgtctgtgccaaactgcgcctgacgcagtgcgcgattcagatttctcacctgatcctgcacttgatcgatgctggatttcaattttgccaggaaatcattctggaattgctccatggcgctctcccgcgccgttatgatcttttcacggtaccggggcagctcgctttcctccaaaagcctttgctccgcttcgtattccccattgtccatggactcgacgcggaaggagcacggcttgaactggtcattgtatcctctgcgcgcctcaaacagctttttttgcgcggcatcacgctcattggtgctttgctccaagcggctactgaaattcttgtggacaacatctgcgcgcttcaagcggtcaaattctttttgataccggggaatgccggttttttccctgtattcaggagaaaactctgcttcaatacggtcctccacatgggtcagctgctggtaatgatccggcagcacctcataggccagctggcgaatgcgctctttttgttggccaatctgaatccctttctgctctttttctttatttagtgctatgacttcattccccagcgtggaaatcgtgcgacgctgttcgtccagccacaggagatccagctttgaaagccgctcgtcgataccggccacctcatcggtaatctccatgccccgcagatatgcagtttgcttttccgctacggtgttctgaacaaagaaatgcgtaaacagcgggtcttttgactgtgtcaaaagctggcggatgggggcccacttatgcaactcatcctcaatctgcttcagctcaccttccaatcgggaaatacgcagactgactgcccggcggccgatgaatgcgtcgtccatccgctctcgccgcatggaacgggccacatagccctgataaatcatgccgtccgccgtaatggcagtcttgaaattgcgcagctgctcgaccctgtcgcagcacaccacacgtcccagtaagtaatccacatagctgcgcgccagcagattctctgtctccactttcttcgcaagactgtcgtcccgaggatggatcgtctctcgttcacggagcttaccgatatcgaccagtccaaaggacgcagagcagaaatctcttttgatccggtcaaacacaggtagcgctctttggtagtaggccggatcgatcagcagataaaacttctgcgcgtgaagatagccctccactgctccgcgccagcgttcgtctgcaacctccagcacgtccgccagaatatcgatcgcaacaggacttcccacctgatgctccagttcatcggccaagctctccttaaattgcagcaacccttttgggtagtctttgatatttttccggagattcgcaagggcaacgcgtttctggtcccgctgctctttcaattccgccagacggtcttctattttgtgctgggcgtcccggactgtttccgaaaacacggcagccgcctgccgggcattttcaaaaggtgccagggaatgagaaaacatctcatggttttccgacgcaaaaatcgcatatgccttcaggacgccctgggccgcatcctgcacaggcaaaagattttcttccgcttcctgctccagtatcgcactgcacaggttattcagccgaagcgcttcctttttgattccctgagccagggatcgcatttcccgatgcagctgttcccgctcatccagcagcgcctgtttccgaccgcgcagcttctccccctcctgaaatacgctgctctgcgcacaggccaattcaagttcgcgcctgcggtcctccttctgcgtgatctgcgttgcgatttcccggattctatcctcagtggcggttaaatttgcggtacaatccgccctttccagctcgaggcggtgaatctgagactgcttgatctctttctgggcccacagcaccaaaaaggactgcacctgccagcggtcgatcgcctgatgcatctcgcgatatagtctgccaatctcctgcagggcggccagtttttcctcctgccgctgcgccagcagctcgtggcgcttataatcccggatattctgctgcatggcctcaatatcaggcttatccggtatgtcgcagatattctccgtgataaatttctggatatctacgatcggccggaaagacaccgcttttttcatcatccggaggacctgttcattgtgaacattccagcgggagagcatgttccggcgatattccttctgcgtatcatagatttccgctttggcatagttttgtttcagatagcggcgcagtgcgggaatctccattgcctccccatcctcgataaagcaatttcccggcaaagtgcccacataaatgaaaaagcgttcctgcctgctgccgtcactgcggcaatcgaaaacaacaccggtgacgaagctggttccttccacctcatcctggaattcgcaggcgatatagctggaaaaatcctttccgcggcgggaataggggttattttcatccatatccgcccgaagataaccgtccaatgtgcgttgagctgtctcttatacacatctccgagcccacgagactaaggcga

SEQ ID NO: 1232 - DNA, 11947 bp, Unknown
  16S sequences of unknown bacteria
ccgacgagatgctcgagtacgtgaagaccgccgatgtgagcgatgtcgactactttggcgtcgggccgctgcatcccacgcagaccaagcccgactgcggggtggattcctcggggcacctcattgtcaagacgctctccgatatcgaggaactctcgcgggtgagccccgtcccgatcgtcgtcggcggcggggtcaaggtcgcagacgttcccgcactcgcgagaacgggagcggacggcttcttcgtcgtgtccgcggtctgcggagccgacgacccccaggcggcagcaagcgagctcgtgcgtgcctgggagtctgcggctaattagctcgcgtttcgaggctttctcgggcgaaacgcctgcgaaatccgttgaaacgcgaggtaatcgctattcccagcccttccacacctcgggctggtagcctacggtcgccttcttgccgtttcggacgatggggtgcgcgagcacctgctggttctcgagcagcttgtcgaacttctggctctcgcccaggtaggcgagcaaggcgaccgtgtcctggtctttggccttggggtcgacgagcttgtcgagaccgccgactgcccggcgcaccgactcgagctcgcctttgctcatctccttttccttcaggttgatgaactggaaggagatacggcgttccttgaagtagcgctgcgccttcttggtatcgaagctcttgttggttccgaatatctggatattcatgggcgtcccttcgctttttgtcgcgccgccgctacgcgagccccgtggcctcgtcgaggccgaggacgatgttcatgttctggacggctgcgcccgaggcgcccttgcccaggttgtcgaacagcgcgacgacggcagtgcgctcgtcgttgccgcagacggcgatgtggagctcgttggtgcccgcgagctcgttggcgtagagcgtctgcgcagtcgagccgaagggcagcacgctcacgaagcgctcgtcggcgtagtactcggccaggcgctcgcagatctgctgtgccgtggggcgtccttccagcagctcgttgtggagcatgatgctcgtcgccatgcccttgtagtaatcgtcgatcacgggcatgaagacggggtcgcgggtcaagccgcacaccgcgcgcatctcgggcaggtgcttgtgcgtaagtccgaggccgtagatgcccggggcagagagctcctccgggcgtgccgcgtcctcgtaggctgcgatcatcttcttgccgccgccggaatagccagtaagcgagtagcacgtgagcgggtagtcggacggcaggatgcccatgcggacgagcggggcgaccgtcgagatgaagcccgtcgcgtggcagccggggttcgcgatgcgcttggatgcggcgatagcggctctctgcgcgtgggagagctccgggaagccgtaggtccagccagggttggtccgatgggcggtcgatgcgtcgatgatgcatacgtcggggttctcgacgagctgcgtcgcctcgacggcgccctggtcgggcaggcagaggaacacgatgtcggcagcgttcaggaacttgcgccgctcctcgacgtcgtgacgcttgtcctcgtcgattctgagcagctccaggtcgtcgcgcgcgccgatgcgctcgtagatctgcagccccgtcgtgccgctctgtccgtcgatatataccctgggtgtggccatgttgctcctcgtgcccttgtcggtcatgtgtcgtagcgtcgattgtagaccaagggcgcttcgggttgctggcataatggtgaccggaacaacacgtcgagcggcgtgcgagagggcgagacgaaaggggcggatgtaggtgagatggtcggttgacgggcagacgcccgagttcctcgccgtgacgcgcgcggtatctttgagcgatgcgatcatcggccaaatcgtgccgaggctgcagctttttgcaggtgcgcgtgtgctcgacgtcggttgcggttcgggggagtactgcatacggctcggctcgcagacgcaggacgtgagctacaccgggctcgagtacgattcgggcttcgtcgcgtttgcccagcgccgcgcagccggccaggtcggctatcccttcgagtgtccgaatccggcgaactcctatgcctttttgcagggggacggtctcgacctgccgttcgagaacggcagcttcgacgccgtcgtctcgcacacctacctcacggcgctgccggattgggcggcggcgctcgcggagatgtgccgcgtgtgcaaaccgggcggcgtggtgtcctcggtcacctcgcttacggacgacttctacgggaccggcacgttcgacttgttcacggggcttgtctcgcctgaagatgcagagctgctcgggcgtgtgggcgcgctcgaggcgcgcgtgcagcagcccatggacctcatgccgggcatcgctccgcgcaaggtgcccgtggccttcgactggatggggctcgaacaagtgcgctgtcttcccctgggccagtacttctgcctgagcgatgccgatacgagtgctaccacatacgaccggcacgttgacctgctcgcccaaaccagaagggcgcagcgccagcgcctcatggcggagcctgagacgcgtgccttgctgagcgagcgggattgggaatcgtatggcgagctcatcgagcgcagggtgcggcagctcaaggagatgaaaggcgcaaaccgcgagtgggactggtacggcaacgcgtcgcttctggtatgcggcacggtcccgcgcgaagggttgggcgcacactgcgagctcttcaggtcggcgacgcgccgcggcctggcagcgcgcgagcgctacctgcaggcgggcggcagcgcgtccgagcgcttcaggcagctggggccgggacgctgcgtcgagctggagctgaccggcccgaagatccccgcgctccgggtgttcgggttcgacccgcccgccgcgcgggaagaggcgtatgccgcggcgctcggcgagctggcgctagaaggcggcagcgtggctcccgagcaggcgggcgctcccctggcagacgaggtcgtcttctccgatgagcgggtgtgggaaaccgtggccgaggccgcccagcagggcatcggggcctcgtttgcgcatgtcgcggggagcgctgcgagcgcatgtcccgatgtcgtgtgcacgcttcatacagatgggcgcgcagtcgcggcgcatgcggcttgcgcggacattcaccaggcaatacgccgcgcttttgcgcgttcgctcggggagctgttgaaaacgaacggcgcgtagccgccggtctcaggcagctacgcgccgaaaggctctcgtgtgtttgctcctagtccatcggggtgagctcgccggcgatgggcttggggatccaagctgcgagttccttgccgcgcaacccctgggacagcaggaacacgatcttcgcgtaggcggcctcgagcgtcatgtccacggcgcctaccgcaccggcgcgcgcgatggcgtcgctcgcctcgtaatggccgaccaagaccacggcctgctggcactgcgacgcgacgatgacgggtacgtctgccgcgatggcttccgagatggcctcggtgaggcctggctcgtcggagggcacgttgccgacgccgtacgcgcgcagcagcaccgcttcgggcagcggggtcagcatcgccttaacgcgtgtggcggtgatgccgggcaccatgtcgatgacggcgatgtcgtggcgcgtgtagggtgcggggttctcccatccgcagcccgtgcggtcgatgggaaaccatcgccagggggcgcccgtgcgcgcctcgggcgcggcggcaggcgagctgaacgcctcgaatgcccacgaggagttcttcgtcacgcggttccccaagaacaggtggtgtccgaagaacagcgtcacgccgcgcgcctgcccgctcacggcggcgttgagggcgccggtcacgtttgcggttgcatccgattcgatcagcccgagcggcagctgcgagccggtgaggatgacgggcttgccgaactcggtcagcgcatagctcagcgctgcgcccgtgtagctcatcgtgtcggtgccgtgcaagaccacgaaggcgtcggcatcgtcgcggtttgcccacaggtcgtcgatgatggcctgccagttctcgggcgtggcgttggatgagtcgataagcggggagagctcggtgaacgtgacctgctcgcgcgtgacctgcgtgccctcgagcacatggtcgagccagccgcgcatgtcagcgccgggcgccaggccgtgcggcgtctcgatcatgccaatggttccgccggtgtaggtgacgtggattcgcataggggctcctgttctactcttcgcggctctcgatgtgggcgtcgacgagttctgcgtctgccagctcgccttcatggtcagtcgaggtttcctgctcgacgagcgcctcgtcggtgtcctcgtccaagatctcgtccatcaggttgccctcgatgcggttgcgcacgtagaaccagccggcgaccatggccacgacgacgatggcgaacagcgccagcgtccagcggccagacgggtcggtcaggttggagagcaccacgatcacgaagaacgcgatggcgaggtagttggtgaacggcgcgccgggcatgcggtagtgcgggcgctcggcctgcccgcgcttcaccttcttcaagaaggcgaggtgcgtgacgaggatcatcgtccacgtaccggcgatgccgatgcccgccaggttcatgatgatgttgaacgcgtcttccggaagcacggcgttgagcacgacgccgaagatgccgagcaccgaggtgatgatgatgccgccgtagggcacgtggttcttgttcatacgctgcgcgaacttggggccggagccggcgatcgccatggagcgcaacgtgcggcttgtggcgtagaggcccgcgttgagcgagctcagcgcggcggtgagcacgacgatctggatgatcgtgtcggcgtacggcacgcccagcgaggcgaagaacgtgacgaacggggactcgttggacgagtaggccgtataggggagcacgagggccatcaggatgacggagcccacgtagaagacgaagatgcggatgatcatcgagttgattgccttgggaaggcgcttgacggcctcgtcttgggcctcgccggctgcgacgccgaccatctcggtgccgccgaaggcgtagacgacgccgagcgtcagggcgaacacgggggcgatgcccatgggcagaagcccgccgaagtctgcgatgttgccgatgccggcgttggtcaccatcgtcgtgccggccgcgtccgtgctctgcagcggggtgcccatgatgatgcagccgatggcgaccaccatgaagatgacgatggtcgcgaccttgatgagcgcgaaccagaactccgcctcgccgtacatcttcacgctcatcaggttcagcacgaacacgagcgcgagcgcgatgagcgcgatgagccactgcggcacgggcatgaacaccgcccagtagtgcatgtagagcgcgacggcggtgatgtcagccatgaccgtcgtcgaccagtcgaggaagaaaagccagccggtgatgtaggcgcccttctcgccgaggaactcgcgcgcgtacgagacgaacgcgccggaggagggacggcgcacggagagctcgccgagcgcgcgcaccatgagaaacgcgaagacgccgcagatggcgtaggcgaacatgagccccgcgccgccctgtgcgagacggccgcccgcgccgaggaacagccccgtgccgatagatcctccgatggcgatcatgccgatgtggcggggcttgagctccttcgcgtacccggcgtctcccttgtcctgcttgactgacatcacagctccttgcatccagtatgtgatttatgtgtgtaaacacacaaggagtcatcttactcgtctttgtcgcgggggggagcgccttttgtcgcgcatgacgacctatctgactgagggggctttgcgtgcgcggcatgggcgcaagctgccgttagggaatgcgttccgtgccgcatgacgctattatgagcccatgagcaggaaaccgcgatacaccaattccgattccgttgaactcgccgtatgcgcgcgcgacggggcaagcgacgagcgcgcacgcgccctggcgcagcgcctgcaggcgccgctcgtgggctcggacgagcttgcgggaaagctcgtggtatccgtagggcaagacggtcttgcgctcgagcacgagggcttgcagatgcgtgccgacctcgcctcgatggtcccgcgtgtgcggcacgaccggctgggaagggagcttctcgtaaaggcggccaagatcaagggccatgacgggccgcttcgtgccgtggacgcgaccgccgggctggggcaagacgccctgctgctcgctgccgccgggttcgagacgacgcttttcgagcagaacccggtcatcgcggcattgctcgccgactcgctcgagcgtgcagcgcgcattcccgagcttgaaggggcaatcgcgcgcatgcacttcgtcgaaggcgacagcatcgcagagctgcatcagctggcgcagccctgcgacgtcgtcttgctcgacccgatgtttccggagcggcgcaaaagcgcgtcggtcaagaagaagttccagctcctccacctcctcgagctgccgtgtgccgatgaggaggagctgctttttgcggcctttgcggcgcgtccgcgcaaggtcgtcgtcaaacggcccccgaaggggccgtatcttgcgggcgtgaagccgagctattcgctcgacagcaaggccgtccgctacgacgtgcacgtcttcgcccgtagctagcggccttgccctgcctggttgcgccgggtgctattcgctgcgcagcgcctcgaccgggtcgcgacggctcgccatgctcgaggggatcaggccggcgatgaaggtcagcagcacgctgatgccgatgagcgccaggcctgcggtccagggcaggctcatgacgttgggcaccttccaacccgcgagcacgaaggcgttgacggggaacgacgccgccaccaccacggcgatcgcgaagatgccggcgatgaggccctcgatgatcgtctccgcattgaagacgttcgcgatgttgagcttggaggcacccatcgcgcgcaggatgccgatctccttctttcgctcgagcaccgagatgtacgtgatgatcgcgatcatgatcgagctcaccacgagcgagatcgccacgaaggcgatgagcacgaggctgatggtgttgacgatgctcgtgaccgagctcatgagcgttccggcgatgtcggagtactggatggtggccgagtcgttgccgctgtcctgcatctgcttgttgtagtcgtcgatgatgctgatgatgctctctttggacgggaaatcgatgggatagatgctgatcgactcggggttgtccaagctcgcgtagccgagcttcttcaggtcggagtcgtacgtgagctcgtcggagttcatgtagttcatcatcaggctcgtgaggtcgtcttgcgtcacgttgagcttgatggcgttggcaaacgctgcggggtcgaacttgaagctgttctgcaggctggaaagcccggagagctgcgattgcatctgggtcgccatctcggcggccgcctgctgcatgaggttgcccatggtcgtgctcaggtagggggcgaacttgttggtcaggtagtcctccatcactgagttcaccgcggaagagatcgtggggccgagctcggcgttgagcgcggagacgatctgctgcgcctcagcggtctgcatgaactgctgcatgccgtcagacgaggcggcggcatctggatgggcgatcgcccacgcgctgtaggcggccatgagctgctgcacaccgctgttgagctgcttggactgctcgtcggtgagcgtgacgttcgcattttcgagcgcgctttgcgcgtcgaacttgggcgcgtttgccatcatctggcgcatggtgtcttcgctgaagacgtttttcaaggagctcgcgtcgagcgtcgggctggcactgctgtccaggttggagaggccggaaagcgcgctcgagtcaaagccgatcgccttggacatggccgcctcatcgacgctgaacatcgaggacatgtcgaaggaagagcccttctcgtcttgcagttcctcgaaggtctttcccgtgaagacgtcgacgtcggggttttcgagctgctgcttgacgatgtcggtgcctgccgccctgtcgatgagctgggtcgaaagcgacggcaggtaggcgacgccctcgcgcagggcgggcgtggtcgcggtctcggagggtttcaccacgccgacgatcttcaggtcgatggccttgttgtcgatctggtctttcatgaacgcgtcgtcgtccgacatgtcggtccaggtgcccgtcttgctgttcttctggtacaggtagctctgcggcacgaccttgaagtgcatgttgagcgcgtagtcgtacgtgaagtcgcggttcacctcgggcacggtgacgtccttgccgttcaagacgtcctgcgtcatttgcttcatgtcctcggggttgtagtagcccaggttgtagagggtgtagtcgctgatcttgccgttcttgtccaggaccagtaccgcctcgtcgtagttttgcggccagcgtccctcgacgacgtccatcgtgtcctgcaggacatcttcgttgttgagcatctccttgaacgagcccgaagacatcgagctgccgcccatggaggacatcgaggacgccgaggggctcatgaacatcgtgctcatcgacgacgggttgaggcgttcgatgccatttgcatccgtatccgccatgtagacctgcggcgtgatgccgtagtcgtactggatcgtgttcacgtacttgtcgatgtcagactgcccagattcgaggtacttcttgaatgcggtgaggtcgttgttcttcacctgcgcgaacatgtcgctcatgatcgtggactcggggatggtctggctgtcgccgccgttgtcgtcagcgtccgtgccgccttcgtcggagctgtagcccatggtcgcggtcatgaggctactgatgtcgaagctcgacttggtgatggtgagcgggtagctggtgagtgcctgctcctcggtgctcgcgatgtagttgttcacgccgttggaaagcgccaggatggcggcgatgccgatgatgccgatcgaaccggcaaatgcggtgaggaaggtacgccccttcttcgtcatgaggttgttgaacgagaggccgagcgcggtcagaaacgacatgccggctttcttgcccttggactgtccgggcctttcggaagtctcggggatggggtcgacgatcgggtcgctgtcgtcggtgatgtgcccgtcggtgaggcgcacgatgcgcgtcgcgtactgttctgccagctcggggttgtgcgtgaccatgacgacgagacggtccttcgcgacatccttcaagatttccatgatctgcacgccggtcttggtgtccagggcgcccgtcggctcgtctgcgagcacgatgtcggggttgttgacgagcgcacgggcgatggcgacgcgctgcatctgcccgccggaaagctgcgagggcttcttgtggatgtggtcttgcagcccgacttcctcgagtgccttggcggctcgttcctttcgttcggcacggcccacgcccgacagcgtcagcgcgagctcgacgttggagagaatcgtctggtgggggatgaggttgtagctttggaagatgaagccgacgcggtggttgcggtaggtatcccagtccttggagttgtagtccttcgtggaaacgccgttgacgacgatctcgccctcgtcggcgtggtcgaggccgccgaggatgttgagcatcgtggtcttgcccgagccggacgggccgagtacggcgacgaactcgctgtcgcgaaacgagaccgagacgttgtcgagcgcggtttgcgtgaagccggccgtgacatacttcttcgagatgtttttgagctggagcatcgataatcccatcgggtagatacgccatatggcgaatggagaacatgcgggtgggcgtttgttactagccattctatagaacgcgcgagacgcctgccgaaggaagagcgtttgtaacgggttcgttgtcttcgcgtatcctcccggggaagagggctagactgaagaatggaattcgaagacgggggacgtgagcttcatggatgacgaaaagcaaggacaggcctttggggaagaggtcaaggaggccgcagagggcgagcgggagatgcagatcgacacggatctttccgatctgcgccacggcatcgaaaccgacgtcgagcaagaagagaactacgaggcgcgcagaaagccgctcacggcagaggagctcatcaacgccgtcaaggaacaggctgcgaaatcccccgatgtcatcgccgaacgctctgacgatcccgagccggagcgccatgcgtgggttgacgagcaggttgccgcgcaggtgaccatgaagatcgcgctcgacgaccgcttcgagcacgtggaagacgatgggcaggaagggcgcgagtggttcgcgctcgtccggcaacccggatactgcctgcgctacgactggtccgacctctacggcaaccagccgggcacgttgcagctcgtcaaggcgaacgggccgacgggcgaggaggtcccggtcgtttcctcatgcagactcgaagggggtgacggctcggagcttggcgcattgctcgaccgcgcgtgctccgatgccgcgcgggactgcaagagggcgtgagctccagactcgctcacgattgcacctcacccttgcggtgggaattcgctacactctcagcatgaatagctcaagtttcaggggaatcatcttcatcgtcatctctgcggtggcgttttccacggcaggcgttctcataaagctcgttccgtggaatcccgtcgcgctcaacggcgcgcgcagcctgttcgccatcgtgccgatgtactggtatctccgccatacgggcagaagactgcacgtcaacaagtcgatagccatcggcgcggcggtgtatgcggccatgctcgtgtcgttcgtggcggcgaacaagcgcacgacggctgccaacgcgatcgtcctgcagttcacggagcccatctgggtgattttcctcggcgcgctcatcttccggaacaagccacgggcatccgcgctcgtcacggcgctcgtcatgatcggcggcatcgcattgttcttcctggacggcatcgacacgacaggagcttggggcaacgtgctcgccattgtatcgggcgtgacgtatgcgggtgtgtttctcatcaagaagatggacggcagcgattacgaatgctcggcaattctgggatttctcgtctgcttcgcggttggactgccgctctacccctcgcagcctgccctcgagctttccgggtgggtggcggtcgtcgcgctgggcgtggtgcagctggggctcggcgcgctgttcctgtcgctcgcgctcgatcacatcagcccggtgaccgcttcgctcacctcgacgatcgagccgatcttgaacccggtgttcgtcgcggtgttcgtgggcgagacgatcgggccgctctcgctcgtgggcgccgccatcgtcgtctgcgccgcgacggcctacaacgtgtacgccgcgaaggtacgcccttcctcccgcacatgattgccgcataacgcacaagaacagtggcactgccacacatcccgggcggcgctacgccttgttgccccggatcacgatccagccgacgacgcagacgagcaagaggaactgatacaggcaaaacgggatgattgagacgctcgagatgccggcgaggctt

SEQ ID NO: 1233 - DNA, 3955 bp, Unknown
  16S sequences of unknown bacteria
ctaaaacggctttgatacgtgtggagccaaactcaatgcccaatgcggtttccccggaaagaatggctgctttggcggcttgtttatccataacatatacctcctataaacgtgctgaagctttcgataaaaaacgttgatttgtagatggttttacacttattttattgtaacttgccatactgccaaaaggcaagatgatttcgcttgatctgcaggggaaaatggtaaagacgataggagagcgcatgaaattttgccaaaattatgctatacttttactatatcttcatagttttttaagattgcgctgttttctgtatatgccgcgttgtagttgattgctgggatagagagagttaaaggagaaagagaatgtttgagaaagaggatatcattttgtatggcgtgcacggtgtttgcaaaatcaccgaattggtagagcgtgaatatggcggggtttcaaaacagtattatgtgctaaaaccgatgtataacgacaatacctccattttgtatgtgccggtagatagccaggcgctggtaagcaagatgaagcgcgtcttatcggcggaggagatttatgcgctgattcgctccatgccgaaggaacaggcgatttggattgaggatgaaagggagagaaaagctagatataaggagatactggagcatggagagcgctttgaactggtcggcatgatcaaggcgttgtaccagcatcaaaaggatcaggagaagcgcggaaggcatttgcatgtagcggatgaaaggttttttaaaacagcagagaaaatattgtatgatgagtttgctttggtattggagatagagccgcagcaagtgttgccctttgtattgcaacaaattgaagttgagaaaaagatggaggcgtagagaacctgctttgcaggttctttttttgtaaaaaatgtgctttgaattttcattgggttttaaaggtggctgcatctaaaaggttgatataccgatacaataggcagtttgatactcaagattcaaagggacaacggaagaaaattggattcattagaaaaaccggagagaacgagttgctttccccggtttttcgagtgcttttgctaacagaatatcctttagaaattgccctaaggccagcaaaatgtatatgatgagggactattcctctacctggatcaggttgcttatatacgggcgtttgccggaaagcacttcatcgtaaaaattctgtttccaatcgatataggcaacgctgtcttctaactctttgatagaagctcttaaagcttcctgtttttttctaagcatctctttccgtggcattatggtagacgttccctgcaaacacagctgcaaatattctttcatttcctgaatactcatgccgcattttttcaaacaggtaagatctttaatccactttacatctttttcatcaaaaatacgccgattgttactgtcacgtttgacgttgggaatcaatccctcgttgcaataatattttaaggtttgatatgtcatgtctagttgccgacaaacctgcatcatcgtatacatatttactacccttcgtatggtttagaaaaattgacaaatttttaaagaaactattggccggttgttactaccgcaaattataatgcggttgtatcaagcggttgaaacaaccgcattatagcatgatgaaaatggtatgacaaggagaaaagagactatggttttttattttacaggtacgggcaatagcctttatgttgcaaagcagtttgatcctaaaccgataagcgtaccacaggtaatgcgaaataaaaaacgagaattttttgcagacagcattggtcttgtcgcgcctatctatggacacgagctgccgcttatggtcaaggaatttctgaaagaagcagatttgcaaacaaactacttttatataattttgacctacggaaaccgccacggaggagccgcggaactggcgaaagagctttgcgatagctgcggcataactgtcaattacatcaatgtacttctcatggtagataattggttgcctagctttgatatggacgagcagcaaaagatagacaagaaagtggaagaacagattgctgtgattcaaacagagattcgcgctcaaaaaaacatgatagcagcggttacggaagaggatcgcaatgcccatcagcagtttttggataacatgaaacagatgccgcccaatgcatggcagcatctatttcgggttacggatgcctgcgttggctgtaaaatctgcgagaaggtatgcccatcagcatccgttcgggtcataaatggaaaggctgtgcatactccgggaaactgccaaacatgccttgcttgtgcacatgcttgcccacaaaaagcaattcagcttgtgattccagaaaagaatcccaatgccagataccgaaacgagcatatttctttgaatgaaatcatcgagtcgaacagtcagaaataatggactgtatgcaaaaagaaaatcaggaggatttagtcatgaaaaagcagttacacgtttaatggccttggttatggggatagcaatggcctttacattttcagcgtgttctaattccaacacagaaccatctgccgagcctacccaaagcagcctgcaaacgccttcgggcaattctcaacgctcggtgaatgagaatgcaaaagcactcgttgtttatttttctgtgccagacaatcaggataacagctatgtagaaataaacggagagcggcttggcaatacacagtacatggcgtatgtcattcaggaaaatacaggggcagacatctttcgtattttgcctaaaaatccgtaccccacagatcatgatgcgcttttagaagtagcgcaggaggaaattcgcacgaatgcccgcccggaaatagaaggaacgattgaggactttgattcctacgacgtcgtatttgttggatatcccaattggaatgctgatatgccgtatatcctttatacattctttgaaagctacgattttgcgggcaagacgatcataccatttaatacgcatggcggaagtgggttttccggcacacaggaaaccatcgcacagttagaaccagatgcttccatgctggagggaaagagcatttcgcgaaataacattgaaggggcagagcaggaaattatcgactggctagacagcattggtatgttgaaagccggcaattgaggacaagcatgatgaaacccaacgtagccataaaacgaagtgttgacgtggccatgtatattttgtttttgctattgatggggcagtgcgttttacgaggcgctgttcatgagtggctagggatctctgccggtatccttttccttatacacaacgcgttgaactacaaatggtattgtacgcttttaaagggtaaatacaacgcaatgcgcatggtacagcttgttgtcaatgcactgctattcttggcaatgttggcctgtatgattggtggtttgcttgtttcgcagcacatctttgccattgggaacggaagcgcaatcgaatttggtaggcacttacatcttgtagcaacggcatgggcgtttattctgatgtcgatacatcttggattacacggttcaatctttgtggaaggagttaagaaaatccatgctgacgaaaggataaaaaaggcagtccatctcatttgccgtgttgttatagctgccttgtgcgcatatggcttataccaattcgtagatagacgcttttgggaggaactgtttcatctggtcgactatcagaaagaatatgacttttcaaaatccattttcacctatttggtagaatccgggatactgtccgttccttttattacaatggcctattatgcaaaaaggttcttgctgaatagaaaccggcagaggaaagtgaaaatccaaaatgaggaaaattagcgctattttattgctatgcgt

SEQ ID NO: 1234 - DNA, 11712 bp, Unknown
  16S sequences of unknown bacteria
agctgtatacacagtttttggaaaagacaaagcgacagccggggtatgcagcgcggcttatgcagatcgcaggccgacataagaggctctggcagatcgcggaatttgcagccgggagcctgttttttgaggggctgatccggatgacgggcaacagtgcgcagttcagaatgattgatctgcggctcgtatgcatcgtgctctttggcagtctctacgggatcaactatggaatcgcggcagcggcggtcgagacattttctttactggcggcgtatcaggagcaggggacgggctggcagacgctgttctatgagccgtcaaactggcttccgtttattttttattttgccgtcggctcgatctgcggctatgtgcggatgaagaacctggaaaatgatgcttttatccgcagtgagagccgtcagatggaagaaaaatttctgtttatgcgggagctgtatcaggacacattgcaggataagcggatgtataaaaagcagatactcggaagccgtgacagcttcggtaagatttttgatatcacaaggaagctggatatcgtgcagccacaggagctgtatattgagacattgcaggtcatggaagaggtgctggaaaataagagctttgcattttattccgtccggaaaaataatggctttggcagactggagatcgcatcaagggaaatgcaggggagctttcccaattcgattcagatcacagatttcagggaggcgatggagacactggaaaaaggtgaggtgtgggcaaaccgcagtctgctggagggctatcctgcctatctggcggggatccgccgaaacggtgaacttgtgatgctgatcttcatacaggaggcggacagcgggcagatgacactctactatctgaatctgtttaagatcctctgcggactggttgagacggcgctgctgcgtgcgatggactatcaggatgcaatcgaataccggcagtaccttccggatacacatgttctgaaaacagagttctttgtggagcgtctcagactctgccacacgatgcgggaaaagcatctggcttcctacgtgctgctggcactttcccatccgggaatgtcgttgtcgcaggcagatgcaaagctgcagaggctggtgcgcggaaatgatgtctggggtatctcagaggatcgggagctgtatctgatcctgtcacagatggatgaggcgtcacagccgatcgttttggagcgactgacccatgcaggttttctgtgcagagtcattgatgagcaacagcagtccggggcggtggatcaggagaagggaagggaaatgtgatgcagtggaaaatcgagcttttgcttttgctgctgcatgcgatttgctgcgtcgcagtctggctcgggatccggacgcaggtgctgaaggtaaagaagtatctgatgtttccggtgatttttgttccgttctggggtgtgctctgtgtgcttttgctgcactttcagatctgtggcggggcagacaatgtccggcaggcgggtgtggaaaagctgaaggtaaaggaagagctgtataaaaatatatttgtaacacaggatgccagtgagcagattgtaccgctggaggatgcgctgcttttgaatcagccgggcgtgcggcgggagctgattatggacgtactcaatgacgatccgggtgagtatatggagcttttaaaaaaggcccggatgaatgatgatgtcgaggtcgtccactatgcgatcacagcgatggtagagctctcgaaggactatgattaccgtctgcagcagatcgaaaggcgctatgcaaggcagccggaggatccggctgttctggccgaatactgtgattttctggaggagtatctggaacagggaattctggaggcgcagatggagcagctgcagcggcgtcagtacatccggcttctgcaaaagcgccaggagcaaagaccaaagctccatacgggaatatgcctgacagaaaatcttctgaagctgaaggaatacggggaggcatacaaggagctgcagtttatgcgaaagcactggtatcgcagagaagaatactggattttatatgtgaaatactgtgcggagcagaagcttgggcgggagctggcacaggcgttagcagagatgaaacgggagcatatttatctgtcatcaaaaggaaaggaggcgttggctctttggctggatgtataaaggcaatccgggaattccggtttaagtggatgatcatagtgctgtttatatttttaatgatgggggctgtgctgtatgcggagcgcagcggaatccgttatcaggagatggcacggcagatcagctatatggaaccggagcgggtcgtgacggaaaaagaagccgtaaagacatggaagacgacctgcctggtgcttacagacagtacgcaggaggccagcatgcaggcactgccggagtttgagcgcatgtttatggatatgcgggtcggaatcgaggtagtggatgtatcatcacaggcgctgccggatttttccgtgtatgagacggttgttgtgctgcttaccgatctgagtccgttaaaggaagaggtgctggcactcgcttcgtgggtggagcagggcggaagcgctatgtttgcgctgacactgcagaagaatacgtatgtgtcactgatcgaacagaagcttggaattctttcctccggctatgacaatgtgctggtggacagcatttattttgaaccggattttctgcttggcggcggagtgtcatatgacgttacagacggatatgattcggcgtgggaggtagagcttggcgagcaggcaaaggtctgtgcaagggtgaaggatgccgcaggtacaccgctgatatgggaaacggattacggaaaaggaaaatttgtcgtagataattttggcctgtgtgaaaaagcaacgcgcgggctttttgcagcttcctacagtctgctcacagatgtcggggtctatccggtgatcaatggctcggttttttatctggatgattttccttcgccggtgccatccggggacggaaaatatgtgaagcgggactacggtacaagtatccaggatttttatacaaatatctggtggccggatatgctcgcgcttgcggatgaacacggggtacgctataccggtgtgatcatcgagaattacgaggacgatacggatgggacagtcaaaacgacgacagataccgagcggttccagtattttggaaacatgctgctgcaccgcggcggggagctgggataccacggctacaatcatcagccgttaagtctttccgatacggattatggagatgtacttccctataagacgtgggacagtgtcgatgcgatggaccgggccgtcacggagctgataagctttggaacggagatgtttccggggacgacgatgtcggtctatgtgccgccatccaatgtgctctccgaagagggacggactgtgctggcgtcgaaatatccgcagatccggacgatcgccagcaactattttcccggagagttcgcatatgtacaggaatttgaggtggcagacgacgggatcgtggaacagccacggatcatttcagggtgcatcattgacagctatatgcagatagcggctctctcggagctgaacatgcactttgttaatactcactttatgcatccggatgacctgctcgatgaagaccgcggcgcggcacttggctgggagactttaaagaaccggctggatgaatatatgacctggctggatacatcagcgccgtctcttcggaatctgaccgggtctgagctttccggtgcgatccagcgctacggtgggctgacagtggaaaagaagattacggatcaggagatacggctgcagctcggaaatctgtatgatacggcatatctgtttgttcgggtaaatgaaggtactccgggtgacgtgaccgggggcagtctgacacatctgaccgggaagctgtatctgctttgtgcggattctcctgaggtcgtcatacaagtggaaaagtaaaggagaggagccattgaagatctgtcttatcctggaggggtgctatccgtatgtgttcggaggcgtgtcgacatggatgcaccagtatatcaataatatgaaggaacacgaatttatcctgtgggtcatcggagcaaatgcgaaggaccgcggaaaattcgtctatgagctcccgcaaaatgtaacggctgtgcacgaagtctttctggatgatgcgctgcatgtaagggcatccgggaaaatgcggcatcgtttttccaaggaggagacggacagcctgcgcgagctgatgatctgcggacggcctgactgggaggtgctgttttcgctgtatcaggagaaacggctgaatccgatgtcatttctgcaaagtgaagtgtttctggacattctcacaaagtcctgtctgacgcattatccgtacattgcatttgcggatgccttccatacgatgcgctccatgctgctcccggtactctacctgctcggaaccgaggtgccaaaggcagatgtgtaccatgcgatctgtaccgggtacggaggaatgctggcctgcctcggcgggtggatgtaccggaaaaaggtattgctgaccgaacatggcatctatacgcgggagcgcgaggaggaaattatccgcgccaaatgggtcgtcccgtcatttaaaaagcaatggatttcatttttctatatgctctccgatatcatttatcggcgggcgtttcaggtcacctgcctctttacgaatgcgatgcacattcagatccagatgggctgtgatgcaaaaaaatgcagagtaattgaaaatggcattcactatgaaaggctctcgcagatcccattgaagcaggaagacggctgggtcgacatcggggcagtcgtgcggcttgcaccgatcaaggatatcaagacgatgatctatgccttttttgagctgtccatgcgaaagaaaaatgtgcggctgcatatcatgggcggtgtggacgatgaggaatatgctgcagagtgttatgcgctggtggagcagctgaagctggagaacgtgatctttaccgggcgtgtggatatcatctcttatatggaaaagctggactttacgatcctgacgagtatttcggaagggcagccgctgtccgtgctggagtcgtttgcggcccggcgcccgtgcgtgacgacggatgtcggctgctgccgggagctcttaaacggcaagccgggagatacgttcggggaggcaggctactgtgtgccgccgatgtaccgcgaagggctggcagctgcgatggagcggatgtgtgagtcacgcagcctgcggcttcgcatgggagaaaacgggcaggcgcgggtaaaggcgtactatcgccaggagcgtatgcttcaaaaatacagggagctgtatggggaggtggatagctgatggcgggaatcggatttgagctgaaaaagctgtttaaacggcgggggctgtttgcagccttccgtgcgtatggctatgccggtgtcgtatgtaccgggccgatgctgctcggaatcgtgctgctgctcggcgtcatgtatctgtgtgatacgacaggcgcttccaggcaggagcgggagcttctggtctgcatgattacctataccctgctggcctccttgcttgtgacgagcttcctgtcgatggtggtaacgcggtttatcgctgatatgctgtacgaagaaaaatacgaggccgtgctgccgtccttctggggatcgaccgggctgatgctgatggcaggcggcgtgctgtacggtatttttctgattttttccggtgccacactcatcgaggggcttttgatgctcggactgttcggcgagctgatcgtcacatggaatgcgatgagctatctgacagcgatcaaggattacagagggattttgctgtcctttacggcagcgattgtcattacgtttgcagtgggatggctgctcttaaagctcggagtgccgcacgtcattgcacttctggtcgcagtgtccgtcggctacggcatcatgcttttgtgggatgtcattttgctgtaccggtattttccgcagggaagcttaagcgcctttttgttcctgcgctgggtggatgcctttcttccgctggcgttcaccgggctgtttatgaatcttgggctgtttgcgcatcttgtcatcatgtggaccggtccgatccgggtgcaggtgaaggggcttttttacggagcgccgtatcacgacgtcccggcgctggttgcctttctgacgattctcgtgacgaccgtcaattttgtcgtatcagtcgaggtcaatttttatccgaaatacaggaattactacagcctgttcaacgacggaggtgcgatcggcgacattatgcaggcaggcgaagagatgctgcgggtgcttggcatggagctgaagtatacggcgatcaagcagctgcttgcgacggcactggcgatctctgtcgggggcatcgtgctggattgcctccctctgggctttaatgatctgatggacgggtatttccggacactctgtgtcgggtacggaatctatgcggtagcgaatacgatgctgctgctgcttttgtattttaccgattacaaaggtgcgatggcggcatccggcgtgtttgcggcgatgacgtctttatttactgtgatttctctgcagttttctgaggtatattttggatttggttttttgttggggagcgctgtgttttttctggtctgtgcggttcgcctgaaccagtttacgcggcggcttccgtattatattctcagcatccagccggtcgtggcagaggatcgaaccggcgttttcacagagcttggatgcttccttgacaaaaagctggagcatgattgaaaggagatggaagagtgagacgaaacagaacaggcggactgcttttacttgcaattatatttgccggtctgtgcagcggctgcggaatggaaggagccgtgacggaagagacggagcagacagaagcggctgcggtcgtaaaagaagcgacagaggatatcaatcaggtgcatctgcgggataaggagaccttatatgaaaatgacgacgaagacagtgtcgtcaccatgtatctgaccgtttcccgcggcaacagttcggagaataccgatcactcctgggaggagatcaacagctattcggcttacgattatgaggacatgggagtggaacgctatcaggtgaacgggcttttacaggtcggggatgaagatggtccggttatcggtgaggtcggctatggagagagtgtaccgaatgcgatggtgcagatccgggggcagacatcgagccggaatgcacagaaaaactataaaatcgagctgaaaaagaacaaaggtacgtggaggggacagcggacgatcaacttaaacaagcacatgacagaggggctgcggtttcgaaacaagctttcttatgatctgatcaagaccgtcccgcagatgattggccttcggactcagtttgtccatctgtatgtgaaggatctgaccgaggatgccgatgcggcatttgaggattacgggctgtatacgcaggtcgagcagctgaacaaaacggcgttgaagaatcacgggctggatgcgaacgggcagctgtataagataaattcgtttgaattttaccggtatgaggatgtgatccggctgcaggacgatccggactacgatcagacggcgtttgaggagctgcttgagatcaaaggcgattctgaccacagcaagctgatcgcgatgctggaggcggtcaatgacaactcgattccgatcagtaccgtgctggatcggtattttgaccgggagaacctgacctactggatggcgtttcagatcctgacgggaaatgtggatacgcagaaccggaatatgttcctctacagtccattaaattccgatacatggtatttcctggactgggacaacgatggaagctttatgcggccggaatatgccctgagcgggtttacggatcaggaaagctgggaaatcggggtcagcaattactggggcaatgtgctatttcagcgctgtttgaagtcggaagcattccgggaagagctggatgaggcgattcaggatctgagaagctcctttaccgaagaacggctgcagacgatggcggatggatatacggcagtggtgaagccttatctttactcgatgccggaccggatgtatgcaccgctgacaagcgtgcagtatgacgagatcgctgcggcacttccaaaggagatcgaggcgaattatcagctctatctcgagagcctgaaacgctcgatgccgttttacatcggggtaccgcaggcagatggcacgaagcttgtgctgaactgggatgtatcttatgattttgatgcggaagatatcacctacaccgttgagatagcgaaggactatctgtttgaggatgtgattttccaaaagcagggtctggtgattccggaggcggagacggagctgccggaggcaggacagtatttcctgcgggtgcgggcggaaaatgcgtccggctatacgcaggatgcctttgactactatgtgacggacgaggggaagcattatggtatggtctgcttctacgtcacggaggatggcacgatcgaggaagatgtctatgaggaatgaggagaaaaaagaaatctaccggaatgagtggaagtacctcatcagcacatccgaaaaagagctgctgaagcttcggctgaagccgttccttgtggcggatccgcatgcgaagaacgggggctatctgatcaggagcctgtattttgacgattactggaacagtgcgtatgaggagaaggaagccggggtgctgatgcggaaaaagtaccggatccgcatttacaattacagcgatgcatccatcaagctggagcggaaaaagaaattcggaagctacatttacaaagagagtgcaccgctgacccgccgggaagtggagatgattctggatggcgattatgcctttctgctgaaaagcccttatgcgctgtgccgggaattttacatcgagtgtacgagccatatgatgcggccgcgcacgattgtcgactatgacagggagccgtggatcatggatgtcgggacggtacggatcacctttgactcggatgtccgggcggcggtcggaggctatgacattttcgacgccaccctgccgacgcttccggtgctcgagccgggaaagctggtgctggaggtcaaatttaccgagctgctgccacagcttgtgcggaacatccttccgccgcaggccgcagaattcacagcagtgtcaaagtatgtgctgtgctatgagaagacaggctatctgaacgggtttgaatactggtatgagacacaggagaggaaaatgatatgagcgtaaaagatatgataaaaaagtcagtactggaatcaggtgtatttgaccagtataacattccggagatgctgacagccctgattgcggcgctgctgttcggagttctgatttatgccgtttaccggaaattttatgcaggggtgatttattccagaagctttgcagtgaccctggtggggatgacggtgctgacctgtatggtgacgctggcgatcagcacaaacgtggttatctcacttggtatggtcggcgctttgtcgatcgtgcgttttcgtaccgcagtaaaggatccgctggatcttctgtatctgttctgggcaatcacgtccggtatcacggcgggagccggaatgtatgtgctggcattgctttcggcggtggtaatgattgcgatgatttttctgttttatcataagcaggagaaggggcggatttacattgcggtcatccactatcacggcgatgaggccggagatgccgtcatccgctgctttggaaaacggaaatattttatcaagtccaggacgatgcgcaaggagcagacagagcttgcggttgaagtgttctgcaggaaaaatgacggcgactttatggaaaaaatgcgggaaatttccggagtggaggatgtgactctgattcagtacaatggagaatatcatggctaagccggggaaatggctgctttttggtggtgtgctgctggctgtggccgcggtatatatggtgggaaaacgcaaaatgacaaagacggcagtgaaaaagacatatgcaaagtcagaggaggtattcggcaatccgctgatgggctatgcaccgtctgcgtggagagaagaggtaacggacgatattcagcttctgtatatggacattacctgggcggagctggagccggaggagggcatctacgactggacgtcaatcgagcaggaaaatcagcttgcgcgctggcagcaggagggaaagcatctcatcctgcgattcatctgtgacattccgagggaggaacgtcatatggatattcccaaatggctgtatgagaagaccggagaagcgggcacctggtacgatggtgagtacggaaagggcttcgcaccggattataacaatgcggagctgattgcctgccatgcgaaggcggtagaagcgctcggtacgcatttcgggacagacgggctggttgcctatgtggagcttggcagccttggtcactggggcgagtggcatgtaaactatgaggaaggaatccagtgcatgccaaaggaggaagtccgggaacagtatatcaccccatggatcctggcgttcccgaaggcaaagctgctgatgcgcaggccgttccgtgcggccaaacagtatggaatggggctgtacaatgacatggcggggcatgcaagggacaccgaagagtggctgcaatggatccgggagggcggcgattatgcgcaggcagaagaagaggatgcactgtgggcgatgccggatttctggaaaacggcgccatccgggggtgagctgaccagttccgtttcgatggaggagctgctgcagacaaatctggatgagaccgtacagcttctccgggattcccatacgacgtttctcggtccgaagattgcggatgaggcgtattcgaaaggctatgaggcggtgctgcatcagatgggctaccggatccggatattggatgcagagcttggcggagaaggggaacaggcatcatccatacggctgacctgggaaaacgatggcgttgccccgttttatggtgactggccggtgtatgtgtacgtcgaggacggagacggggagaccgtggaaaaagagccggtcacgatgcagcttccggccctgctccctggcgtacagatggtgaccgataccgcgcttacgacaaaagatctgccagggcttgccgggaatgaagggatataccagatttggatcggcgcagaagatccgatgaccgggcggcccgcggtgcggctggcgatggatgtggagtatgtggatgggagaaaccggctgttttaactgaatcaggcaagtccccgatcggattttttgacagatgagataacagagagcatcgcctgaaatatgcaaaatagaataagaactgacggaaaaaaataagattttttataaaaaatgtcttatgttcacacaaagttcacaattatgtgttaaacaagagttatccgaattgaatacgtgcaaaggttatagcgttaaggttgcatccgatggatgcgcaaaagagaatccggtgagaatccg

SEQ ID NO: 1235 - DNA, 7037 bp, Unknown
  16S sequences of unknown bacteria
ccgaccttcgcctgtcgtagcgttttcattccataatcctcctttattttcagcgcacggatcaaaccataatcttctgcgccatctcgttactgattgcaatccgggcttccttgaccacgacgatcacattcccggccagcatgttgatgaccttcacgttactgccaacgacaaaacccagattttccaaatgctttttgacttcgggcttaccgccgactcttttgatgataaggtcttccccgacatttgcaaatgtaagcggtatcatagcagcacttccttgcgtgtccatttaattagcgaaagctaaccttcgcgccaaataaaaggttaggactcgctaaccagctactataatactggcgatgctctgatttgtcaaggcatcgccagaaaaattttgcataaaaattctgttggatcgtagaaggaaactgtgtaccccgtgcatgcacgcccctgccgggcccatcagtcgatctcctcttccacagcggggggtgcttccaggggctgaccgttctgcatggcctgccactgctcctttgtgatgagcagctgccggggcttggagccttcgaaggggccgacgatgcctttgtcctccatttcgtccacgatgcgtgccgcccgggcatagcccagcttcagccgtcgctgcagcatggagaccgacgcttgccccgtctccaaaatgacttcgacggcggcgggcagcagctcatcctgatagggcccgtcgtccagcgcgccagcggctgccgatgcgccatggccgcccttgccgctctgctcggcccgcttgtcgatctcgtccatgacgtcctgggcgtagccggcgcccgcctcccggtccttgataaagccgacgacggcctgaacctcttcgtcggtgataaagcagctctggatccggcggggccgtccctggcccaggggcgcatagagcatatcgcccctgccgataagcttttccgcgcccagtgtatcgagaataatgcgggagtccaccgccgatgccacggcgaaggcgatacgagaggggatattcgccttcatcaggcccgtgatgacatccgacgagggccgctgggtcgcgacgatcagatggatgcccgctgcacggcccatctgggccacccggcagatcgactcctcgacctccttagcggcgacaagcatcaaatccgccaattcgtcgatgacggcgacgatctggggcattttgtcgtagtcgtcgctggtggcggccagcttgttgtattcctctaaattccgcactccggcgtcggacatcatccggtaccggcgcatcatctcggtgacggcccactgcagcgcgcccgccgctttcttcgggtccgtcacgacggggatcagcagatgggggatgccgttgtaaatgcccagctcgaccatcttcgggtcgaccatgatgagcttgacctcctccggcgtcgccttatagagcagggagatgatgatgctgttcatgcagacggatttgccggagcctgtcgtaccggcgatcagcatatggggcatccgggcgatatcgccgacgacgcaattgccgccaatgtccttgccgacggcgaaggacagcttggacttcgccttggcaaactgcgggctgtcgatgacctcccgcagggagacggtgctgaccagcttattgggaacctcgatcccgacgatggagatccggtccgggatggcggagatgcgcacccccgtcgcgcccagcgccagggcgatatcctccgagagattcgtcagcttcgccagcttgacgccgctggccagctccagctcgtaccgggtgacggacgggccgcggatgatattgacaatggtagcgtcgatgttaaaattatgcagcgtctcgtccaggcgggccttgttctcccgcatctcctgggtgccgtcgaccccggctttgccgggggtcagcaggctcaccgggggatagtgatactggaccgcaggctcctggccggagcgctccagctgctggattacctcttcctttgccagggccgcctccgcgcgctcctgctttttctgcgcctggagccgctggttgaccgccgcgacctcctcttccgagaccgccgtctcccccgcctgccaggcgggggcagcggcgggttccgactgcggcgactgggactgcacgggggccgctttggtgatctccaccggctcctcctggggcagagacgccagaatatccaccggtggttcctccggctgcgcaggagcaagttccacttgcggcgcttcgaccgttggctcgacctgggccgcctctgccggggcggtctcgcttgcggcagctttgcttgctgcccgcttggcctgggcccgcttttccagaataaactcatccggcgacgggacatcccgcttgcggccccgcttttggaccggcgcggggggatcgtccaccggcaggtcaaaatccgctgcccgctttttctgcacatggtcaatgtgcttctgggcaacataattgacgacggcggccgcattgtcctgtggctcttccggctcgtcgtactccagcttcgggcggttcttcaccgcctgggcgatcccggcaatcgtcatattcagcgcgcacagcaggcttaagatcagcaggatcacaaagatcaggaccgcgccgatcttgctgaaaataagctccagcagcatagaaaaaaagccgcagagcaggccgcccgtcgttccggcgatgccgccgcggtagagggccgcgaccatggagatgccccaggggatctccaccgtgtccagaaacagatgcgtgatcgcgccgatgcacccggccatcacaaagcacgccgtgacccgcagacggaccggccgcccgccgtggaacagcagaatgaacgtactgaagaaaaacgaggctggcagtatgtagaacccggcgttgccgaccagccccttgcaaaacggcgcaagcagcttcgttgtaaaccaggacttgacgccaaaaatgctcaggatcgtaaagattcccaaaaacagacagatggccgcgccgatttcccggcggatgggcttggcgctcttctccagggccttattttgcttggagcgcttttccaccgtctgcttggcggtgcttttttgcgttgttttttttgtttgcttggccatagagaaactccttaggtaatcaaaaacaaaaagatggaaaagactgcggcagcccagctataaaaggcaaattggctccagctctttttccgcgtcaattgccgcagacgcgccagcgcaaagcgcgccgcgaggacgcagacgatcgctccggccaaatacgccggcagccgcgcagcggtgacccctgccacgcagccctggatgatgcggataatcccagcccccagccagaacggcacggcgagcaggaaggaatattccaagctgaattccgccttcgccccccgggacagccctgctgcgaccgtcagccccgtccgggataggccgggcaggacgctgacagcctgcgccgcgccaatcagaagcgcgtccggcagacgcatctgccgcgcgtccttctccccgccggttcgcgctgtcgagagaaagaggacaagaccgccgagcgccaggaaagccgcccagacaaggggcttggtgtaaagcgccgctgtccaacgctgcagtaaaatttcaagcagcagcggcagcagcccgacggccagcagcagcacaagtctgcggcgctcccgcccggcctggcgcacacttcgatccgcagcacgggctggtttctgcgaaaatgcacgaatgattgcagcaagttcttgccggtaggcaatcagcaccgctgccgccagcgccaggtccagcaatccgtagaaaaagcgctgctccgttcgcgccgccgtctggcccaagacccgttccaggatcgccatatgggcagacccggagaccggcaggatctcggtcaggccctgcacgagcccccataaaattgcgagtatataagccatggcgtgcctccggtcttgcaaaatgggcggcgtgatgccgcactatgccgtatttataatcatagcacaaaaccggaggaatttccatacctttcttgctttatcgctttttccccttgccgcggctgccctggcgctgacggccgatcatccggtgcaggcagcgcagcgcgtcgcccaggctgcccagctggtcgatgagcccgcaggcgacggcctcccgcccgtagacgacggttccgacgtccgtcgccatctcgccggtctgcatcatataatccaaaaactgctgccgccggatgcgggaattagccgtgacaaaggtgacgatctgctcctgaatccggttaaaataccgatacgtcggcggcgcgccgacaatgacgccgttcatccgcaccgggtggatcgtcatactcgccgtcggaacgatcatcgaccgcttggcgcagacggccagcggcacgccgatggagtgcccgccacccaggacgagagagaccgtcggctttttcatcccggcaatcagctcagcgatggccagcccggcctcaatatcgccgccgacggtgttgagcaaaagcagcagtccgtcgatgtcctggctctcctcaatgctggcaagcagcggcagtacgtgctcatatttcgtcgttttgaccgtctccggcaggacctggtgcccctcaatctggccgatgatcgtcagggtatagatggtcccctctgctgttttcgtcgtcgccgcgcccagatcgatgatctgctgcagcgcctgctgctcctggttcttctcttccatccggccacctcctgttttttcctagcatgcccgaaatttaatggaatatgaaaagcgccagttcaagactgacgcttttctgaggaaaacagaaatgttttatgaatttgttactctgctgccagcttttcgcccagggcgcggcaggcagctagggcgtcatcgtctggggcctcgcagcaggtcaggccgtcggccaccagcacggcgccgtcactttggcagcgggactgccactcctccatccaggtgccgtcgccccagccgtaggagccaaagagggcgacctttttgccctggagcatcgactcgatggacgtgaacatggggtcaaagacctcctcttccaggacctccgaacccatggccgggcagccaaaggcaagcgcgctgtagtcgttcaggcgggatgcgtcgacagcggaagcctcgatcatctctgccgccgcgcctgcctgcttgacgccctcggcaacggcctccgccattgcctcggtgttgcctgtgccgctccaataaataatcgcaatgttctgcatgatattcttacctttctatggaaattctccaccgcagcgtcagctgtgattggtttgcaagttttagtccttcatgggttagctatagctaacccatgagccgcaagatgccgggccggacacggcgcactttggtgcagctgcaccgggcggcgtggggcacggcgatacggcgcttatttgtgccggacaaacacccccttcttctcgtaagtctccttgtggatgcccagcagcgtgtagcccgtctcgtcgatgcattggtgcagcgcttcctcgctcgggtcttcctcggtgagcaggacggtctcctttttcgtgtgggacgaagtcacctttttgacggagaatttgttgcggatcgcctggttgatatgcgcttcgcacattccgcaggccatgccgtcaatgtttagtgtgatcttttgcattttggaaagccacctctcgtcaccagagtcttgtctatggttagctacagctaaccatatgcagtatacgccatgcgcgtcgggatgtcaagcccctgttggcgattttttccggggtttttccatcctgcccagcctaaaaaacatagcgccgcagagcagcgggcttggtcagcgcccgccgctctgcggcaaatcttatctatatggaacgtacagaaccgtcaagccgtcttcgcagcgtccgggcgctgacggggcttgcccttggcaacccagaccagcagtccgatgcccagtcccagcaccgcgggcaggatccaccccagcccgtagctggagagcggcagcacacggccaatggcctgcaaaatgcccgccagctgctgatagttcggcagcagcgcgttcaggaagtcgtagagcgccgcgaccagggtgcagcccgtcacccagccgtagacgcagcggctatggccgaaggcattgccgcacaggccaagcaggatcagcgtgatggccagcgggtacaggaacatcaggacgggcagcgaatacgcaatgatcgtatccagccccagattggcgatcaggaaagagacgacgctgaaggccactgcccaagcgcggtacggcaggaatttcgggaagagcttgcagaacgtctccgcgcagctcgtgacgagaccgacggccgttttcaggcaggccaggcagaccatggcagccaggatcatcgcgccgatcttgccaaagtagtggttcgacaccagggcgaaaacctcgccgccgttgttgcagatctcataaaggccgcggctctgggcgccgacgaccgtcactgccagatagatcagtgccatcagcaagcaactgaacacaccggccttgacggtattctttgcgacagccttgggctcttggatccccaggccccggatgacatcgatgacgatgatgccaaaggccaggctcgccagggcgtccatggtgttatacccttccaggaatccggtggagaaggccttgtcgacatagctgccgtccggcgcaatgctggagatttccccgatcgggttcaccagcgccgccacgacgaggacgcccaagaacagtagaaacagcggattcagaattttgccgacccaggtcaggatcttgcccgggaacagggaaaaacccaggacgatcaggaaaaatacgccggagaagatggcaagcgccgcccctgatgcgacaccgg

SEQ ID NO: 1236 - DNA, 3133 bp, Unknown
  16S sequences of unknown bacteria
gacggtgtgtatgtctgctgcgtctgatatacgggctgtggcgctgctggtgtctccggagccgcttcgggcttcttttcggcgggagccttcgctccgcacgcggaacagaaggtcgagccatctttgagcggagcgccgcattcggtacagaattttgccattttgagtttcttcctttcggtttgtttatcaacataattttaccataatcgcgcggaattgtcaagcggtgcgggaaaataaaaaaaattgcgaaggaaaattcgggaaaactcttgacaagcggaaaaatatgtgctatacttgaatcaagaaaaacgttttcgttcgttacgcctgtcaagaaaacgatttcatcaggatttttaccggaggacagaatggcgcgggctactatttcagaggtcgccgctgaggcgggggtcgctatatcaacggcgagcaaggcgctcaacggcaccggggctataagtcccgagactgtgaaacgcatagaggaagccgctcgccgcctcggctacagaccgaaccgagcggcacagctgctcgccgggaagaacaagagcatcggaataatcgtcccgaaaaatccggtcgaggtcatgaagccgattattgacgggttgaccgagactctcgacgagtacggcgagtatgggttcaggtatcagatgcggacgttcgactatatggtcaatggggtcgaagggttcctcgacgggcttgaggacatccgggacaggatcaacgggctgattttcattccggttatcgaccttgatatctgccggaatttcatttctccgctgaagattccgaaggtggcgctccagtcggtgcttgacccggagatatgcacgagcgttacggttgacgagcggatggtcggacggatggcggcggagtttctgtcgctgtacgggaacgtccggaacgtcgcgatgatcgcgggcagccggcaggcggatattcaccggaagaacttcgagggcttcagggacgagacgatggcgcgcgggatgaatcttgttgacgcggtcgacagctttgacagcatcgagaaggcgaggagcctgactctcgggctgtgcgagaggtatccggagcttgacgggatatttgtctcgtcgtatgtttcgcctggtgtctgcgcggcgctcgaggagagggggctcgcggggaaggtgcgggtcatcggggtcgacgtttatgaccggacggcggagtgtctgcgaaagggcagtatgtcggcgattatctatcagaaccagcgggaacaggcaaggcgcgcggtgatcgagcttctcgacggaatgcgggaggggacgtcgcggagcgtgcatatcaagcctgagcttgttttgcagagcaatctttcgttctatatctgaaatacctcagggtatttcagataattcacaggctttaagaaaacgttttcgtacgcgctttcgtaaaatatatttatttggaggtatcagaaaatgacagaaattctgagagacaggacgcttctcggctttctctacgacggggagccgtttgaaaaggcggtcgtctggaagaagaccgaagagacagggaacgtcatcacgacaacctacgagctgaaaggcggactccgggtcacgaacacactgaggatcataccggaattcgacgcttttgaggttgtcaacaagtttgagaacaacgggagcgaggcgagcgggattgtttcggagctctgggactgcgaggttacgctgccgatggagcatgaggagaattaccgctacagcgcctatattccggacagaaagaccgcgaccaagatatacgcgccgatgggctcgacatggaatgtttacgagttttcgtcgaatcctgacgagcaccgtgataacagctatgtgaatttcctgtatccgggaaactcaaaaagattcgcgtgtgtcggtggccgctcctgcgacggtcaggcgcctttcttcaatatccataagaacggccgcggttatatctgcgccatcggctggaccggacaatggaattcggagattgcgagagggaacgacgacataactttccgctcgaagatagaggacacgaatttccgggtgctcccgggcgaatccttccgcacgtcctcggcggtcgtgatggcttacgacggagacttcatcgactcacagaacaagtggaggcgccttgtgaagaagcatttctcactgatcggcaccgaggggcgcgacaaatacggtcctatctgcgcgagcatctggggcggcatgacgactgatgaggctgtccgccgtgtaaacgtgctgcgcgacagcgggataccgttcacttacgtctggatggacgcgggatggtacggacatgacacgaaaccgacgcctgacgagtttgagggagactggggaagccacacaggcgactgggaagtcagtccgctggttcatcctgacggtctgaaggatttttcgaaggctgtgcatgacgccgggatgaagcttatcctctggttcgagccggagcgtgtcgtcaccggcaccccgacgataaaggagcacccggagtatttcctcggcgacggaaacccggatccatggaacaatctccttgaccttggaaacgaggacgcgtggaaatacatattcggtacgctttccgggcttatcgaaagcatagggattgactgctaccggcaggacttcaatttcgcgccgctcggctactggcggcacaatgacgcggaggacaggcgcgggatacacgagataaaacacataaacggtctctacaggctatgggacgccctgcttgagaggtttcctcacctgatcatcgacaactgcgcgtccgggggacggcgtatagacattgagatgcttcgccgctcgataccgctctggaggagcgaccttgagtgtccggcgaatttcccggtctgcggcgtgcaggcgcaccatatctcgttcaatctctggatgccgtattccggctccggatcgggacgtctttatgacacctatcgcatgaggagcgcgtatgacggctcgatgacgacgaactactgctattcccggagaaacgacttcggcggcgacccggaaaaactcgcctggctgaaaaagtacgtcgg

SEQ ID NO: 1237 - DNA, 3955 bp, Unknown
  16S sequences of unknown bacteria
aaggtgcgatgaatattcttcggatgcatctgaatttttagtttacctgtagagaaaatacagcctactcgttataggatgcaattacttgctgtgcgcgttcattctcctgctgaagcttatgtttatcctcagcggttttgtcagatatacgatatgcgtcaaccgcaaattccagaatgcgaaaagcttcggcgtatgcttttcgcaaatatttgagactaagtgcgttgcggaaggtagaggcaataaacgagataattagcaatactgcaatggggtatgtctctgcgccgggagttaaggcaatgtatgcgctgaggccggttgctgcaatttccaaaatgataaggatatagtctgcggcaacacaaatggcataacatatccgtaaaacatagcccttttttgaatatatgaggtactcagaatcgtttgtttctgaggagcttactccggtcttagggcgcttggatatacgccaaaaggcaataccgataaggacgagtgcaactaccacaacagaaacactcgaaataagaaaagtacgcacgattcctactgctaacatatgaatccctcccagtttaagttagttatagtatcaattctattgcatttttaatggttacgcaacgaggaattctatagtctatagtgagagtgaacgatggaatggtggatgaggttgaaactaaataaggaaattaccaatacggtgaataaaaaagaggcggtgtgaatcgcctcttttcctatagaataaatggaaaggaggaacgcccatggctgtattcagagtggagaaaacgcggaactataccgtgatgtccaaccagcacctgcgggacaaaagactgtcgctgaaggcaaagggactgctgtccctgatgctgtcgctgccggaggactgggactacaccaccaaggggttggcgcgtatctgcaaggacggtgtggacagcatctgtaccacggtgcgggagctggaaggcacggggtacatcgtgcggaagcgggaacgccgcgcagacggaacgctgggcagcatcgaatacaccattttggagcagtcgcggcaggcagatgctcctaaacgggaaaatcccgttcaggcggaaaaatctgccgatgcacctaaacgggcttttccagaacaggtaaaacctgaacaggaaaagcccgcccaattaaatatacaagaacaaagtaaagagaaacaaaatacggatgttcttacatccttcccttccttctggcgcgaggatagatctacgcagaaggacagaatggaacggaggaagatatacagcgagcagatcagggaaaacatcagctacgattacctgtcaaattataccaacgccgaccgcgagcgattggatgagctggtgagcctgatgctggataccgtgtgctctaccaagtcctccattcacgtggcgggagaggagctgccagcggaggtagtgcgttcaaggctgctgaagctgaccggagcacatctgctgtatgtactggatcggatcaacgagaacaccaccgaggtgcgccatgtgaagccatatctgctgactgcactgtataacgcgccgttgaccatggataaccactacgcgctgatggtgggccatgacctcagcggcggaaacgggtagaacagaatactgtcagagcaagagccgaaaggctctttttttgttgcacgaaatggaggtgtgcttttgaaaaccatcgcactggcaaatcagaagggcggcgtgggcaaaaccaccacagctgccagcttgggtgtcggccttgcccagcagggcaagaaagtcctgttggtggacgccgacgcccagggcaatctcacccaaatgctgggctggcggcagccggacgagctttctcccacactggccgacctgatgagtaagaccgtcaacgaggaacccatcgcacccggcgagggtatcctgcaccatgcgtccggtatcgatcttgttcccgccaacattgagctgtcgggactggaagtaacgctggtgaacatcatgagccgggagacggtgctgcggcagtatctgtccacggcggcaccggcctatgactacgccatcatcgactgtatgccctcgctggggatgttgaccatcaacgcactgaccgcggcggacagcgttatcattccggtgcaggggcagtatctggccgccaaagggctggaacagctcatgcgtaccattgcccgcgtcaaacggcagatcaatccccacctgacggtggacggtatcctgctgaccatgatggacagccgcaccacgctggctaagggaattagtgagcagttacgcaggaactacggcagccgagtattcgccagcgagataccccgttctatccgcgtggcggagatcagcgtcacaggaaccagcatttatgagcatgacccagaggggaaagcggcacaggcgtatgccgcgctgacgaaggaggtgttgcggcttggcccgcaaattaaacggcatagagctgacccggtacgatgatctgttcaaaacagacgcagagcgggaagccgaccagcaggagcgggtacagatcgtgccggcggagcaggtgttcccctatgcgcggcagccgtattccgtagaccggcccagtgccgatctggtgcggctgatggacagcatcgagcgcaccggcattgccgagccgctgatcgtccgtccccgcagcgagggcgggtatgagatcatctccggccaccggcgcgattactgcgccaaggtggtgggactggatacccgtccggtcatcgtgcgcaattatagtgacgaggacgcggacattctggtggtggactacaacatcaaccgagaaaacctgctgcccagcgagaaggccaaggcgtataagctgaagctggacgccatgaagcggagcgcaggacgacccgcaaaaaattctgcccaagttgggcagaattttcaggggcgcttttcggtggagattttggcggagcaagcaaacgagagccgtatgcaaattcaacgctatatccgcctgacgaacctcatcccgccgctgctggaggcggtggacacagggaaactgaaattcgttccggcagcggactatatctcccacctgaccgaaaaagaacagacctacctccagttcctcatggagcgggatgaggtatcccccactgtggatcaggcgcagcggctcaagcagatcagtgcagagggcaagctggggaacgacattatcgacagaatcatgcgggaggaaaagccgctggagcgcaaagtgaccatccgcagcgaccggctgcaaaggtacttccctgccagctatacccccaagcagatggaggaggtcattctcaagctgctggagggctggcaccgcagacggcagcaggagcaagcaagatgaggaggaaacaaatgcgcagaaatgaattgcccgatacctgcctttctacgctgccctccaccgggcagcttgtcgtacttaaacacggcgtgcgtggctactaccgctcggagtgggacaccgggaatcgcgcagaaaaccgtgatatcgcagacagccataaccggcggcgcggcattacggatattcaggaaactgccatgatggcaggttccatgtttggctgggatacgccgggagccgagccgcaatggtacttggacaatgccagatataggaacgcgacgacggcgaaggggcatatcaaagaccctgttatgagtatctactatccggtggacgatttcctgctgcgatatgaggtcatggggaaagaaaaactatatctgccggtatcggcgcttccgagggagctgctgggcgcaaggtcacagtttgtcatgcagccggatctggtctgcggtgtacccgccatgccggtgaaggcgcagcaggcacagaacggcagctaccccatggaggtgga

SEQ ID NO: 1238 - DNA, 6117 bp, Unknown
  16S sequences of unknown bacteria
ctactcccctgcgcgcccatggcgcgcagtccggggtgcaggggcactgcccctgcctaccacattttggccattttggagagcttgtccacctgcttctgaacctgcttcttcattttctgattgccgggcatcagcatcgcacccgcgccgaccgcgaatccgacggcccccgcgaccgccgctttccaagcgctcattcccatgcctcccttctggaacgttcccgaaattccgcccatgtcatcagctcggataccatcgcctgctttccgtcgcctgccacccggtaggaaaccgtgtaggcacagcgccccagaagcgcgtaaaccggccccggcgtgacctccagcgccaccagccgcagcgtcagcccgctgaaaagcgcgtcgctgaccagccccgcccgctcgccggtggtcagataggcttgcagggcggaatccgtcaggccgtcgggcagcggctccggcttggccccggccaaaacgcaggtgcgccccaccagacgaacgctgctggaaggcagccaccgcgccaggccgatgcctttacggatcaccagcccccgcagccgccgggcggatgcgtccgcgatcgcccgttccacacatccgatctgccggtcctgccagatgacgggcattcccgcgattcgattcagactggtgagcatcgcttcgttctcctttccgcgccgtccgcatgaacgtatggctatcttgccccggccgacgcttttttcgacaaacaatgcttgccagcgccgccctctttcgtccgtaaaggaagaaaagcgaaattgcaaactcaaaggccgggaaatttctggaaggagacttttctcaaaagccgacgctccttcttttcccaaacacaggatggaaacggttggaaaaaacgcgcttttctgcccctctgattggcttggatccctttattttccagtatttttgtgcatgaagccgccctctctgttcgtcggataggcgaatggcacggaaaaccaaccgcgccataaaagaaaaggaggtatttcatcatgcaaaagacccgtctatacaaaagatgcctcccggtgatcgctctggttctggctctggcccttccgctggtttcgctggcggaaagctataaggtcgtgaccggcggcggtctgaatctccgcaaggagcccagcctgaactcttccgtgctgggccagtaccccacgggcacctggatgaccgtgctggaaaccaccggcgactggagcaaggtgcaggtcaatggtaagaccggctacgttctgtccaagtacctgaccgactccaacgtcaacaataccctgaccgtgcgcaccaacaccggcatcggcctgaacgtgcgcactgcgccttccctgaccggcgatatcgtgaccagcttcaagaacggctccaccgtgaccgtgctgagcaagggcaacggctggtataaggtgcagcagggcgacgtggccggctacgttgccagccgcttcctgtccggcaacgcgggcagcaccaccaagcccagcggcaagcagggcgtggtgaagaaccccggcgcgaatcaggtcctgctgctgcgggaaaccgccagcaccgacgcccgcgttctgggctattaccgcaacggcaccgccgtcaccattctgggcgaaagcggcagcttctacaaggtgagcgtaggcggcaagtccggctacatgatgaagaagttcatctccgtggtgggttcttcctccggcgctgcctccaccctgccgaaggcccccttcaccgccaagctggtgaaccccaacggcaacggcatcgtgaatttccgcaaggcccccggcctgagcgcctccatcatcaaggcgtaccccattggcaccgagattcaggtgaccgaagtgggcgatgtgtggtgcaaggccaccatcgacggcaccgaaggctatgtgagccgctacttctttcaggtcgtgaaataagacggctttcccttcccaacagcaaagaccagcgtgttccgaatacacgctggtctttttgcattcatttttgggttttccatcgacccggcaaatgtcagtttcaccgcgtcctgctcggcttccccctatccatttttggtgcggaaaactttataaaaatgccagcgtggttttcacttcacgctggcattttatgtgagccgcgaggcccgtcgccgagcggcggccttttctgctcaacacgcaggaaaatcacaccagatcggcgagccgtggcacctgtcgtgccacggcggtaaaaccccggccaactcacatgtcctctactcccctgcgcggcttcgccgcgcagcccggggtgcagggtactgcccctgcctagaggactttgtccagaaattctttcgcgcgggcagatttgggtgtggagaaaaagacgtccggcggggcattttcgatgagtacgccctcgtccaggaaacaaatgcggtcggagacttcccgggcaaaccccatctcgtgggtgaccaataccatggtcatgccggtctgggccagctttttgatgacctccaggacctccttgaccatctccgggtcaagggcggaagtgggctcgtcaaaaagtaccacgtccggctccatggccagcgtccgcgcaatggcgacccgctgcttctgaccgccagagagcttgccgggataagcgtcgattttggagagcatgcccacgttgtccaaaagctcgcgggccttggcaacggcctgttccttcggcaccttgttgaccttcatgggcgcgtagatcatgttttccaataccgtcatgtgcgggaaaagattgaagtgttggaacaccatgcccaccctgcggcggacggaataggtgtcctcaaaatgatccttcatgatctgcttcatcagcctctgataggccatgccttcccggggcttgagcagatcttcctttttgatcttcatgatggcgagttcatcctccatcccctgcgctcgaagctcgccgtaggtcttggagtcacggatcacgtcccagtgcagatagggatcgggcggcgtaatgagcttgccctccacccaaatttcgccgtaagtcggcttttccagcaggttaatcgaccgaagcagcgtggattttccgctgccggagggcccgatgatggagatgatatcgccctgctccacattcaaactcacgccccgcagcacgtgcagcgcgccaaaatccttgtacagccctttaacctcgatcacttgcgttcaccttcttttccagcgcctttccaaggaaggacaggcccaacaccagagcataatagaacacagcaatggcaaaaaacggttcgaacgcccggtacgtccgggcctggatccgctggcccacgctgaggatatccaccagaccgatggaggcaatcagggtagtattcttcaaaagactgataaattcgttcaccagactgggcagcacgctcttgatggcctggggcaggatcacatccttcatcatggagggatagtgaactcccagcgccatggcggcttcgtactggccacggtcgatggcgctgatgccgcccttcaggctttcggaaatgtacgcggcggagttcatggcgaagaccagcgtaccggcctgaaaggcggtaaaacgaaccggcagcaccagcggaatgccgaaatacatcatgaacacctgcaccagcagcggcacaccgcggaaaatcgaggtgtaaaagaacgcaaaccactgcaggggcttcagattggagatcttgcacagcgacagcggaatggagatcagcaatcccaagatcagcgaacagacggtggtttccagcgtcaccagcagcgcgtcgccgaaggcgggcagccagtccagaatgattccaaaatccagttgcacggcgttccattccttcctatcagaacgtttcgaaatacgcgactattcaagcctactgtcattgattcatgcttcatcaaatcaattctttattttgaaatgacaaaaaacagagccgtccaccaaatggacggctctgaaaaaaccggggaaaattacttgttgccttcggccttgatggcggcatgagcagcggccagacgggcgatcggcacacggaagggagagcagctgacgtagttcaggcccacgttgtggcagaactcgatggtggacggatcaccgccgtgctcgccgcagatgcccagcttgatgttggggcgagtctcgcggcccagcttggcagccatcttcaccagcttgccaacgccgtcctgatccagacgcgcgaagggatcgctctcgaagatcttgttctcgtagtagctgtcgaggaacttgccggcgtcgtcgcggctgaagccgaaggtcatctgagtcaggtcgttggtgccgaaggagaagaactcggcttcctcagcgatctcgtcagcggtcacggcagcgcgcgggatctcgatcatggtaccgatgtggtattccatggtggttccctgctcagcaaagatcttctcgatggtgtccaccacgatcttcttcacgaaggccagttccttcttggagccgaccagcgggatcatgatctcgggcacgatatcatagccgcattccttgcgcacgttgatggcagcctgcataaccgcacgggtctgcatctcggcaatttcgggataggtgacggccagacggcagccgcggtgacccatcatggggttggcctcgtgcagagcggtgatcttggccttgacttcttccacagtacggcccaaattcttggccagctcggcgatttcgtcttccatgtccagatgaggcacgaactcatgcagcggcggatccagataacgcacggtcatgggacggccttccagagccttgtacatggcttcgaagtcaccctgctgcatgggcaggatcttcgccagagccttttcgcgctgttccttggtgtcggccaggatcatctcacgcacggcggcgatacgggtggcctcaaagaacatatgctcggtacggcacaggccgatgccttccgcgccgaacttcacggcctgcttggtgtcgcggggggtgtcggcgttggtgcggaccttcagggtacgcacagcgtcagcccagcccatcagacgggcaaagtcgccggagatggaagcttccacggtggggatcaggccgtcgtacacgttgccggtggaaccatccacggagatcatgtcgccctcgtggtaggtcttgccgttcacagtcacggtcttggcttcttcattgatcttcagatcgccgcagccaacgacggcggcacggcccatgccgcgggccacaacggcagcgtgagaggtcatgccgccgaacacggtcaggatggcctgagagaagtccatgccttcgatgtcctcgggcgtggtctccttgcggaccagaatgaccttttccttgttcttgccatgcttcgcagcttcgtcagcggtgaagtagatagcgccggcgccagcgccgggggaagcgggcaggcccttggcaatgacgggagcggccttcagggcggcagcgtcaaagttggggtgcagcaggctgtccagctgcttgggttctaccttcaggacggcttccttctcggacagcacgccttcgtccaccaggtcgacagcgatcttcagggcagccgcggcggtacgcttgccgttacgggtctgcagcatgtagagcttgccttcctcgatggtgtattccatatcctgcatgtcgcggtagtgggcttccagcttgctggcgatgtccacgaactgcttgtacacgtcaggcatctgattctgcagctcggagatggggctgggggtacggataccggcaaccacgtcttcgccctgagcgttcagcagatattcgccgtacagcttcttttcgccggtggcggggttacgggtgaaagcaacgccagtaccggaggtctcgcccatgttgccgaacaccatgctctgcacgttaacggcagtgccccagtcgccggggatgtcgttcatgcggcggtagtagatggcgcgggggttgtcccagctgcggaacacggccttgacggcttccatcagctgaaccttggggtcctgcgggaagt

SEQ ID NO: 1239 - DNA, 3511 bp, Unknown
  16S sequences of unknown bacteria
cacctccctttacacaagagaggcttgaatgtgcagagcccattgctttttccatgcggaaaatataaaatcgggtttttgtctgatttcggtgccttcacaaaaatacgaaattatatttttgctcggcccccggctccctcgtggaaaattaaaagaagttttcgcataacgtcggctcccttgtgtaaagggagctgtcagcgaagctgacggagggattgtagatttccgaacaagcccctgatttatcactcgccgctgtttgagctgtttgttagtaagcttatatgttaccttaagaccgaattttccaaggcatataaaaacatcctcccgggaataagcgcgggaggatgttcgttttgttttgaaaatttcagccgttataaaggttcatggccttgtctgtctgacccgttaccatgagctttaccgcctcgactccgcggtcgatggcgtcggcaagcttcttttcctcctcgcccctgacctttccgagcacaaaatcggcgaggtccatgtcggggtggggtttgggcccgattgccacccgaaggcggagaaaatcgtcgtgacccgtgagataaattatcgacttgatgccgttgtggccgccgtcggagcctttttttcttatgcgaagtttgccggtgtcgagagccacgtcgtcataaaccacgatcaaccgctcggcggggattttatagaaattcagtatatcccgcaccgcttcgccggaattgttcataaaggactgcggcttgacaagcagcaccctcactccgtctataacgccgtcgccgtaaagcgccttgaatttgagctttttaacgtcgcagccgattttgtcggccagtcggtcgatgaacatgaaaccgacgttgtgacgggtcagctcatatttttcaccgggatttccgagccccacaatgacgtaggagggggagagggcggaagaaaaatccttctttttcgatttaaaaaacatatcagtcgttgaacatggtgccgagaggcttgtcctcataaatgcgctcaatggcctcggcaaaggtgggcgccacgggcagcgtcacgatcttgtcgatgttcttttcctcgggcagggggatggtgtcgagcaggacaacctccttaatggggctttcctgaatacgctcgattgcggggcccgaaagaacgccgtgggtggcgcaggcataaacctctttggctccgcctatttcctgaacggcctttgcggcgttgcagagggttccggcggtgtctatcatgtcgtccacgagaatgacgtttttatccttaacgtcaccgattatgttcatgacctcgcagacgttggcgcgctggcggcgcttgtccacaatggcgatgggcgcgtcgagacggcgggagaagtttctcgctctcgtgaccgagccgaaatcgggggatacgacgacgatgtcgtcggggcttgtgccgaatttatcaacaaaatagggggcaagaaggggcactccgaggagatgatccaccgggatgttgaagaaaccctgaatctgagcggcatggagatccatggtcagcagtcggtctgcgccggcggccgtgataaggtcggcgcacagcttggccgaaatcgggtcgtgagccttggcctttctgtcctgtctcgcatagccgaagtaaggcatgaccgcggttattcttgcggccgaggcgcgcttcatggcgtcgatcatgatgagcatttccatgaggttgtcgttgacgggagcgcaggtcgactggacgataaaaacgtcggagccgcggacggtctcgttgatggaaacggaaatctcaccgtcgctgaaggtgcgcacgtcggaattcgagagtctcagtcccagtgaatcggcaatgcttttggcaaccggtcggttggagtttgccgaaaaaatcttgatgtcttttccgtgaaaattcattttttttccccctaaaaactttggcaataaaacctatgtcatgacaacgcaaaacagcccgccgaggtctcggtcggacgccgtctgtcatcttcattttacaacaaattccgagttttgcaagtgttaaatattatcgacacatataaatggttaatttagactaatttttcggctttttcgggtaaaatttttcatataaaaggggtagcaattatcatacctttttgatataatacattttgaaactgaaattcgggggttttcccgtttcggtctttaaaaatgtcatcaaaataagatggaaataaaattgagaggaagtttcaaaatgagcaaaaagtattgctatcttttctctgagggcaatgccaacatgagagagcttctgggcggtaaaggcgcaaaccttgccgaaatgaccaacatcggtcttccggtgccccagggcttcaccgtgaccaccgaggcctgcacccagtattatgaggacggtcgcgagatcaatcccgaaataatggcagagatcaacgaatatatcggcaagatggaggaaatcaccggcaaaaagttcggcgataaggaaaatccccttctcgtttcggttcgttcgggtgcccgcgcttccatgcccggcatgatggacaccattcttaacctcggtcttaacgagaccgttgttaacaccatcgccgagaaatccggcaatccccgttgggcttgggactgctacagaagatttattcagatgtattccgacgttgttatggaagtcggtaagaaatacttcgaggagctcatcgatcagatgaaggccaagaagggcgtaactcaggacgtcgacctcgacgccgaggatcttaaagagcttgccggccagttcaaggccgagtataaggcaaaaatcggcgaagacttccccaccgaccccaaggagcagctcatgggcgccatcaaggccgttttccgttcctgggacaacccccgcgcaaacgtttaccgccgcgacaacgacattccctattcctggggtactgctgttaacgttcagtccatggccttcggtaacatgggcgacgactgcggaaccggcgttgcatttacccgtgaccccgccaccggcgcaaagggtctgttcggcgaattcctcaccaacgctcagggcgaggatgttgttgccggcgttcgtactcctatgcacatttccgagatggaagagaaattccccgaggcattcaaggagttcaaagaggtctgcaagactcttgaaaatcattacagagatatgcaggacatggagttcaccgtcgagcacggaaagctcaacatgctccagacccgtaacggtaagagaaccgctcaggccgctctcaaaatcgcctgcgatctcgttgacgagggcatgagaaccgaggaagaggccgtcgcaatgatcgaccccagaaacctcgacacccttctccatccccagtttgacgccaaggcccttaaggccgctacccccgccggaaaaggcctcggtgcttcccccggagctgcctgcggtaaggttgttt

SEQ ID NO: 1240 - DNA, 11646 bp, Unknown
  16S sequences of unknown bacteria
ttgtcggtgaccagagattcggtcgtcaggacgcaggagcaaatggaagctgcgttctccagggcgctgcgggtgaccttcgtcggatccacaatgccggaggggatcatgtcgcagtattcctcggtgtaggcgttgtagccatagccgaccttgccgctgttgcggatcttctcaaagatgacagagccatcaacgcctgcgttctccgcaatctggcggatgggggcctgcagagccttggcgatgatcatcgcaccggtctcgactgcggggatggcattgacataagccgtgccgccgcctgcgacgatgccttcttcgactgctgcacgggtcgcgttcagggcgtcctcaatgcggagcttctgctccttcatggcaacttccgtctgcgcgccgacgcggatgacagcgacgccgccagccagcttgcccaggcgctcctgcagcttctcggtctcatattcagaagtcgtcacagcgatggagtttttgatctcctgctgacgggccttgatggcctcggggtcgcccagacccttgacaatgacggtgttttcgctgctgatcttgatcttttccgcacggcccagatcagatacgtcggtatccttcagttccatgttcagatcggaggagatcacggtgccgccggtcaggatggcgatatcctgcagcatagcctttctgcggtcgccgaagccgggggccttgacgcaaacacaggtgaaggtgccgcgcagcttgttgaccagcagggttgccagtgcgtcgccttcgacgtcttctgcgatgatgaccatcttcttgccggcctgcacgatcttttccagaacgggcaggatctcctgcagggaagaaatcttcttatcggtgatcaggatatagggatcgtcaatgacggcttccatcttatccgtatcggtgatcatatagggggagatatagccgcggtcgaactgcatgccttcgacaacctccagggtggtgtctgccgtcttggattcttcgacggagatgacgccctcggcggtgaccttttccatcgcctcggcaatcagtttaccgacctgctcgtcgctggaggagacggtgccgactcttgcgatatcgtcgctgcccttgacaacttcggaattcttcttgatggcgtctactgcagttgcgactgccttctcaatgcccttccgcatgaccatggggttggcgcctgcggtgacgtttttcaggccttcgcggatgatggcctgggccagcagggtagcggtcgtggtgccgtcaccggcgacgtcgttcgtcttggtggcaacctggcggaccagctgcgcgcccatgttttcaaacgggtcttcgagctcgacttcctgggcgatggtcacgccgtcgttggtgatgagcggtgcgccatacttcttatccaggacaacattacggcccttggggcccagggtaactttcacggtatttgccagctgatcaataccagcctgcagagatttgcgggcgtcttcgccgtaaacgatcattttagccatagtaatgaacctcccaaattagtctgccacgacagcgaggatgtcctcctgccgtacgatggtgtagctgcaatcgtcaagctcaacgtcggtaccggcgtacttggcaacgatgaccttgtcgccagccttgacggacatcttgacctcatgaccatcgaccataccgccggggccaactgcaacgacctcggaaacaacgggcttttccttgctggccgtggaaaggatgatgccagacttggtggtctcttcgacttcaacaggtttcagcagaacgcggtctgccaacggtgtcagtttcatatgtgtgtgcctcctaatcatcattcatgccggctgttttgccggacaaaggtttacagatttttatggtgttagcactcgaaatacctgagtgctaacaggtattataataagtcacaacgtcccaatatgcaagaggagaatagttttgattttctggaataactctgattaaataagattaaatcaatacagcatgtatttatctgatattatctcgcgtatacgccagatttctcttgattttgagaaacggaggaattccagtgcaatccctgggggacacagaagcggattttctccggcgcgacggcaaaagatgccttctgtagtgtgagcagttcgccgtccaaattcaccgcgacgggacggtctgcctccacggtgatgctcttacagcggtaatagcggatgaggtccggcagctgccggtattgcccggccttgtacttgccgatgacctgagcgaccttcagccgcgtgacgtcccgtaccagcagcacatccagcaggccgtcgtctggctgcgcctccggcagagggtagaatccgccgccgtagtagcgcccgttggcgatgcaggccagagtgtattcgctgtcgaagacctgaccgtcgacggtgatgcggtagtgctcatgtacgccccggagaagattgaccaggatggagagaacgtatgccccggaaccggtcacgaacgggagccgggtgtagcggttcacgctggtgccgatgcgggcgtcaaaaccgatggagcagacattcagtgcccggtgcttgccgcattggatgaggtcaaactccgccgcctggctgtccagcagccggggcagctgggtaaaggcggtgggctcagaaaaaatacggacaaagtcattgccggagccgccggcgtaatgggtcacggcagcgttggggtggctggccgccccgttgacgacttcattgagcgtcccatcgccgccgcaggcgtacaggcgcaccggctggccgcttttggcggcgtcccgggcgatgcgggtgcagtcgccgggggcgatggagacggcgatctcgtagtccattccggcgcagcagcgggcaacttcggcagtgactgccgcggtcctgtcgtgctttccggcggcagggttgatgataaatacatgcttcatggcaaacttcctctggtttggcgtatgaatcgcctaaaaatacatatatatattacattgcagccgcccgttatagagcttgcgccgcttcgcagccggtgcgccgaaatagcgctcaaactccggttcggaggaaatgacatatttatgccagcggtcggcataacgcagatgacggccgaaggcccggaccaactgctgggcctgcttttgctccagcatccgctcgccatagggcgggttgcagacaatgacgccccgctctgcaggcaggcttatcttcgttgcgtcggcggcctggaagcggatccatttgccgacgcccgctttggcggcgttggcctgggacagcgcgatgttctgcgggtccagatcggagccgagaatttgatagtccccccggaattccaggtccttcgcctcctcctgcgcctgctgccagatcgctgggggcaggaaatcccactgctgggccgcgaagctgcggtgcaggcccggggcccggttcagcgcgataagcgccgcttcaatggggattgtcccggagccgcagaagggatcccagaagaaatcccggccccggtagcgggaaagcatgaccatcgcggccgccattgtctcatgcagcggcgccagattggcctccgcccgatagcctcgcttgtgcaggctgacgccggaggtatcgaggaagatctcgcattggtccttcataatagaaaagcggagctgatgcacggggcccgtctccggcagccaggaaagatgatagtgagcgccaagccggtccaccgcagctttttttgcgatggcctggcagtctggcacggagtgcagctggctgtccagactatagcccttgacggggaaggcgtcctccttgccgatgaaggcttccagggggatctttttcacgccttggtagaggtcctcaaagctgtggaccgggaaccgggccagcaggatcatgacccgctcgcccatccggcagcgcaggttggcccgggcgatatccgccgcggtcccttcaaaaaagacgcgccggtcctcgacgcggacgttttgcatttgcatccggcgcatttcatcgccgaccagcccctccagcccaaacagggtggggatgcacagggtataacgctccataataactccattctgccgccgaagcccgagcagggcacaaaagaaaatccccggcagcggcggacggggagatgcccgccggacgagcgcccggcgcgagcttttgcgttttttctattatatcggaagttttggcaaatagcaacgaaaaattgcgctcttttggagcccgataccgcccaataccagaaatttaccccttgacattggcctgaaatcctgtatgctaaaagtagcaatacgggaaaggaggcggggccatgggagcgatgttttggttctgggctgtagcctgtcttgtgctgttgatcctggaggccgcaacggcgatgctggtgagcatctggtttgtcggcggtgctgcggcagcgctgatcgtctgcctgtgcggcggtgcgctttggctgcagattgtgctgtttttcgttgtctcgggggcgttgcttttgctgctgcgtccgctgctccggcggcagtgcaatcccgataagctcaagacgaatgtagatgcgctgatcggcaagcaggccatcgtgattgaaaagatcgacaatttggaaggacggggccgcattcaggtggacagcgccgactggaccgcccgcagtgacgacggtagcgtaatcgacgccgggtgcctggtagagatccatcggatcgagggtgtccgcgcttatgtcgcgccggtccatgctgcagtaggtgctcgctgaggcacattgccaagaaagggcccggcgcatcatgccgggaaagaaaggagaaaactatgggaggattgatcattgccgctgtcatcgtcgtactggtgctgattttgatactgacgaatgtgcaggtcgtgcagcagtcgaaggcgtatgtcattgaacgcctgggcgcattccagactgtctggggcgttggcattcatgtcaaaatgccgtttatcgaccgggtcgccaagcgggtcagcctgaaagagcaggtgctggattatccgccgcagccggtcatcacgaaggataatgttacgatgcagatcgacaccgtcgtctatttccagattacggacccgaagctctacacctacggcgtggagcaccctatggtcgccatggagacgctgacggcaacgacgctgcgaaacatcatcggcgatctggaactggaccagactctgacatcccgcgatgtgatcaatacgaagatgcgcgccatcctcgatgaggtcacggatccctggggcattaaagtcaaccgggtggagctgaaaaacatcctgccgccggcggatattcagaattccatggagaagcagatgaaggctgaacgcgaccgccgacaggcgatcctgcaggccgagggcacgaagcgctcccaggtcctggtggccgagggcgaaaaggaatccgccattctgcgggctgacgcggaaaaacaggcggcgatcctgaaggccgagggcgaggcccaggccatcatgacggtccagaaagcgctggcagattctctgcagctgctcaacgcctcctgccccaatgaccaggtcatcaagctcaaggccctcgataccatgaaggccctgggtgatggcaaggcgacgaagatcatcattccctccgagctgcagggcctcgtcggcctggcagaggggctggtcgagtcggtcaaggagccgaaaaattaaatatcgtatcgcaaaagcacgctggtcgcttccagcgtgcttttatcaatctatgtcagagtaacacccccggcaaagccgggggtgttgcgctgcgcgttattgcagcccggcggggtcgatgccgccgcattcttgcagcaggagcgggatctgcacccgcacgttggtctggaaggccatctccgggtagagccctgggcagtcgctggggtaaaaggcccggcggaagacggcaatcagctcgtccatggtgacgccggggtggtacgcacccagaataaggtcgcgcccttggcggcagcaggcggcgctgcgctgcaaaaatgcggcgcagtccggaccatagagcatccccgcgtgggagaccagcagctcccgcagcggaagctgcgccgctttggcgatggcgtccagcgtcatctggtagccgaccagatacgctggcatgaccgtaccggacgggatggggatgcccagcgtctccggtgccagcagaatttgatgtgtttccagataaaagccgatgcagcagcgggtgtgccccggcagggcgatgatgcggatggtatcgccgtccagggggatctggtcgccatcctccaccggaaggtcgacgcggagcgcgtcgatgcagtcgggcgcgccggtcacgccgcattgcgcagcctggtaagcgtccagcctacgcatcagcgcccgggcgtgtggcttttggaagatcccggcggcgtagcggctggcgacgacggtcgcctccggccaggcctgcttgcagaagacgctgcccagcgcgtggtcatagtgggagtgggtcagcaggatatagtctagcgcccgaccctgcagcgtgcggcgcaggtgttctaccagctgcgggccgcagaactgaaagccactgtcgacgagcagcgttgagccgcctacaaagagcaggtagcactcgccgcccggggcggccccaacggggacgacgcgcagctgggagcgctgcggcccgtcaaagcggtcgatcctctcaaaaaagctcatgtgacgctgacctgcccggccaggatcgcctggtaatcggcgtagttttttgccagcagcgccggggtatccaggtgatacggacatttggcggcgcatttgccgcagtgcaggcaggtggaaatttttgccatctcctgctgccaatgcgcggtgagatacggtgcggcaggggcccggcgcatcatcagggacatccgggcgcactgattgatctcaatgccttgggggcagggcatgcagtagccgcagccccggcagaaatcgcccaccagctcctgccggtccttggcgatcacggcttccagcgccggggtcatggcgggcggctcgtcgataaaggcaaggaattcttccagctcccgctcccgctgaatgccccagatgggcagcacatggtcaaactgcgccatccaagcggcagctgctgcggcgtttagaatcagcccgccggccagcgccttcatggcgatgtagcccatatttgcttgcctgcagccctcgaccagggccagctcctgcggcccggagagatagctcagcggaaattgcagcgtttcataaaggccggagtcgatgcagtcctgcgccacggagagcgcgtggttcgtcaggccgatgtggcggatcatgccccggcgcttggcctccagcatgcattcatacattccggtaccatcgccgggccggtaacagaccggcggcagatggaactggtagaggtcgatgtagtctgtctggagtagccgcagggaggtctccagatgctgccagaattcctccggcgtttttgcatgggttttggtggcaagatagatctggtcgcggatgcccagggggccgaaggccgcgcccagcttttcctcgctgtcggtataagcccgggcggagtcgaaaaagcggatgccgccgtcaaaggcccggcgcaggagacggactgcgtcctcttggctgattcgctgcaccggcagcgctccgaagccgttgcgctggcaggtaatgcccgttttgcccagtgtgatggttgccataagcagatctccttttttgttccgattatctgcgcttttcgtgcgctttaaaatatgcggtggccgcctgcatagcggcaagcagctgcgcagcctccgcctccgttgtgaaacgggagagggagatgcggatgctgctgtcgatcacggcgggaggcaggccgcacgcctgcagcacatggctgcgatggcccttgctgcaggcagagcctgcggagacatagcagtcatggtcctgcagcaggttgatgatattctggctggggacgcctggcagcgcgcagctgatgatctgcggcgcctctgccgcgccgaggagctgccagcccggcagctgggcgatgttttgccgcagcgtgtcgcgcagcgcggcctgatgccgcaggtcagccatgcgggtcggataggccgcggcgcaggctgcgccaaaggcggcgatggcaggcagcgcttctgtcccggagcggtaattctgctcctgtccgccgcccagcagcagcggcggcagtgtcaggcccggacggatatacagcgcgccgctgcccttgatggcatgaatcttatgcccggagacactgatgaggtccgcccccaacgtttttgcctggaaggggactttaaaaagcccctgtacggcgtcggtatgaaacagcgctgcggggcactggcgatgggtcagcttggccattttctcgatgggcatcaccgcgccggtctcgttgttgaccagcatgatggagacgaggatcgtatctggccgcagcgccgcctgcagctgcgccaggctgacgcgcccggcctcgtccggcggcagaaatgtaacatcaaagccctgctgggccagcttttgcatcggatgcagcacggcgtggtgctccacggccgtcgtgatgatatgcctgccccgcttgcccaggcgctcagcggcggagaaaatagcccagttatccgcctctgtgccgccggaggtgaaaaatacacggcgttcctccgcacccatggcctgggcgacctggcctcttgcccgggtcagcgcctggcgggcctggatgcccagccggtggacggaggaggggttgccccattcgttttccaaaagcgcccgcacggcgtccaccgcttccgggcagggcttcgtcgttgcggagttatcaaaatatgcgatcatagtctcttgcgctcgctttcctgcattatttgccgacacagaaccgggagaagatgcgttgggtgatgtcctcccggatcgtcttgccggtcagctccccgatcgcctgcatggcggcctccacatctaataggacggcgtccggcgtcatctgcgcttgcagaccggccagggcgcgttccaacgccgcgtgggcgcagcggactgcgcctgcctgccgggggttcgttaagatcgagccgtcgcagggtgcgccgccggagaatttctcggccagcgcctgccgcagcgcatccagcccctgcccggttttcgcgctgacggagaagacttcgtcaaagggcagatccgccggggaaacggcctggggcaggtcggctttgttgaggatcccgatggcgtgctttgccgcggctgcggcctgcatggcctgccggtcctcctgcgtcaatggggcggcgctgtcgcagaggaagagcgccagctccgcctcctgcgccgccgcacggctgcgggcgacgcccatggcttcaatctcgttttccgtctcccggatcccggcggtgtccagcaggcggaagagggtgctgcccagcttcacagtctgctcgacggtgtcccgggttgttccggcgatgtcggtcacgatgactcggtcaaagcctgccagggcattgagcaggctggattttccgacattgggcttgcccagcagcaccgtcgccacgccctgctttaaatactgcccctgggcgcaggtgcccagcagccgctccagctgctgggcggcgctttgcagcacgccggaaaaattttccagccggaattcgtcgatatcctcgtccgggtagtccagtacggcgtgaaaatggctgcacagatcgactaagctctggtagatcggctccagctgccggaccaatgcgccgccgacctgccccgcggcattggcggccgcgtcagccgtctcggcgtcaatgaggtcgatgacggcctcggcttgggtcaggtccatctgcccgtttaaaaaggcccgctttgtaaattcgccggggcccgcttgccgcgctccaacggcaaacagcgcctccagcccggcggccaggacagccgggctgccgtggcactgcagctccaccgtatcctccccggtataggtgtggggcgcacgggtgtagacagccagggcctggtcgatcacccggccctggagatcccgcagcgtgcccagcatcagtttgcgattcggtgcctgcgccagcggaatgcccgcctgcaggtcaaaaacttgcccggcgatctctgcgcagccgtcaccggagagccgcagaatgccgatggcacagggaatcttccccgaagcgatggccgcaatggtatctgccatatcgaatctcccccttttgcgtcgtttcttcttattatacgttacgccaacttttttcacaagcgcttttttgcatagatccccgcccagcgggaacgctatggcatggggtgagatacatggagcagcaatacaaaggcccggtcacagaccggcgcatccgggaactgtttgccgacgctggcgatttcaattaccgcactgtcgagatctgcggtttttccgttcatacctatgccattgacggcctgacctccggcggcgatatttcggatttcgtcatccgcccgctgctggagaatctccaggggaatagtatgcaggagctgtaccagcgggcgctgcagacggtggtctataactccgtggcagatgtctgcccggaccttgatacggcggcccggaagcttgtcaatggattttgcgttgtcctgtttgaagggaccggggccattgcttttgaggataagacagaggaaaagcgcagcccctcccgcccggaggtggagaacaccgtcaagggaccgaaggatgcctttaccgagacaatccgcaccaacaccagcctcatccgccgccatctgcgcacaccggagctgcaattgtatgagacggtcgtcgggcggcgcagtctgacgaatgtggccatcgtttccatccggggcctgacgtcgaaggagctggtgcggcggctcaagcagcgcctggcggagatcgacatcgacggcatggtctccccggcgtcggtagaggaatatgtcaccggctcccgggcgacgccgtttccgcttattcaatatacagagcggacggataaattctgccagggtcttctcgatggtcgcgtcggcctgttggtggacggcctgccccagggctatctgctgccagtgaacattggctatctgatgcagacgccggaggaccggggcgtggattatatctctggcacctgcgtccgctgcatccgctatctggcgctgctcatcagcttgctgctgcccgcagtctatgttgcgatgacgatgtttcatccggagatgatccccgacgcactgctgcagtcgatcatcgagagcaagaaagcggtcccctttgcgacagtattggaggtcctggggttgctgatcgcctttgagctgctgcaggaggcaggcatcagcctgccccagtccattgggcagacgatctccatcatcggcgggctcgtcg

SEQ ID NO: 1241 - DNA, 4139 bp, Unknown
  16S sequences of unknown bacteria
taaggtcaaagtggcagagaagaagctgacggtgaagaagggcgagaaagcatccttgaaagcgacggtcgctccattcacctcggctcagaagctgacctacacttcttcgaataagaaggtagcgaccgtcagcaagaacggcgtcgtcacggcgaagaaggcaggtacggcaaagatcacggtcaagtccggcagcaagaaagtggtcgtgactgtgacggtgccgaagacaaagacgacggcgattaccattgcaaagaatatcacggtaaagaagggcaagacctacagcctgaaggcaaaggtcgctccgaagaatagtgatgagaagatcacttacacctcttcgaacaagaagatcgcgaccgtcaccaagagaggtaaagtcaaaggcatcaagaagggtacggcgacgatcacggtgaagtccggatccgaaacagtcaaggtaaaagtgactgtgaagtaaacggacacagaaaaacaaaatagcgatttacaaagaagggcttttctttcagagcaactgcggaagagaagccctttttcgaaatggaagggaggatatagaaggatgaagcgtacatggagatgtctggtaggatggctgctcgtgggactgatggtcctgcagcttccgatgacggcactggcagacgagatcgtcccggttgaagtggaggaggctgcggagccttcactttcagaggcagagaccgggcagatagatgaggatgatccggtgatcgatgatgatttgccgattgattcagcagaagattcggcggttccctcagaggaggaaccggcggccgacaccgacctgatcgaagggatcgaggtgctcagcgatgcggaggccgcagcactggatacgcaggcggaggagagtgggccagaagatgcggagacgacagagatcgaggtgacggtcagtgtcagcaaatttggtgaatttttggatgacaaagacggcaatgtgatggccggacgcacggtaaccttaaccgggcaatcatcttacacgatgaacgatgcgataaaggcggctcacgaccagtattatccgggcggggcggaagccggctatgattatcatgcagatgaagaagggttttatgatggcgtaatctatcgcctgtgggggatcgaccggaaggatgccgcaggtatcggatatgccaagaaccacgatgcttcggtcatgtgggcgaatacagcactgagtgaaaaggtgcaggatggcgatgacctgcagttttttgttcaacagaagaatgaactgttagctttttttacacagacagagcagacggtcagtaaagatcagaatgcagttttgcgtctgcggacggcgaacggaaaccaatataaagactgtgcgggggcatccatttatattgatggagaactgcaggaagggcttgttacggatgagaacgggcgtgtgacactcccgacactggccccgagggacacgtcttatttcattacagcaaaaaagacaaaacaggctgatggggaagaatatagcgttatttcggcggcgtatagcaggttgacagtaattccggcgggggaagcatccggggattatgtgaaaagcgtgacgctgcggaatgtcgtggattggtataaaaaaaagcagactgagatgaccctgaaaaggttggatgggagcgaagcgtttttagtaccttctgaatatgtccatatgatgttgggcagaaaagatattgcagatatgtatgtatcagcggagttttcggaagatctgccggaggatgcgaaggcatatgtggtttatgaggatccggcagatgagagcgtgcaccgtatcgctttgcggaaaaacggctttacttatctgaatcgggcaatctataggtggaaccggaacaaggcaattcaatcttttcagatcgaagtccgcaaaaatggacagctaatagagacgcatacccttccggtgacgtataaaaatcatctgagattcctttcggtacaggactcgtgggggcatgaactattgccggaacttgcggatacgacagatgaccagcagtggacacttgaagtaccggaaaatgcaacgaaggtgacaattgattcgactccgtatggttatcgtgataattatggagcctgcactacaaaagagctggtcataaatggtgaggtgattcctcttgactttgctcaatcttatcagtttgttccagactggcagacacacgaggaatacatcattgagatgcggattatagatgatgccgcacttcattgtcttgattcggcttcctataaaatcaccttgagaaaaggtggatgggattatacaccggatgtccagcttacaagtacccgtggaacagggatgctggcacaggggtctgagtcaccggttttgacagcaaatgtttcggtgacaggaccaaatggagagacggaggataccagttcctgtagttatcagtggggatattatacacaaggcagtgaggggaaagatgtatatatcgaaattgaagatgctacggaagcttcttatatagtaccgacagataccagaacgattgcaagagggtactgctgcagggtgacttatgagaaagaggggcatgtttattcaggagaaagtggcgtcaaaaacttttgggtcaatccggagaaggtagagacgccggtgattgaaaagcagccacaaaatgtacaacatgtgcttggtaagcaggaaattattcagctggaaattgcattagaaaagacggagtgggagtatttcgcaactcaccttaaagcaaggtatcagtggtatcagagcgcagaggcagatgtcacaaagggaacgctgcttccaggtgcaacagatgcgacttttaaccctatagtaacaaaggtaggaacggtatattattactgtaaggtaaagtatgagcggtttgactataatgaagatacggggaatgtatattcttacagtgacgaggtttgctcagacatcgcaaaggttgaatgtattacagagtctttcccgtgggaaggaaatgggtcggaaagcaatccgtatcagctaaagaccgcagaagatctggaagcgctgcgcgagaaggtcaacacggatggctattccttcgacggcatgcatttccggatgatggcggacattacacttccatctgactggaagccgatcggaggcttggctaccggacatggcctgtcggaaaacgggaagtacctctgggctttttctgggattctggacggcgcgaaccatacgctgacggtggcagatggcggaaagccactctttaactacgtgcgggaggccacgatcgagaatctgaagctctatggaaagcagatcgatggctacggcctgatcgaccgctataccgtcgactatggcacggatggaaattatagtacgggctgcccggatacagctcggatccgcaacgttactttgctttccggcatgagcacgaaaaaggcaggactgatcggcgggtatgcgtctggttcaaatgatgtggtgatcgaaaattgtacagcggaagctggggtagtcattggctatactggaaaagaatcgggtatcggtacgtttgcaggcgattttaatggtgtgatccgcaactgtaccagtgcggcgacggtgtatggagtcgataaggtcggaggactggtcggagccaagggacaatcaatgagcgcgtgcacgatcacgaacagcagcttcaccgggacagtcacggcatccggaaactgggcaggcggcatccttggcagtggctatgagtcttcttccgcaccgaatacgccggtggcatctgtgaagaactgctacgtggcaggcacagtgtccggaggctcgaacgtcggcggtatcttcggcggtgagccgagctgtaaacagtgctggggcaacggcagcggcgcgatcacgaacaacttcttctacggcacggtcagcggcagcagcaacgtcggcgggatcgtcggctatctgagaagctttgacaagtttcagggcatctcgaacaattattatctggacacttgtgggacattacagggcatcggtggtatcggtacggttctggcggtatcgggcaacccgcaggatctgc

SEQ ID NO: 1242 - DNA, 32759 bp, Unknown
  16S sequences of unknown bacteria
cgtacacctccgcaagctgctcggtggttaaaatgcgctggtcgttgaattcgatgggggctaaggttttcatggggtgctcctttctaaatcgcctttacggcctgtactggataacatccagttctttttcatccacacctaacgttttggccatctctggaattttcccggatgcccgtttcgcggatttgtatgctcttgcccacttgatgtccgttgtaaaggtagccttgccacattcgtatccaataaagtaggaacgcccaaacggcgaattaagtatcgctatcacgtggcacgtctccattaggccagctcgtctcacttcttaacctcctgttctcgccgtagcgccttttggcctgtggtgatttttcacaccgcggtgtcagccgacaagcataaggtagccgctttctgtgataagcgtcatgctttcgggagtaccgccttgaggacgctccaaaccgagcgtccgaatttcgtccgcgcaaactttgaaataatccacgccctggatgcggtcggcgcttccgttatgaaatggacagcgcttggttatcggcggtaagaactccatagagttcctcgaacgtgtcctcgtaataggtgggctgggtttcgcgggggttgttcggatttacctggttttccccgtatctctgtcccgcctccgttaagcaccagaattttttactgttacccttgctgctcgggcgggtcttctgttcaaggtacccctgtgcaagcatcagacggttaaacacaaccgcgctcaccggtgctccgattttcctaagcagggtagtggcggagaactgaacgcggccggggacataaacggggagaaatccagtagggattccgacgtccttatagaaatcgtggtacattttcaccctaccggcctcgtttactctgaggctccgggccacaacctcaatagattccacaacctcctgcaaagggaactgaatcccggatgcctttccggcctttatgtagttctccatcttctcaaattgggtcgtgtatctcgcggtaaacagaacgcctttccggccgctcagcttattggcgatcatgtcgcagccgcggcgggtgcaatggtagcaagggagttctcgccctgtggggtcgtgataggtagattcgatgaagaattcactgacgggaaaattcccttcagtgaggtaatcgcaatactgccgaatggattttatgagatcgtagtgaggcttgcctatcatttgggccacctcgcggctgtcggtcagcagcttgccgttttcttggaacacggtcaaatcgttcattgcttactccttccttcaattttcatagggcttgatgatttcttcgattttgtccaggacggtttcggtatactcggtgtgatagtgtccgtttatgatcgcggacagatacggcggatccattcttttgtacccagccttgcgcagctcattgacaacccaccgctgggttttcccgataagcatgagccggattttaatgttgcgctccaattattcccacctcttttctcacgtttttattgacaaccagtcgtttttggcttatgatatggatgttgaggccaattgaataagccggttcagctttttgaaaaacgttttttcaaggggcttggttttttgttggctgttttgcgaaacaactggtgtatctatagtataagttcacaaaactggaatgtcaatacagttaactgtaatttacgacggtttgtattgttgcacacatagtgtgcagtttttttgttgcaacgttacagttagttgaactcttgttgtgaacggaggacagaaatgttttatgacattattgaacacttatgtaaagaaagaggtatctacgttacacaactggcttccgatattggcgtaagcaaatcaaacgttaccaattggaaaaacggaagcgttccaagaagcgacaaagttcgaaaaattgctgactatttcggtgtgaccgtggattatttattacgagacacaactcaccaaataagttttttggatcaggataccggcaataatattaaaaaaaagctcggcggacgcttgtccgacgagcagcaaaaacagtatgatgaattgatggaacttcttgagaaagtaccagaggataaacttgaggccgtaaaggctatgctgaaagctctggcgaatgaataaccgtgagcagaattgccttggccttttccgcgcgagattttagtacaatttcttgaagaataagttcgacggaatcctcttggccctgttcaactatatccttacgcttgagtttttccgccatgcttaactccccactttcactcataatccccctgcgttttcaattatagcagtattttgagccggtgcaagcgcggataaaaatgcatttttaatcacatttcacatattttttaacggaaaaatttggatatgtgcgttttcaaatctttaataagaacattagagcacatctgagaacaattgggcaatttttctccattaattacagcgtttcatgggcagtggcatttttgcggcatttgtgcacttatacaaaggtacatcaaatatatgttcgcctgcaatcactgttttaaccgatattagaagactttacacgattttgttagacgtcaataaagccaacgtgcatgaatataaaataagcagtattattattcttttagggcctaattttccgttcgaagttactaacgacaccatccgcaagtcgggtgtgataaagcaggaataaaaaaaaccgtccagggtggcacccctgaacggtcgagcgtgtagaaatcccagcggcggaatttcctccacgacaatattttacatttcttggcatatattgtcaagggaagtggaggggcagaaatgggagattcatcaggaatggcatactcttttggtcaagcggttggtggagctatgattgcgttatgggtgatcatcatctgcgtcgctattatcgcaattgcgctattggtttggttcatttatgtcatgaccaaaatcaaaggagaatgtacacgcactaataaactgcttgcggatgtactcaaaagactgggtcaaggtgcaatcaacgggggcggtgcatctgtttccgtttcagacgagttagctaaatacaaaggcttattagacgatggggcgataacggaagaagaatataatcttaagaaaattcagttgctgaataaataaaaaatcccgcccgccctgcaccaccaggacgaacggggtaccatcagccggacggcaaacggtacggcataactaccatgcctatcataccacacgccgtccgaacacgcaagaggcattatgcccggaaaggatggcaaaatgaacggggtaatttacgcaaggtacagcagccacaaccagcgggaagaatccatagagggccaaatccgcgaatgcaagcggtatgcagaacagcacggtattaccatagtaggggagtacgccgatcgggcgattaccgggcgcacggatgaacgggcggaatttcagaagatgatccgtgacgctgaaaaggggcacttccaggcggttatcgtctataaactggacagatttgcccgtaatcgctacgacagcgctacttacaggctcaagctaaagaagtgtggggtaaagattgcgtctgccatggaggccgtacaagacggcccagagggcattatattagaggctgtgcttgagggcatggcggagtactacagcgccaacctgtcccagaatatcaagcggggcatgacagagaacgccatgaaatgcttggccaccggcggagggcgctgtcttgggtataaaaccggcccggacaagaaatatgttattgacccgaccgcggccgatacagttcgccttatatacgaaatgtacgaccagggccatacttacgcccatatcgtggaaacgctgaacaaccaggggcgcaccacgttcaaggggacgccatttaacaagaattcacttgggaaaatcttgcacaaccggcgatatatcggggactatgtatggggagatatagtcgtagcgggcggaatgccccaaattattgaccgagatttatgggagagggtgcaagctaaattgtccaggaaagaaaaagccagcgccagagcgcggggggattacaattacattctgtccggcaagctgttttgtggaaagtgcggcaaggggatgataggggaccacggtacaagccggaacggcgctaagttttattattatacttgctctactaagaagcacggaggctcatgctctaagaaaagcgtccgggcagaaaagatagaggccgaagtgatccgtaccacaatccaaacagtcttgcaggacgatatgatagaatatattgccgacagggtgatggaataccaggccaaggacacggagggggccacgctcctgtcaagctataatacccgcctcaaggagacagaaacggccataaacggcattttaaaggccatagaagacggtttgtatacagccacaatgaaagaacgcatgggggagttagaagcccaaaaagaggatttaaaggctagtatcagccgggaggaaatcaaccaaagaaaagtgaccagggaagaactgattttcttcctcgagcgattcaaaggaggcaacccggaagacccggaatattgtcggcgcttggtagatacttttgttaattctatatggctgtatgatgataagctggtgctcacatacaatttcagcggcaacaagaatacagttacacttgaaatggttgaggctgcgctggatggaggcgcgtccggatgttcggataaggcttgtgctactccaccaacaaaaacccgccatggttttgccatgacgggtttttgctatgttatttttcgcttttatcttgtaagactaacagaaatttgcgataatataaaaaatgcaagagggtatatgatgaaaaaagccactcagatagagtcagcgccggtattttggtactttgaaaaaatatgtgctattccgcacggttcaggcgacatggatgccttgagtgaatactgtatgcggtttgcagaagaaaacggtttacaagccgtttgcgacgaggcaaaaaatgtggtgatctataagcctggtacaaagggctatgaaaatgctgagccggttattctccaggggcatcttgacatggtgtgccagaaaacggaaaattcaaccatggactttgcaaaagacggaatagaggcttttacagacggtgactttataaaagcaaaagggacaaccctgggcgccgataacggcattgccgtatcgatgatcatgaccatattggcaagccagaatctgccccatccgccgatcgaagcggtttttacaaccgatgaagaaataggcatgcttggagctcaaaggctggacaccgccgttttgaagggcagaagaatgatcaatctggacgcggagaaagcggagctcctgaccgtttcctgcgcggggggcagtgattgtaagctgatccttccgtttgatagaaaagtcgtgcgcggtacgaaaattctattggagatccaaaatttgaaaggcggccattccggcgttgatatcgataagggccgtgtaaatgccaacgtattggcggggagaattttgcatcatgcgaggaaaacgacggcgtatgatatcataaaaatcaatggcggaacgaaaggaaacgccattcccttttgctgtaaagcggaacttgtagtggaagacgcggaacgctttatacagttcatggaagactattgttctgttgtaaaaagggagatcggagacagggaagaacagtgttcgatccgtgtaacgatggaagcggccagtgagtttgaggttttggactctgtcgcccgggacaagctgttatacatgctgttgatgacgccaaacggtgtggtggacatgagtgcggaaatagacggtttggttgaaacctcattgaatctggggattctgatgacagaagcggacgaaattgttctgcagtacgctctgaggagcaataaaaaatccgccctgacttatctggaggacaagctcgcggcgtttgcctcctataacgattgccgcttcggcatatccggccggtatgtcccctgggaatttaaaaaggattcgccgctccaacaattgtatatggatgctttttgcgaaaagtttgggcacaaacctcaaattgccgccatccatgccgggttggaatgcgcggtgtttgcgcagaagattgagggcttggattgtattgcgattggcccggatatgtttgacgtgcatacggtaaatgaaaaactaagcatttcttccaccacggaaattttcgagctgctatgtgtcgtgctcgaaagatgcaaataaaatgttctgaaatacggcggcaatattctgtttatgacgcgtgcggagaggaatgaagaactatggataacaaagaatttaagccatatattccagcggaaaaaattactcccgaaattacgataacttctatcgttatgggcgtgctgttggccgttatatttggcgcggcaaacgcttatttagggttgcgggtggggatgaccgtttcggcgtccattcccgcagcggtcattgccatgggcgtcatccgtgtcattatgcgcaaaaattctattctggaaagcaatattgtgcagaccatcggttcggctggcgagtcattggcggccggtgccatctttacactgccggccctgtttttgtgggcggcggagggcaaggtggataagccgggcctatgggaaatcaccgcgattgctcttattggcgggttgcttggtgtgttttttatggtcccgctgcgcaatgcccttatcgtgaaagagcatggggtacttccctatccggagggaaccgcctgttccgaggtgcttctggctggagaagagggcggcgcgaaagcctcgactgttttcgccggcatgggctttgcggcgttattcaagtttattattgatggattaaagctggttgccggagaaatttcggtaagcgttaagggatttgcgggacagatcggcacgcagatttatccggcggtcatgagcgtgggctatatctgcggcgccagaatttcgtcctatatgtttgccggcggcattttgagctggcttgtcatcatcccgcttattgtgctgttcggtgcggatatgacgctgtatcccggaacagcgccgatcagcgagatttttgcaaagggcggcgcgggcgccatctggggcacctatatccgctatatcggggcgggtgcgctggctgcaggcggcattatcagcctgataaaatctctgccgcttattctaaagacttttggaggcgccgtgaagagcatggcgggctcaaaagagaaggcgaatgaacgcacgtcgaaagacatctccatcaaagtggtgtttctggcgattgtggttctgactctgctcgtatggctcatccccgccattccggttagtttgctcggtgcggtcattatcgttgtatttggcttctttttcgctaccgtttcctctcgcatggtgggcttggtcggcagcagcaacaatccggtttccggtatggccattgccactcttctgattgctacactcattttaaaggttagcggggcaaccggtattgccggtatgtgcagcgcgattgcgattggctcggttatttgtattgtttccgccattgccggcgatacgtcccaggatctgaagaccgggtaccttttaggcgccacaccgaagaaacagcagattggcgaaattgtcggcgttattgccgcggcactggcaatcggcggaacactctatctcctggacagcgcgtggggctttggtacagacgaactcgcagcgcctcaggccaccctgatgaagctgattacagaaggggttatggaaggaaatcttccgtgggcgctggtgtttatcggtgcttttattgccgtgttggtcgagattgtcggcataccggttctgccctttgcgattggcgtgtatcttcctgttcagctgaatgcgtgcattatggttggcggtcttgtccgcctggctttggataagctgaagcgcagcaaagaggaaaaggatgccattgtgaatgacggcgttcttttctgttcgggtatgatagccggtgaaggcctggtggggatcctgctggcaattttggcggtgtttggtctgaattccgcgattaacctgtccgaaaaatgggcgataccggcggtggtttccaatatcggaggactggtgttattcggtgtcatcattctgacgctgttgaaattctccttgtggaagaagagaaaataaaaatgcgaaacaaacagtccgaaaattatttggatgggaagccgctgcggaatgaaaaaatttcgtggtcggtcgaggatggacaagtaacgctggaaattgaaaataaaggcatatggaatacgctttttcaaaaagttttgaaaaagccgcggatcagctatgtgcatctggacgaaatggggagttttatctggccccttttagatggcgaaaagagcattctggagataggaaaagccgttgaagaacaatttggagataaggcaaatccgttatatgaaagattggctgaatattttcggattttggaaagctatcattttatacacttgaatacatgagctttacgccagctgtatccatatggtctttccatgtagatccgaatggctgtcgcaaggtggaaatgaagagagcggccaaggggttgaagccttggccgctctttatttggaggccggtgcgggttcgacaacgctgtgggctgtagcaaggctaatcccccttttggcctaaggcttgtttgccgcagaagtttttttgtgcggcgatggttgccagcgtatcgcccagctgtgtcagagtggccccgatgagagtaatctcgtcggcttcacgtccttcggcgatggcggccgctatggcggtaatgccggcggctaacgtattcggacacacaatgtcacctccccaatatatattctatgcacgagaccctggtcatgtccagccaagtgtgccaatcatgcaataagcgcgtcccccataacgcaggccaagttcccgggatccagcgtttatctatgggcaaatacagaaactttacaaatcgtttattgactaggcgctctataaatcatataatagactaatcggtctactatatgattgaaggggatccctatgaaaaaagcagaaaaaactgaacggacaaaggaacgaattcttcaggcagcgatggaagagtttggaagaaaggggtatgcggccgccaccataggcgccatttgcagcgaacacggcatcgccaagggcctgctctaccataactttgtgggtaaggacgacctgtatttagcctgtgtatcccgctgcttcgatgatgtgacggcatatctgcaggggcagaacctgggggcggatctgcatcgttatatggagtatcgttttcggtatttttccgatcatccgctgtgtgcagggcttttctttgaggcggtattgcagcccccggcagccctcgtctctgccattcgggaacgaaagagagcgttcgaccaactgaaccagcggatttaccgcgaggcgctgtccgcgatgaagctgcgcagggaagtcaccgaagcggaggccctggaatactacgccatcatgcaggagatgttcaatgggtatttcagcagcccggcctatgcgggcaaagattttaagacggtggtggccgaccatgaggataagctggccaaaatgctggatctcatgctgtacggtattgcggaaaggggctctgaaaaatgatcctgtctattgtgcggcttctggccgctgtgattctggcctttctggccgggaaactcatctccaagctgaagctgccctccattttggggtggcttatcgccggcatggctctgggccctcatgctttatctttggtaaacagcgccctcctcgatgcggtttggtatcaaagcgcggtgcatattctggaatgtgcggtcggcctgatgatcggcacggaactggtctggaagaggattaagaaatccgggcgctccatcatcatcaccaccctcacccaatccctgggcacttttctgctggtgtcgcttgtgttcggcatcgtcttctattttacaaatatcccgttgtatctagccttccttttcggcgggatcgctttggcgacggctcccgccccggcgctgtccatcgtgcgggaatttaagaccaagggccccgtcacttcgaccttgatccccatggccgcgctggacgatattgtgggctgcatcgtgtttttcaccaccattgcgctggtcgcggggaacctgtccgccggagaaatgcccgcttacatgatcgctctggtggtgctgctgcccctggcgatcggcgtggtcaccggcctgctggcgggtcttgtgctgaaaaaagagcgccctgcgccggttaccctggccctcctcatcatcaccattctgattgcctccggcgtagggttcctgtgcaacggcctgctgccccgcccggtgctcaatttcatgctcatcggcatggcgttttccgccactttctcgaatatgatgccggaggaacggctggagcagatcatgaagggcttcaatcccattctcggcgtggccatgattgtcgtcatcctcaacctcggcgcgccgctggattaccatctgatcctgggggccgggctgtttaccgccatctacatcattgcccgggcattgggaaaatattttggagcgttcttcggcgcggcggtcaccaagtcgcccaaaaccgtgcgtaattttctgggcttcaccctgctgccccattcgggggtgtccctggtctttaccggtatcgccgtgtctgtgctgaccggcccggctccagaatgcgcgaaaatcatccagggtaccatcgccgccgcggcggtcatcaacgagattatcgcggttatcatggcgaaaaaaggcttcgaatgggcgggggaatttcacaaaggagagcctgaggaagaggaaagccgtaaactaccggttgattgagaaatacgggcatacgctaagcgctgggcacagattttgtggcaatagcgccggaatataaaaccgcgggggaaattcgacgatttcccccgcttttttgccgcctgttcatataaaagacagaccagaggggcgctggcgtacattccttataagagagcggataaatcggctttccgcaaagagaggggatgctggaacgtattttgccattccgcataagctgtactatacccctacgggaaggaggttgtactcatgtcagaatgtacgagttgttcggctggagttactgctaacctgtcagagccggttgaaggcacttgcccggctgttggctatcagaaagtagctgtttgtgtcccggtgcttatcacgccttttgcgcataccggaaagacggtgaccaagtgctgcggtgagcctgctgttgttcctggcgaaatgccctgtcccggaaaaaagaacggcgtctgcgcatttaccatcagtcagacgatatgtgtggaggttcccgtgaactttggcgctacggcagtagtaggcgacacctttgttgactgtatcgacgcttccgctgaggatatctgtcggaactgcaaagaggaggtttgaaagaaatggcctatgataccccctgccagccggaatcctctattccatctgaaacatgcggatgcaagcaggatggatgcgaaaaggtcggttaccaatatgcggatatcagcgttccggtagaattgaaatcggatgcgagtattggcgaggtaacggtggaatgctgcggtgaaccttgtgtgaattgtcgtgaatgcgactgcggagacgcatgtgaaatcgtcgtcacgcaaaaggtgaacatccgcattccggtccattatcaggtaaccgcatgcatgggtgacagcaccatgaactgcgattgcggcggctcctgctgtcaataattttctgtggcgcgttgcgacgaaatcgcaacgcgcctacttattacgcagatctcttatggatatcttgaattgcatggtcggtttcacgtcatgcgttgtcttacgctgtgttatactttggctgggatagtgggggacgcagaacttttataacttttgggatgtatttccaactaagatcggtataatcttttggaatttctttaaataatattaattttgtaaagatcaatcgacaatttccgctttttgtgataggatatatcatgaaattgtcgaacaagtgcgagttatttcgaatttttcatgcatttgtaggacaaatttgaggaggaaaacgaatgaaaaaggtatggactctcattgcttgcttcgccgcttgtctgtctctggccgcttgcggcaccgattcgaacagcagcacgccgggcagcaccgtcgctaccaccaccacggccaaaaccgaggcggccgacaagacggagaaaaccaccgcggcgacaaccgcggcgaccaaggagcagggttccgccgccggcatgacgttggaagcgtatatcgcctcgatccaggacagcattgatcaaatgtccgccgccacggaaagcagcggcatgaagatgaaggtgttcgcacggggcaagtccctggtgtacagctatcagtataccatcgatctcggggatacgtcgctgctgaaatccacctttgagcaggcgctggcttcgacggaaagcaccttctccagcgtcctgtccgccatgaagctcgtggtgccggacgcggagtccgtgaccgttgagtatctggacaaggccggcaaggtcatcgtttccaaggaattcaaataagcttatacagcaagataaagcccgaggggagagtaaatcgctctcccctcgggcttttttgttcatcataggcgccttttatttcagggcctgtccgccgcaggagatgattcgctgcgccagccgcgccatttcttcgggggattccttcatgccggtttccagccatcgctggaataatccaatacagccgtacacgatgaactcatagaaatactcgaagcgttccgaatgcgcgccctcatacgcggcggtgatttcctgaaagcatttgtccttgacaatggccttcagccggttgacaaaggcgtgatcgccgttgggccccaacagcgcaatggccatgtcggagtagttgatgaagaaatgaaagatatcgttcaaaatggggtaagggttttccgcgttgacgatggagggctgcgcgttcaaaatctgattgaattcctcgaacatttccgcctccacctgctcgagcatatcgtatacatccttataatgcaggtagaacgtcccccggttaatgtcaaccatgtcggcgatttcccgtaccgtgatgtccttaatcggtttttcctgcagcagcttcgtcagggcgagacgaagctgcctttttgttttgcggacacgcctgtcgactttcttttcctccatgaccgctctccctttcgctactcaacaattttataattttatgtctattatttaataatggacaagggatatgattattaacgcacacttggttacttatctggtgattgctttctgaactaatattaatataatataactaggcctaaaagtcaacagctgttcattttaaatatttcaagtttattaggaggagcgatctatggtcaaattcggcaaggcgatcgtcaagctgcgaattccgattctgatccttggggtattgctgctgatcccatcggttttcggcatgatgaacaccaggataaactacgatatgctggattatctgcccggggacatggacacggtaaaagggcaggacattctgctggacgaattcggcaagggcgccttttccctggtggtggtcgaaggcatggagcccaaggacatcgccgccatgagggcgaaaatcgaaacgatcgagcatgtggaaacggtgctgtggtacgacagcctggtggatttgtccgttcccatggaaatgctgcccgataagctttatgaggtcttcaaccggggcgacagcaccatgatggcgattttcttcgacacctctacctccgcggatgaaaccatggaggccatatcgcaaattcgttcggtggccggcaagcagtgctttgtttcgggtctgtcggcgttggtgaccgatttaaagggcttgtgcgagcatgaggaacccatttacgtcgccctggcggtggtgctggcctgtgcggttatgatgctgtttatggattcctgggtcatcccgttcatcttcctgatgagcatcggcatggcgattctctacaacctgggcagcaacttctttatgggcgagatttcctacataaccaaggcgttgtccgccgttctgcagttgggcgtcaccatggactattccatttttctctggcacagctactccgagcagaaggtccgctttcaaggggacaaaaaccgggccatggcccacgccatttccaacaccatcacgtcggtggtgggcagctcggtgacgacggtggccggtttcctggcgttgtgcttcatgacgttcaccttggggcgggatttgggcctggtcatggccaagggcgtggtcttgggcgtaatcgcctgtatcaccatcctcccggccatgattctcgtgttcgataagctgattgagaaaacccggcatcgcccgctcctgcccaaaatggataagttcgtgggctttgtcaccaagcgatcctggattttcctggtggtttttctcattgctctggttcccgcgttttatggctaccggaatgcgaaggtttactacgagctgagcgaggcccttcccaaggatatggagaacatcgttgccaccacgaagctgcaggagaccttcgatatggcgtccacccacatgattctggccgacgccaagctgtccgccaaggacgcgaaggccatgatggacgaaatcgaaaccgtcgacggcgtgaaatatgccatcgggtttaatagcctggtcggctcggctgttccggaggaagttctgcccgagtcgctgaccagtctgcttaagagcgataagtatcagctcatgctggtcagttcccggtacaaagtggcgtccgacgaggtcaaccggcaggtggacgatatcaacgccgtattgaaaaagtacgacaaaaacggcatgctcatcggggaagccccctgcaccaaggatctgatcaccgtcaccgaccgggattttaaggtggtcaacatcatttccatcgcggcgattttcatcatcatcgccctggtgctgaaatccgtcaccctgccggtcatcctggtggcggtcattgagttcgccatcttcatcaatctgggcattcccttctataccggcacggccctgccctttgtcgcccccatctgcatcagtaccatccagctgggcgccacggtggactatgccattctgatgaccacccggtacaaaaaggagcgcttccggggccgggataagcatgaggccgtcaggacggccctgtccgcgtccattccctccatcaccgtcagcgctctgggctttttcgccgccaccttcggcgtgggcctgtactcggatatcgatatgattggctccatgtgcaacctgatggcccgcggcgccatcatcagtatgctatcggtcattctcattctccccgctatgttcctgctgttcgataaagtgataggcaaaaccaccctgggcatgcggcccaaacagtctcaaggaggtatcggtcatgaaaaataagctgcctgttagaattcttgccatcctgctgtcctgcgggctgctgaccgtgggcgtgggggccgccctggccctgcagccggcggacgccgcgccgtcggcttccgccgcaaccaaggagccgcagccggccggcgcggttcaaaaggaagaaacggtatacgtcttggccaacgccgacggcaccgtgaggaaaatcattgtcagcgactggctgaaaaacacgctcaagcaggacgtaatcgccgacaaaaacgagctgtccgaggtgacgaacgtcaaaggcgacgagggctattccatgaaccccgacaatatgcggctgtgggacgcgaaggggcaggatatttattatcagggcgagatccagaaaaagctgcctgtggacatctccatctcttacaaactggacggccgcagcatctccgccgaggaactggccggtaaaagcggcaaggtcaccatgacctttacctacaccaataaccagaagcagccggtgaccatcgatggaaaaacggaggagctgtatgtgcccttcgtgatgctgaccggcatgattctggacaacgatcacttccagaatgtaaccgtcagcaacggcaaggttatcagcgacggggataagagcgtggttatcggctttgccctgcccggtatgcaggagaatctgaatcttccggcggatcggctggagcttccctccagcgtggaaatcaccgccgacgcgacggcgttttccctcatgaccaccatgaccatcgccaccaacgatgtgtttaacgaactggatcccgacaagctgaacgatcttaatcaactgggcgattcgctcgatgaactcggcgccgccgccgggaaactggtggacggctcctccgcgctgtacagcggcctaagctccctgcttgccaaatcgggcgacctgattaaggggatcgaccagctggccgccggcgccaaggagctgagcgccggcgccgggaagctgcaaggcggcgccgccgatttgcagtccggcgcgaacgagctggctgacggcctgcagcagctgtctaaaaacagcgcggccctgaatgagggggctcaaaccgtcttcaacaccctcctggccgccgccgattcccagctggccgccgccgggctgcagacgccgaagctgacgatcgacaattacgcgaaggttctcgatcagatcctcgcctccctcagcgaggaggcggtgcgcaagaccgccgacgcggcggcgctggaaaaggtcaccgcggcggtgaacgcgcaggaaagcgccgtgcgcgcccaagtacaggcggttgttcgaaaccgcgtgctggaggcggtgctgcaaacgctgcatccgcccatcaccgtggagcagttcgcgcaggcccccaaggaggtacaggccgcggttaatgccgccgtggatcaacagatgggcaccgacgcgataaaggatcaggtggataccgccgtccggcagcaaatccagcagctgatcgcggatactatgaaaagcgccgaggtgcaggctcaaattgaagaagcggtgcagaaagcggccgccggccgggacagcatccagacgctgcgtaagcagctggacagctatcaggaattctacaccggcctgcggacgtataccgccggcgtggacgcggcgggcgcgggcagcggccagctgaaggatggtgcggcggatctggccggcggcgcggcggatttagcgaaaggcgccgaccagctcttagccggtgtgctggagctgcaaaagggcggcgccgccctgatcggcggcgagaaggagctgaaagccggcgccatgcagctgtccgacggcatgaaggaattcaacaacaacggcatcaaaaagctgacggaggtgtacgatggcgacgtcagcgtcctcgtggaacgtgtaaaagccgtcatccgcatctccaagagttaccagacctttgccggcgcgtcggatgaaaccgacggcagcgtgaaattcatctacaagaccgacggcatcgaatagcctcaagcaccccgccatttcggcggggtgctcagtctgtcaaaaaagggaatccgccattcgtgaaacgaaaaaagcggaggcgggttaccaatcggtgtttgcgaggacatgtgcctcgcaaacacaccttataggcgaaaaataacggaaacacgtgtgtttccgttatttttcaagagcaggggtggtactggcggggatagagggagcaaggcgagtataacgagccgccgcgatccggcatccccgtccagcagcgtgtcgactttgtcgacacgctgagccccccgccatttcggcggggtgcttttccgtccggccgcctcttgctattttaaggaaattggggtatgataaaaagaaataggacgccgtggagaaaggctggcaggtgctgccgatgtgaatcggcagcatttttcgtccgttccacagccgaaaggatgatgcgcgatggcggacaaaagggtattggtcatgaacggcccgaacctcaatttgctggggatgcgggaaccgggtgtgtacggcgacgagagctacgacgccatctgcgcgcgggtggaggagcaggcccgggcgctggggctgcaggcggacttctttcagtccaacagcgagggcgcgctcatcgaccggctgcacgccgccatgggcgtatacgacggcatcgtgctgaacgccggcgcctacacccattacagctatgccatccgggatgccatcgcggccattcggctgccggtggtggaggtgcatctgtccaatatccacgcccgggaggagttccggcacacatcggtcattgcgccggtctgccgggggcagatcgcgggcttcgggccggcaagctatacgctggcgctccacgcgctgcgggagctgctgtagaagccgcctaaacttcgcgaaatcggctgcctgcgggcggaagagggaggtatatgatgacaacgtattgggaacgcctcgcgtcccggcttccggacggcggcagcgccgcactggttacctcgccgcataaccgccggtatctgaccggctttccctccagcgacggctgtgttctcattctgccggacgccgcgtatttcctgacggatttccgctatatcgaggcggcgcgccggcaaatccgttccatggaatgcctgtgctatcagcgcctgacggacaccctgcgggaactgatggaaaagcacggcgtccggaggctgctggtggaagcggggcagatgaccctgcgggaaaggcggaagctgcgggagaccctgtcgggggatgtcgaggatggggacgagctggacgactggctggaggcgcttcgattgatcaaatccccggatgagctgcgtcgtatccgggaagcccaggcgctgaccgcctatggctttgagaaaatactcgactatatccgtccgggccggacggaacgggagattgctctggagctggaattccttatccgccggcagggagcggaggggatcgcttttgatttcatcgtggtgtcgggcgccaattcctccttgccgcacggcgtgccgtcggacaaggcggtggaacccggggactttgtgacgatggatttcggcgcggtggtggacggctggcattccgacatgacccgcaccgtcgcggtggggcgcgtcggtgagaagcagcgggcggtatacaataccgtgctgcgggcccagcaggcggcgctggcggtgctgcgggccggccttccctgcgtcgagggggacgccgccgcccggcggattatcgaggcggccggttacggcggctgcttcggacacagcacggggcacggtgtcggcgtggaaatccacgaagcgccgcgcttgtcgcccggcgcggcgggggagaggctggcggccggcagcgtggtgacggtggagccgggcatttatatcccgggcgaattcggcgtgcgcatcgaagacatggcgtttattacgccggacggctgcgaaaatctgaccggctgcccgaaggaattgatggtgctgtgatggataagaacgactggtcgccgctgctgcagcttgccctgggggatgcgaccatgctcaaagagctcctccgcgagcctattgcggaggaaaagccggagcctggggaggagattgtgcccgcgatggcccaggcactggccgattgggcggccctcctgccgggagacgtcgtgacgctggggggcgatcccatctatcccatgccgcccgtcctgctcggcggcgacggctggctggatttctacgagctgaccggcggggaggaggcggagcgggtggataccctggccggggatttcaaccgctatgccgccgcgcatccgcaggaggcccgtgcggtgtaccgactggcggcggagaagctgaagccggccggcaaaacgctgatttttcagaataaaccggccgagagccgctagagacctttcggaatccccaaaaactgccggtttctgctgtggaaagccatgtttttcgaacttggggcttgcaatctatccgccgatacggtagaatgggatacagttatgaaaatggaggaataacaatggtatcagcaggtgattttcgcaacggcgtgacgtttgaaatggacggcaacgtctatcagattatcgaattccagcacgtcaagccgggcaagggcgccgctttcgtgcgcaccaaaatccgcaacgtaatcgccggtacggtggtggaaaaaaccttcaaccccaacgataaatatcccaccgctttcgttgagagaaaggatatggaatactcctacaacgacggcgatttgtattatttcatggacagcgagacctatgagctgctgcccatcggcaaggatatcctgtctgacaacttccgctttgtcaaggagaacatgatctgcaaggtcatgtcctataagggcaaggtcttcggcgtggaacccccgaactttgtggaactgcaggtgaccaccaccgatccgggcttcaagggcgacaccgccaccaacgccaccaagcccgccaccctggagaccggggcggaaatccgggtgcccctgtttatcgacgaaggggagatgattcgggtggatacccgtaccggcgagtatatggagcgtgcataattccccgaagatgtgcgcaaattataaaaatattcaatattaaaggagggacagcacatgactgtcacagaaaaggttgcctatttgaaagggttggccgaaggtatggccatcgacgagaattccaaggaaggcaagctgctcaaagcgattaccgacgttctggcggatctggccctgagcgtagaggatctggaggattacacggccgagctgaccgagcaagtggatgccatcgacgaggatctggatgcgctggaatgcgatttttacgatgacgacgaatgcgagtgcggctgcgatgaatgcggcgacgaagactgggacggcgagttttacgatgtgacctgccccaactgcgacgaagaattcagcgtggacgaggaaaccctgatggagggcagcatcgaatgccccaactgcggcgaacacctggaattcgatatcgacgagtgtgacgaggaaggctgcgactgcggctgtcaccactgcgaagaagacaaataagcatcccctttgcaaggcccgccgattttttcggcgggccttgctgtgatctgtccgcagccgcgcatgggttccatcaacgccgggcatactaaaggaaacggcggagcggacgcgtcaaggcgtttcgtttctcttttcaacagaaatgcgaaaggacggggctttaagtatgcgtctggcggccagggggcgagcgtgcctgaaagggcaatgggcgggcgccgtgacggtccagctgacgatgctggcggcgggcgcttttttgctggtattggaattgctgctgctgcggctgaccggcatcggcatggcggaaaccgtgcatgtgcccgactggctggcaaacgccggcctgtggccgcatgccgccatcatcgccggcgtcgcgatgctggatctgctgctggtgtctcctctgcgtttgggggaggctgcttattattaccagctgacgcagggacaggcacgcgcccgggaggcgacctgcgccttccgggcggtgcgggatacgggcagcctgacggtgcctcagtcggccacccacgaattcgtgcctgtgcgcccggaaacgccaaaggtgccggtgcgcaccatctggggcttttatcggaagggatacggcaaggcggtgggctggcggctggtcatgtggggctggcgcaccgtctacggcctcgcctgcttcgcgcccgccaccctgctgtgggggtacagcgaggtgctgcgggtaagcggcgacgcctcgtcgctgacggacgtaacccggctgttctgcggcctgttcggtctgttcgccctggccgcaggctgggtggtgcagcagctgatgatgctgcgctatctgccggcccagttccggctggccgaaggggcatccctgcgggaggccttgcgggattcccggcggctgatgaaggggaataccggtgacgccgcttggatgtatatggggttttccggctggctggccgcctgcctgttcgttatccctattgtatacgtatcccccttgtttttgaccacccgggcgatctttgtccggcggctggcacctgcggtgaaaaagcgcccggccgctctgccggccaaagccggcccccgtcccggccggcagccttccgtctaagcggagagctgccggctttttttccagaataccgctgtgggaatcggcggattgtcgccttgcaatttcatgggatcaacggtataatatatcctatataccaaccataagatgaacaagcgaaacgctcggaaaggacaagtacatatgccgaagaaaattaagcaggaggataccgacctgtacaagaagctgctggtcggtttctcctttggacagctggtgctgggcttcctctatttcatgtttgccgccatcaacctgccgaccatcgccgtcctgttggggatcagcatcgtctgcatgatattggtcagagccttctgggaggataagaaattcatccgcattctggtgcgggtggtgtcccttacctttatcctcggcgtcctgatactggtggcggtcaccggcatcatgggcctgtcctctttgggcaataacgccagcagcttggaaaaagagtatatattccagcaggtagcggtgctgctctgcgcgttttttcagtcggtgctgctagggttctgcccggcgctggccatggcttatctgcgggggcacggctgggacatcatggccctgcgcatcgtctccgtcgtggaattggtggtggctgtctgtacggcgcttttcacctatcggtatgacgccatccagctctccatcgacaacctgtatttcagcattttctttgtgctgtgcgtggcggtgaccacggtgctgaccttcctggtgtttcctccctttgccaagaaaaaggggttgcttgcccagccgaagaaggccgctgtgctgtcggccgaaccggaggcggccccggaggaggagcccgccgcgtcggccaaacccgttttccgggatttgggggacgaaaagcccctcccgcccgagaaggagaagcgccgcccctcggacaaggacaagcttggccgcaggaaaagcgagtaaggccggcccgttatccgatataaaaaaaccgacaggccgtgcgcggcctgtcggttgcttgtttctgctttattcggccttcagccgggtttccgcgttgcgcagcaggttgaatagggacgaggcgaagagcgggtactgggcggagatatcgtcgggcagtatggcgggcagcttgtccgctgccacgcccggttccccgcccacggtgaacccttgggtcagccggccaatgcgggctgtcgctttgccggattcccccagcagggaggggagaaacaaaaattcctccaccgaaaacatagcggcggggttcttgggattggcggaatatatttggcggaacaccgcgtaaaccgccagcatcaggtaagaggaaacctccgtggtcagcgccttgttgttgcatttctgcagcaggtcgaacaggatatgcagcgagttgaccagcagctttttgttcagcaccggcagaacgctgccccgaaactgattgtcccgggcggcggggtcgttttccgggatttcatccacggcgatgaccgcgccggttttgtccgccgtacgccccagcagatagtcgcaggagacgccgtaataatcggcggcccgtaccacgaaatccaggccgcattcccgaatgcccttttcatagtgggacaacagcgcctgtgaaacctgcaaatcggccgagacctgcttttgactgacgccgcgctctttgcgcagcagggtcaggattcttggaaaagcggtgttcatgaaaaccctccagcagacaatttgaaatccgcaagcgcgccaaaatatgggagagccctcaaaacggcgcatctggccccaaacccgcttttccggcataccgcaaaattcatcgcggaagggcaggcttagagccagtcatatactgtatgtttacgattatactctattttgataccctttgtaaatcgtcaaaatgtgatttttaaggagaaaatttgatgaaaacttacaaaatccacctcattcgacatggacagaccgaagccaacgccaaggggctgtacatcggcatgaccgacctgccgttatccccggaggggctggccgaattgctgacgctcaagcgggaatatacctacccgggcgccgctcgttttttcaccagtcccctgacccgctgcaagcaaaccttggaggtgctatatcccggctgccggcaggaagtggtggacgggctggcggaatgcgatttcggggactgggacggccgcagcgtggcagagctgcaaagcgatccgctttttctacgctggatggcaggagacagcggggtcaaaattcccgacggagagaatgccgacgcctttcaaaagcgggtgatggcggccttcgaagagctggtgcaggaattgatgcgttcgggggataccgaagcggtggtctgcacccacggcggcgtgatcatgctgctgatgatggcctacgctcttcccaagctggaaatgagcgattgtgtggcggaaagcggcaacggcttcacgctgcgcatcacgccttccgtctggatgcgggagccggtggccgaggcgctgtgcatgattccctggaaagcggaggaataaagcgggtcagacggtggttgacaagatagttccgcctatggtacaatgccgtttagtttgattatcaaaataaacggaggtaaggcatggccgtcagaatatttacggacagcgcgtgtgatttggagttttcagagctggaagccctgcaggtggagctgctgcgcatcccgattttctttgatgaggaacggtatatagaaggcgaaaatcttacccgggaagagttttatgaaaaactggccgtatcggagcggctgcccaaaaccgcccagattacgccggtggagttcgaggaggcgtttcgtccttatgtggaagcgggggaggagattgtggtgctgcccctggccaaggagctcagcggcacctatcagtccgcctgcatcgcaaaggagcagtttcccgaggcggtcatccaggtggtggacacccggcaggtcacctttggtttggcgcttttggtccggcaggcggcggctctgcgggacgccgggcacaccgggccggaaatcgctgaacaaatcggccgtttggcggctcgggtgcggctgtacgccgttatcgacgatttgaaatatctccggcttggcggccgcctatcctccgccggcgcggtgctcggcaccctgctggggattaagccgattatcagcgtgcaggacggccaggtggtctgcgtgcataaggtgcggggccagaaggccggctgcgcttatgtgctggagcgggctggacaggaagggatcgatcccgccctgccggtttgcttcgggcacagccacctgcccggcgcggcggaagaactgcgggatatggccgggtctcttctcgacggctgcggacagatccattgctgcagcatcggcccggtggtgggcacccatgccgggcccggctgcgccggctttgcctttttcgtcaaagaataaaaagcgtccggcggtcattccgccggacgctttgttatgcttactgaatagataaattcggtaagcggtatctaggagtcaccgttgatgatcaaagccataaattccaaattgtctttcccggtgttggccagcccgtggccgctgcccgaaggggtaaaggttacgtcgccgggccccacgtccagcatcacaccgttgtcgttgtaccggccggagccggtcagaatatagtaggtttcgctgttgccgtgatgctcgtgataccccagggaacaacccggttccagggttacccgggcgaacagtttgaccttgccgtccatctccttgtcccccagcaggggttcgataaggacatggccgtccccgccgcatttgtgttccgtccgctccacggtgcgctcttccggttttgtcatgggatcgtcctccttggccgtcagccgttccagttgggcttgaccagctggtggcggctggatttgttgatgctgtaataatgggtgaggatttcgtcgtatgtccagccgcgcattttcccgccgtcggacacacgcagttcgttggcgtagcccatggcgcccgtctggctcatgccgcagccatgtcccgcgccccacacctggaaggtcacggtctcgttattataggcctccacccggaaacagtgggaccaaaatcgctgcccgttaaaattgtccagcgccttgcgcacatccttgccggccagatagcgcttttcgctgccgttcatgcaataaaacccgctggtcttgacatatttgcccggcccgccgtcgtattccacctggaacccggcgtcatagctgacggtgccgccgaacgccttctgcatctgtgcgtcaaagtcggaacgggaaaggctgtacgtggtggagaccagggagggattgttcgtgtatttctcgatataggtcttggtgtcatatgtactcgcgaccgagcgcaggtaaggccgcgctgagacgaagacgttctccgaattggccgttacgccgggggaggaggcgaaatacatggcctcaatcggcgctttcgccggatcggactgcttcacatcgagaattttaatccccaatacgttacccacggcctgataaatcttttgatcgttctcgttgccgtccacatccagagaaaccgtggaaaaattgaatggatacgaatccttgccagatttggaggcgttgtaattgagcacgtaggtgtaggacgccaccgcctgggcctcccaggcggcggtggaattcacagccgtccgggcattgcccatttccgccttgacgatgcgggccagcgccagctgcaatttctctttttgcttcgccggatcggtgctgatggtcagcagctgcttggcatccttgtcgtataagcgaaaattccggagatacacgctttccggctcgacggcgtcccgtatggtggtttccgggggctcgtcgccgcttggcggcgccgaggtgctgccggtggtcgtggtggtgacagaggcccggctggtggtcgtggtggaaccggacgtggtgccgtcctgtgaaccggtcggtaccgatgagccggtgaccgtggtggattccccggtttcgctggataccacctccgtgcccgtcgtgctggcgccttcggtgagggacgcggcggtggattgcgcggtacgggcggtcgttgttaccgaaggattggcttttctccatgcctccggcataatgacgtcgctgtttttggtcgtggtcgtcagatggatcgcttcatcctccccatcccgcagcctgcgggcggccaccacgatctccgcgccggaaaacctcatctctacatccgccggaacagagaggaacaatagggaatcgccggcttccacctgtacgggcgtgtcgtacagggaacggtcgcgtgtttcggccacaaacttaagaaaggccgcttcgtcggcaaaggtcgtgcggttatacgagaaggccgtatcgttccgatccagcaccatgacggcataggggacccatttgccgttggtgaacagcgtgttcatctccaccaaggggtgctgaatcagaaaatccagttcccgatagcgcaccacgtcggaaaacatctgtccgtcctgcaggttgttgccgtaaatggtcagcgtccggttgacggactgcgcgttgaccaaagcggccgtgctgtcgaagtaaggcacgccgtagggggaatagcgccggtcgtagttgtgatcgcggtagaactggttcctcgtatccttcatgacgggatagttgacgttggtgccgtcgatttttatccagccgccgatgtccttgttccggtcgtacagtccatagaagcgggagagcatgccctccggatatttcttgctcgacagaacgtcgggggggagggagcccggatcgttcccgtaaatctccaggatttcaccgaacagcgcccggttgctcaccggcataagcacgaactgattgatcagcagcccgcccgtcaccagcacggccagaaccgccacccaggcgacgattttccatactcgttccttaagagaatcccctttccaagggaaaatggtggccagaaaccgccgctgcttgccggatttgggggcgacggggatttgcggggctgcctcctttggctcctccagggtttcgccgcccgccatgacggcgggaagcgcttctaaatagcggcgggtgagatccagcgcgtgggaggtggcgatgtaccggacgtattcccgctcgccgcccgaatgcccggccacgatttttttcacccaggtgcgcttttcatccgccagggcaataaacacggtacccaccggcttgccctcgctggtttccggcccggcgaccccggtgataccgatgcccaggtcggcctggcccacccgccgggcgccgacggccatggcgctggccacctcggcgctgacagccccgtatttctccagcagctcctcgggcacgccgagaacctgatgcttgatttccttggaataggcggcgatgccgcattcaaagacagaggaaacccccgacacctcggtcagacgccccgacagcataccggcggtgcaggactcggccgtggcgattttcttgcccttttcctttaaaagagtgaccaccgctttctgcaggctgccgctgtccaccccgtagacagcggccccgagcctcttgcggatttcctccacaatgggggcgcagagcgtcctggccgtttcggtgtccgcggcgcgggccgtcacccgcagcgtgacctctccgtccttggcatagggcgcgacggtggggttggcctccgacagcaggtcggccagccgctccgccaccgtggattccggtatgccgaacacacccacggtttgggaaaagatggtgccgcccgaaaacttagacagatagggcgctaccttatcgttgaacatggggatgagctccgccggcggaccgggcagcaggatgaccacgtggccgtcccgctcgatggcgcagccgggcgcggtgccatgatcgttgggaaagacgacgcatccttcgggcagcatggcctgcttcttgttgctggggcttagctcccgcccggtgttggcaaagtattcctggatgcgcgcccagctttcctcgtgcagcatcagcggaatatccagcacctcgcagacggtttcccgggtcagatcgtccggcgtgggccccagccctccggtaatcaccaccatgtcgctgcggctcagcgccagagacaacacctgcttaaggcgggcgttgttgtcgcccaccgtggattgatacagcagctgtatcccatacgcggccagctcccgggacagaaactggctgttcgaattgagaatatccccgagcagcagttccgtgcccactgtgagtatttcagcgttcataatgacctccaagcgttgctgtccgaaaaatcttaggaaatgctgcgacggcggacacccgccagcgcttcggccatcagggcgtcgatatccagcgccttttccgcttcctccaccatggccagcttgggccgggtgcggggatggcggggggtgaacaccgtgcagcagtcctcatagggctggatcgatatatcaaaggtgtcgatacggcgggcaatggcgatgatttcatccttatccatgccgatgaccggtcggaacaccggcatgtcggccaccgcgtcggtgcaggccagggccggaatggtctgactggccacctgccccacgctttcgccggtaatcagggcgccgcattgctccgtcttggcgatggaagcggccagccgcatcatgaaccggcgcatgatcagcgtaaaaagctcttccgggcagctgcgctggatttcctcttggatgtgggtgaaggggacgatgtgcagctccatccgccccgcgtaccgggccacctgctcaagaagggagaccaccttcatctccgcccgctcgctggtatagggcggggaggcgaaatgcacgcaggtcagctcgatgccccgcttggccatcatgtaaccggctacgggggaatcgatgccccccgagatcagcagggccgcccgtccgccggtgcccaccggcatgccgcccgcgccgggcagctgcgccgcgtgaacataggcgccgaaatcgcggatttccaccatcaccaccacgtcgggctgatggacgtccacccgcagatggggataagcctccagcagacagccgcccacgtcggcgcagatatcgggggatttcagcggaaactccttgtcgctgcgccgcgcctccaccttgaaggtgcgggcctgtgtcagcgccggcttcagataggacgccgccgcctcgcggatggcctccatttccttgggcaccatgcgggcgcgggaaaaagcggaaagaccgaacacccgggatacccgatcgcaggcctcgtccaggtcggccgcgtcgtcctgcggctcgatataaatggtggattgggccttgcgcagatgaaagtggcccagcggggtcagccgccggcgcaggttcttcatcagcaccgcctcgaaggtgccgcggttcagccccttcagagccagctcgccgcatttgatcaataggatttcattacagtctgccatgcatcgttacatccgtttcttttgtgttttcatgccgccgcatcatgccgccggcgtttcttctgtggggtcggtgctcggtttcgtcgtcgcgtcggtcggctcggtaggttccgtcggcggatcggtaggcgcttcgctcgtcggttccgtcggcgcctcggtgtccccgctggagggggtctcggaggacggtgttcccgtcgtggtcgtggtggtcggggccgtcgttggcggcggcgtgttgccggacgtggtgcccggcgtcaccggcgttgtggtggtgggcttggtggtcgactcacccagcgtcgtgccggtgctcccctcggtgggggtggtgcttgcggtggtgcccgccggcagagtgccggtgccgccgctcgaggtggtggtgacgttcacggtggggatcacataactgggatccgtatagaaggggtgaggatcctgcttttgattgagataccattgataaggcatgatcgcgtcgtcatttttcacgatgcgggaggtgtccacggtgttggcctccccgtcccgcacccggcgggccaccacggccagacggccgtcgtccagcacgcttttgttggtgcaggtggagagaatgagcagatcgtcgtccgccgtcacgtccacgctgttatagtcgtaaatcgaatgagcccgcagctcgttgacaaaattgaggaaatccgcgtccccggaaaaatcggtgcgcagatagttgaagcggtaccggctctccttctcggcgttgtcaatcatgaccacggcgaataccttgtactcgttgcgatggtacagcgtattcatggtgataagcggcgcggagcgcacgttgtagacgctgttgaggaatttgttgatgccggagaacatctgcccgctggccatattatgcccataaatgatggaaactttgttatgagaagcaggcgtatcgattacgttgcgcttgtcaaagaacagcgcgccgtttttgttgttgttcccgtaaaaatccttggtcagatatttgtcgttatccccggaatacaggatgggatagctgattttcagaaaatcgtttttcgcgttggagttgtacttgatccacccccgcagctcagtgttgatggggtatatgttcttgaacgcgtcgtcgataccctcggggaaggggaagtccttgtatttgtccagcactgccgccgggttgttgggatcgtacatctcgtccagggtgctgtacagccggtcgttgttggccggcacaatgaccatgtcatacacgatgtaggacaccgagccgatgagcaccagcagcgcgatgagaaacacgcacttgcgcacgatttccagcggcgcgtccccttttttcggcaccacattgcccagcatatcgagcagaacgtcggtgaatttctg

SEQ ID NO: 1243 - DNA, 2821 bp, Unknown
  16S sequences of unknown bacteria
ctaatattgtgtcaataataaatttaaaaataatagtataattaataaaagcgtaatatagttgactttttcaaattcattgcttataataagaatcagtagaagaaaggatgtgctgacaggtggaaaaggtcaatcgaaaagcggtcgtacgggagctgatgtccatacatccgctgtttcggaaaaaatttttgaaccggctagaccaccctttcagcagcttatccaaatcccagcgggatgttgtgatgtctttaaacctatatcccgctatgaacatgggtcagctggcggtagaagccaatgtctccttgcagcaaatcaccaaaacagttaacgcgctggaggatatgggatatgtgcgccgttatatcgacaaggcaaaccggcggcaggtttgggtgtcgctgaccgaacagtgccaatcccggattcgaagttcttgcgacgccaacgatgggctgctggtgaaaagttttgcgtctttgtccgatgaggatatgctacagctgcaaaaggccgcatgcactatcacccagattatcaacaaaatggaggatcgtccgctgcaggatctgactgcaaaggaagacgaaaaatagcacttcttgctcaaatcgtttctgcggttttggtgtctttcatggaatagcaaaaaaggcacgctttttcataaaagcgtgccttttcttgttttatatttgttacccgctgcgccgctccgccagcagcagatcgaccatccgcccatagctttgcacaccgtcggactgggcgttcgcctttaaataatgatcgttcaaagaggtggaaacctctgccacctttgtttcaaactgcttccagtatcggttggacacccggtaatccctctttgcctgttccggcagagagtcgtagatccgcacatagctttcccgccgaccggcgccgtacagcgcgttcatggcataggacagcgcattgagcgttccgctgtactgcaatgccggctcctgcgattcccggcaggccaaataggcaatgaatccagcctcatcctcccgaatccatcctttcagatgggccagttcatggcagatggtatagggaatttcataatcgggaatatcccggttgtaattggcttcaatagtaaaaggcgaaaacatgccggtcagccgcagatgggacatcccccaggaaaaagcaacgcccttgggggtggggtaataccccgacaaagaagggtactgctttcccagcccggtcatggcggctctggcctgccctttgatgtctactgtttccagagaaagcccgccttccccattttgcggaatccgagaggcgtattcattggcctgtgccgccagctcttcacacagctgctccaattccaccacggaagaatcgcgcacttcgtatcccgccagctctccaaacggagtccgcccatagttgatggtacaggtcagagtcagcatcaaaaacacggcaggccctgcacaaagcagcagccgaaaaaatcctgacagcatttttttcgctttttgccggcaatggaacaggttccacaccagtacagccaaaaagcacaataggcccaaaggcagtgcataaagcacccattcgtatacggaaaaaggcagtggagacagtagccttccgatggtattcggaaaaacggggaacaagtactccgcgtaccattgggcaaatccggttccgctgcgggacagccagatcaagccgcaggccgctgccagtgcgcaggccgcccacacaaagcatttccagtaccgcctgcaataagagatcatcgttctcctcccttttttcaaaagatcaacaggtcatttttgatccggccgctcgaacaggcttgtctgctccacccggctggacttcatttttctttcccggacaatatctgccggacccagtctgctgcacaacaagggggagtgagggtcaaagcaggccaaatgctgcgctgtcctgccggctccatggtcggcatagcaataaaggcagccgcccgggcaggtgtcatacgcgccgatatcaatgctcattgcgcacccgcaggccgcgcgctgaccgcgatccttcccaagatcaagagatcgtccgccaatctgttccagtaattcccggtcaatgcagcagccatgctccaaaccaaaaccggacagatcagccgtttccgcacaggtaaaaatccgcatgccgttttctgccgccgtctgcccaaaagcagcggccagcgcttgcatctgcccttcatcgatcatctgcggccgctgggaaccaaaccgcctctccatgggggaataccagtccaaaaaactgatgatgcagcgaacggtaaccccttttagtgcacgagccaactgggaaaaagccttttgatgaaaggcagcggaatactgatcggtgagaaaaaccggatcataccgccagatcacccgttccggcccaatccggcgggccaactgccgtacggcgggcaaaatcacctctcttttggaaggaagattccgttctatctctgcgccataaggggtaagcgtcacctggaaatagtaagggcaatccggcagcctgtccagccaagggagcattggacccggatttttggtccagaaaacgaacccgtccaccacctccggcgcaagactcacccggctgacctggcggggattgactgggttgcgcaccaagacataaccttcctgcaggcgttgaaaaaaccattggctgtaaaatgccggcagatccgtcctccggctggcgctgataatcaactggcatcctcccgctttccctattcttc

SEQ ID NO: 1244 - DNA, 32759 bp, Unknown
  16S sequences of unknown bacteria
atgaaagacaaatctaaaaaatcaacctattccacaacctttggtgttgacccaaaaagaccgcctctttgcgaagcggtcaaaatggtggccggaccaggaatcgaaccagggacacaaggattttcagtcctccgctctaccaactgagctatccggccaaaaattgaagttcttacttcattttaaatatgccaatatgtcaatatattttttcaactttttgcactcttctattattctttttacattttggcttgtaccgaattaatccccacattataacttccccacttcttaaatatttacttctaaaaaaaattcttatgaatttatacaaaatattcctctcttccataataactatgctttgggggacaatggcatcggcaagcccagatctccccgaaacgctaagacccctcgccgagtctaacgcgcggctcggcatgccaaatctgattgaaaaactcaaagcaggagaacctgtaaaaattgcgtatctcggcggaagcattaccgcacaaaacgggtggcgagtgctatcgcgcaaattcatacaacgcaaatttcccaatgcaaaagttgaagaaataaacgccgctatcggcggcaccggctcagacctcggctgcctgagagtcggcgcagacgtcctctcaaaaaaaccggacgccgttttcgtggaatttgccgtcaacgacgcacaccaatgccccaacaccatttttagaaatatggaaggcatcgtgcggcaaatctggggaaagtcaaaaaatattgatatatgctttatatacaccatcactgagaataatgcgcaagagctcaaagacggcaagatgtcgcgctccgcaagctcaatggaagctctcgcagactattattcaatcccgtcgattcatttcggaaaggctgttgcagacgcgctcgccgcaaataaaatcacaatgaaatccgattctcccgtaaaatatgtcgatggagaatcgctcgatgaaacgtcgaaagttttactgactcccgacggaaaaattccattttcaaaagacggcgtccacccatatcccaataccggacacttgctttatgcgggatcttttgcgcgctcttttgaagaattctcaaaaatgccaaaagattcggacgctctcgatgcggcgcgttctaaacccgccgccgacaacctgtcgcccaccaacataaaaactattcccttcgcagccgccgagctttttggagacacggaagatctatcttgggactccccaataatgtctaaaagtttttcggagcgcgcaccatttaaatttaaaaagtttaagaaaaactccggattcaaattcgatttccacggcagaaaactcgtaatgtacgtcctttacggccccggaggcggagaggcaacggtctcgacagactcgcaggctccgcgcaaaataagattcttcgacggatattgctcctattatagaatgatgcccattttaatttttgagggcaacgacggtcgccacatcgtggaattcaaaatgtcagactctaaaatagacaagcgctccattctattgccgtctcaccagcaagatttcgataaaaatccaaaaaaatacgagcccgcaaacggatacgcatgctgcctatacgtggttcaataaatcgggataatacagcccacgttgttccggtttgatgcttctggtcgcggagggcaaatatgccgcttgcaaatacattgtccctcaaaaaaaagagctttcggtttaatgcgaaagctcttttaaaatctaccggcgctgagccaagttaaaagaattttttgtaaaagggctgcgaagaagatcccttattgttgtcgtctccgcaaagcaccgcaaattcttcgagcttcttgcgctgttcgtcggttaggcgcgtcggaacctctatgtttattcgcacgtacaagtcgccgactccgccgcgcaggctcggcattccctgtcctttcagcctcatcagcgctccaggctgggttccgggtgttattttcaatatcgcctttttgccggtcaacgtctccacttcaacctgccctccaagggcgacaagcgtaaactttacgtttatgtccgtgtacaaatcgttgccttcgcgctcaaacatcggattcgacgcaactactattacgacgtataaatcgccgctcggtccgccattgtatcctgcgttgcctgcgccgctttttctaagcctcgagcccgtatagactccggcgggaatgtctatcttaacttcattgcgctcttttatgcgcccctcgccgccgcatctcgggcatggattgtcaattacagtgccggtaccgtggcatgtcggacagggctggctgaatcttatcggcccttttgccatatttacgcgcccggtcccgccgcactttgggcaaaccttgcggctctcggcgctcttcgagccggttcccttgcagtcagggcactccacgagacggttgtaccttattgtgcgagatgcaccctttgcagcatcttcaagcgaaatctccaactcgacgcttatgtcggacccgcgctcgggcgcattgacgtcttcctcatgcattccgccgccgcccatgccgccaaagaaatcataaaacgctccgccgcccccgccgccgaatacttggcggaatatgtcgtacggatcttggaatccgccgtacccggctgcgccgccgcccataccgccctgcgtgaacgcggcatgcccaaattggtcgtatttagcgcgcttctcttcatcggacaatacctcgtaagcctcggaaacctgcttgaatttttcctcggccgccttgtcgcccggattgtggtccgggtggtattttaatgcgagcttcctgtacgccttttttatctcttgggctgtcgcattcttatcgactcccaataccttgtaaaaatcttccgccataaaaagcctctatttcttcttcggcttgccgctcgaaacaacaacgctcgcggggcgcacaagtcgcccgtgtatcttatatcccgcgcgcataacctttataaccttgttttcttcgacagtatcgctcggagaatgcgatacgcactcttgcgtgtttgggtcaaaatctgccccttcgccggaaatttcttccactccgtagttagaaagcactttctttatttgcgaatacaccatttcgactccctgcaagagcgtccttgcatcatttgacgtctttgccgcctctatcgccatctcaagatggtccaccgaaggtattagctcctctatcagcggctgtaccgcaaattttgcaagctcctgcttctcgcgctgcacctttcgcctgtatgtatccaaatcggcaagagtgcgcatatataaatctttattcttttcggcctgcgccacggcatcgtccaaacgtctcatcaaatctgttgcgttcatcgcctgctcttccgcgcacatatcgtcggcggcgcgttcggcgtcggtttccgtggcctcgcggccgggtatcggttcgagttcgggcgcgcgagccgattcgagcggcttcaagccttcttttcccaattccgctgaatcctcatttgcgccccggttattctcgtgtttatgcttcatggtttaacttaaattttatttatcgtaaaatatgacaattctgttagctaaaaagtctcatattttggcgtatttttcaagcgcctatttctccgcccgactttccaaccacttcaaagcaccgtccaagtcggaaaatccgccgtcgagctgcgcctcgtacgcctctgaaagtatatccttgaattttgccgacggaaccatgccgcgctctatgagatgccgccccatcaatatcggcgcaggcgcggaatcgcgcacgctaagctcgcgcgccctctcggaaatccatacaccctgcggcgagtcgccgggctctatcggaggacgcccgttgcggtccgcggaatcgaccctcacaagcctgtctatccgctgcactttccgcgcaagcctccgtattgcggagtcccccgccccgctgcgccataagtccaaaaccgccatatgccgctccactagcacgcatacctgctctatcagcgacttctcgcgcgtcattctgcctaaaaatttcagagttggcttcacccccagaatatcgtgcccataagaatgtatcttgccgtcgtcccccctcttggtgcatagaggcttgcccaagtcgtggcaaagcacggcgagccctactattaagtcttcgcgctcgtcgcctatcctttctttcgcaaaatggtcgaggcaaaagccagtatgcacaaacacgtccccctcgggatgccattggggatcctgcgggcaccccacgcatgcggcaagctcagggaaatatttcacccaaccgcaatcacgcaagaaattcaatccgtcggatatttttataccttttaaaattagtttcttccactcttcaaacaccctttcaggcgccagctcgccaaacggaatctccgcgcacaacgcaactgtctcgggcgcgggaacaagtccgaagcgcgctatgaactgcatcgccctgagcacgcgcagagaatcctccgcaaatttgccggacgtatggcgcaatattctgtttttcaaatcctcccttccggaatacggatcgacaatctctccggtcaggtaatcgcacagcattgcgtttatagtaaagtctcggcgcgcacatgcgtcctctacgggcaaaaacgggtcgcattcaatttcaaacgacttgtgcccttcgccgactttgcgctccctccgcggaacgctcacgtctatgtcgtatcctttaagaatccaaacgccaaaacttttgccgactacttcaaaccgaaagcggcgcgacaatatgctttctatgcgctcgggttcaagaccatagatttccatatctacgtccttcggcgctatgccaagcagggcgtccctcacgcagcctccgaccagatacgcccgccctcctgcttcttttacggcagagcttatccagcggcaggcttcggattcgcgttttgagagttttatcatcttatagttgctccgcgtttgacggcattttttattttggaagaactgcgcgcattttgtaatcggattcttttatgctccttcggcgcctcatttttatccggcgaacttgcgcgcaaaaattcatcggcaatcgcgccattgcaatgaaaacttcttccgctaaaatccgacagaaataacgccgactgcgcgcaatttaaaaaaattcggcgctaatttacttttgaagtattatttttggaagactcgcctcggcaaaaaatttcggcgcgaattactttatgtcgtaaacgagcaatttgccgcctgcgggcttcaagtaattttcgacaaaatttatatgcacggggtgcgatgaatagcgtttaagcccctcttcgtcgttttcaaaagcgacaaccaaggctacatcgaaaaagtcgtctacaacagggcgctcgctcggaacgggctctccgcaatgaaaaaatttaacgccgtctatcgcgcgcaaagtctctaccccctcgcgcaacaaggatactttgtcggcgtttctcgtcctaaaaattactacgtgtgtaagcattttcgtaaaaataaaattgagcaattatgccaaagatttttattttccaatccttgcgtgagaaaaatttaatccttggcggaaattttaatcgtgtggattccgcgtattggcgcgcccttggcatccagcaattttacctttttaccattgcgggatatttcgatattttgcgcgtcggtgacgtccagatttattttagttttatacttaaactcttttttctctcccgcggaaatgggccccgaataaatgggattcttggcatcgctcggatagtatagcctgatatacgtgtcgttaattgcagctatagccaatgaatactctttcgcagcagttgcgccggccgtaccagatccggaaacggactgtccggacgtcgttgttgaaacaggcgaatccgccatatttatatcggggttttcctcaggcgcattggggcgcacgagtgccgaaattccaaaaacaattaccgccaccgccaaaagaaccccaacaaacaccgcgccgagctttatatacttcatttgatcctcgggaatcgaatcgtccgattcttcaagagaggtgtcgtaccgggagtccataggctgcggaggctccacgtcctttggagacgccggcgcaatgcgttcgagcaggtttttcgccttgcgcgaatcccctcggcgcgaggcttgcagagccgcatactccgcaagaatttcgtccacattaagcttcaaaaacgatgcgtatatcctcaaaaatccgcgcctgtaaatttccggcaaattgaagttgaattcgccagactccatattggctataatatcagtgcgcaggcgcgtttgatcggccacgtctctcaaagtataacccatggcgtttcttgccgccgacaatttttctcccaaatttttcatcgcacataagtcaattatcccaaagctgtttttgcaacaccaaaaaagcgtgtttggcatattttttgccccacaatccccgccttttttaatccgcgcgccagcgattttttttcactccgaatgcgggggcggaaagcagtttttcgcactcgatttttaaattctcccatctgtcccagtcgatatctggtgcaaagactatgcatcgcattaggctctcccattcgagaatcgcgcgttcgatgtccccgcgcgacaaagtcggcgtttcaaaggactgcgcgcttctgccaccgcgtatctcgcgcactatttccgacgccccggccccgtattcggtcggaactccgccgcgaagatacccttttaacgtcgcaccgaatgtcgctatgcggcataggtccgccatgcgggttgacgactccgcctttatttccgacagcgcaaaacgccttcccgccctaaggttcgcaatatcaaacgatatgtcttcgattgcatacgaggcgtcctccagcgcggcggctattgccaacccttcgcctttggaaaaaaacgaaaatatctttccgcggcgcgtcagcgcaaaatcttcgcctatcagccctagcctctcccacacacccaccgtagagccgcacttgccgaggttttccttaaatccggcgagcttcccaaaatcccactcgcccgatacatcgaccaaacggacggggggattaaaaagccttcctccgaaagaatccgagaacacctccaaaacagccccggatatgtcaatccgcgcgcgcaaaatatccccgcaaatatccattccgctgcactccgcgcccgctagcgcgctttttatatattttggaaggtttctcctgatatttttaagggtcagagttttttccgaaagcggatttccgggaatccgcgaaccgcacgccttcacaatcttagacagcgcgcgcgtcgccttccacttcgactctgaagcctttgctacgtcgatagacagcccatacctgccgtcagcaagcctgcaaactgcgcccttttttagcttttttacggcctccgcgcaagagtcaaacctaacccattcgtccgccgcgcggtacaacgtgtcgccgacgcgcgccttgcacgcaggcttgcggcgctcccacaattcgcgcgaatttaatatttcaatcctcccgccgaccgccgttccctcctttgcggcagaagccttaaaactgccctccgcacgcccaaagccgaggtccggcggattctttgtaaacaggcgcctgcaaaagttttcggcggccttggcgcgcgacttcgcggaattgcccgcttggtccattatccttaaaattgcgggccaatcggtgaaatcgaggcgctccaagaaaagcggcttagcctgctgcaaagagggcttccccggaattgaaattgcgtagccaacgctgtccttcccgcgccttccggcgcgcccgtacatctgcaaaagctcgtcgggccgcaagagcttggcgccgtcggaagtttcgtattcgcggtcggctattatgacgctcttcattgagaaatcgacccccgcgccgagcccggttgtcgataccaccgcctttaaagcgccctcgcgcgcgtacttttccacaattcccgctcgcctaaatgcagtaagcccgctgtggtggtacgcaacgcgcctctttaaaagccttgaaagcccgctccccgcggcagattctatctcccgcggcagcttcaaaaaatcgcggcacggcagctccgccgcgagcgattctgctatcgattcggcgtcgcgcctcttcggggcgaaaatcaaaagcgggcacatgtcggattccgccgccctctgcactatcgtaggccaaaagcccctcacgccgcgcgccgatatttccggcagcgccgcaacgcagacctcgtctataggcacggcgcgctcgtcgtggcggacaaggcgcgcgtcgcgcccaagccgccctagccattccacaacagactccggatttgcgacactcccgcttatcagcaaaagacggcattcggaaggcagcgccgccactgcggtctcgtaggcggccgcgcgcgattcgtcgcacaagagctggtactcgtctattacaaaaagcccgtctatttttccggacaaaatgttttgccgctgcgtttcgagggtcgcaacaattaaaggagcgtcggggttttcaagcctgtctcccgtggaaatcccgacgcgccagttcttggatttccactgcgcgtatttgtcgtttgcaagggcgcgcgtcggcacagtgtatgtagccctgtccccgtattgcgagaaaaagagctcaaatacaaatgtctttcccgtgcccgtcggcgcatgcaagacgacatcgcggcctgccttcatgtgcgcgaccgcctctgcctgccaaaagtcgggtatccggaaagctgtcccgaattcctccatttcaaggccgtccgctacacgctcctgtaagcgctctctacaatcccgacgtacatcttgtggaagttggagtcggcgtaccacttatccaaaagacctttgtcctcaaacgagctcgcgtccatcatttgcgaatacgccttgcggcactcgaatacgagccttgcctcttcaaaaaacactccgccgtttccggcaggcgctggcgtgagccctgcgagtgccgttttgtcgcaatctcttccggagacgctcccgcaaacgcgcaaagcctcccggcgcgactcaggcaggacgtttacggtaaagcatttcgattcctccataaatccgtatgtataacgcgtgggacgcacaaacacaaatattgacggagcattccacatgaagccgaaagccccccagcttgccgtcatcatattgtatttctcgggagttccggcgcatatcaaaagccaatcggaacctatcaatttcgccgaattttcattcaaactttttgggtctattttttcaaatttcataatggaaagttttgggcgggcaacgccgttgtcaacagataaagccgaaaataacgcccgaatgttccaaattaaaaaaatgtttttttgattttataagcgcggattcaatccgctcaaaaataatcaaaatccgattgatgtacgcgctttaaaaatgccgcgcttttactgtaatcatacggcatttgtcctttccctcctatatcttagaactattgctcaatgcaaattttgggaatgtcacaatagaagcgcgtatgcgcaaaattttttcgccgcctacacgcaaatgaatttgttttgcgaaatcgcaaaaaaaattgctttcaatttatagagagaaatcctgcgcgccgccaatcaaacaacatctatttgttgcgattgataaaaagtattttttcacgcaaaaccgatatacaacaaaaatattcaattgtgccatacaaaataaaattgccggcaaccctcgtttgcacgctaatatccgaaatattattttaatccctattaaaaaatccgccgatttcttagataaaaaaggggcgggacaaatatcccacccgatttaatacagcgcatttacttccatattgcgccaattttacgattataatccgccatcttccgccccaattttttgaggagcagataatatgcgcacgcaccttgcgcgcggatttgcattagttggcggcagacgccctcaaaacattcttgcggacggaagccatcaggtaatttagatagcgcaagggaacgtacgccttgttgccgtcaacaagcgaacccttcgtatctactacgagcacccccgactttacctgaatcgaaatgcgcgcctcctgcctgagctcggaaagcctcgcctttatcgggttgtttgtgtcggtaacaacccagccgcgctcttggagagcaagcagagttgcgttgcgaagaacagcttcggaacagccaaatccggaatatgtctggaccgtttcgccacgagtcgccatggcgtagctttcgtcgcttattattgtggagcaggacgccgcgagcaatgccgcggacgcaatcaatatcgcatatatttttttcataaaacttttggctgaaagtttgaacaaaatagcagccgcgcgcaatctaaatcgcacgccggccattgcagaaccgccagcctcgattcaatgtcggcacttagcgccacattcgccaggcgggcaaaatcattccgcaaataaactctttaccaaatattaaagaacgcgtccaatgaatgagccgccgccttcatttaaccccgattggcttacagggccacaaaggctgcggcactttcttttataaatatcggaaaaatccgctcctacttgacctctatctcagtcgcgggagaagcttttttgagagatgcaataaagccctgccctaccacagacgtgtttttcggggaaacatatccgtcttttacgagaaagaactgcttgttcatagaaggcttgaaagagttcatctcgttgttggtaaactccctaaaaaggccgtcggtaaaatatatcgcggttatatcatatcccgcgggaatcggaacttttgccttgtcggaattgaaaacaaagaagaacttttgcgtctgcggctgaagcgcgcctaacccgttcttgtccataaatgcggtcggagacgaataggttttgccgtcccatttgcgctcggaaagaggcgtgttgttgatgttttcccagacgggaatgacctttgagagttttagacgggctggaacatcgcggattgtcttgtagtcgggcatatttccagtcgcgccagggcggccgtaccagtgggtccacgcgccgtttatggctgcggttgcggctatcttgcgcgcattcagttcgtcgtaaacattcggagtagaagatgaaacttgatttttcttatacagaccgctctttgtcacgcgcgggtcttcgacgaactcggttccgctcccctcggagcacacaaagtcgggcaggtatttttttgtctcttcaagaccctttgtctttaaaagatcctcttcaatatcctttatccacccgccgtacacattgtacggctcgactatgaatttagagtcgggatttttctctttgcggcagcgctcaaacagcctgcggtaaaactcgtagtggccgagcttgtgggtcgggtagtcgtgcacaacgtcgggatgcttggacgccgaatcgctcccagtccaatatttgattgtcacctgcctgccgttgttcatgggagcgccttctcgctcgctccaaaaatcgccctcggcctgcggaacgtcccacgctatgccggcaaatttaaagccgggcgcctttgccgccattctgtctatgcgctccattatcctatctattgtgcgcgctattatgcgcttttgctgaaaatcgagaatcccggaaagcctgtaaggcggcccgaaccatccggtggctatattttgcggaaagggctttgtggcgtctttgagcgcgagtgtggtttcaaactcgcgtatttcctccggtgtatatttttttctgatgtcaaccgtgcggttggcagttccggactcaggagtctcgagaaaatatttcaagccgtcgatattcttgcagttttccataccccattgatagactacatgcgtatatcccatttggcgagcatagtctatgttgtcctgcggagaaccgcgccagcatatgccgtagaaattgcggtagtcgtcgggcgtataattcagtttttccgagtcttccgcttctgcaaaaactgctgatgcaaacggcaggctgaatattgagacaaccaaatatttttttaacgatttattcattctttccataattctcctatttctgttccggaacgagatccgctatgaaccccaatccagatattgtcttgtctttcggtgaaagctccgaattttcatattttataaaagagtcgagcatcggcttttttatcgggtaatttgcactgcccttgtattcgcggaacaatccgtcggtaaaatatattctcgaaacagaataaccgtttggcacttttacttttccgtcaggagcgttgaacacaaaaaacagcttgttcgtcttgggctgcattgcgtaaactacgtcgcgggaaatgcccgccgtaggcgactcataaaccgtgccgtcccacttgcgctcggagaggggcgtattgttcaagttctcccaaacaggaagcgcctttacaagttttatgcgcgcggggacgtcgcgtatgcttttaaaatcgggcatattgcctgttgcccccggccgtccgtaccaatgcgtccacgccccgtttgctgcggcagtcccggatatttttcgaagggtcgcctcgtcaaatacatcgggggtcgtcgaagcgacttggtccttcttgtagattccgctcttaaagttgcgttcgtcctccacaaattcggtcgtatggccctcctcgcagataaaatccgcaatgtatttcttagcctcctccaagcctttttcactcacgagcttttcgatgtctttcacccagccgttatacacgcggtaaggctcgactataaactttgcgtttggatttatttcgctgcggcaacgctcaaacaatttgcggtagaactcgtaatgcccgagcgcatgtgtcgggtagtcgtgcactacgtcaggatgcttggacgccgaatcgctgcctgtccaatactttatagtcacctgcctgccgttgctcataggcttgccgggcttgcccgtccagaagtcgccctcggcctgcgggacgtcccatgcggctccggcaaacttaaagccggggcgcgccttctcgattttctttatccgctctattatcttgtcgacagtagagtctatcaccttctgctgctgaaaatcgggtattattgttattccgtttggggggttaaaccagccggttgcaatattttcaggaaacggttttgaagcgtctttcaatgccgcaaaggtctccaattccctgattttctcaggagagtatttttttgagatgtcaacggaacgctggtatgtggcgtactcgggcgattcaagatagaactttaagccctccacatttttgcatttttccatgcccggcatataaaagaggctcgtgtaccccatttgccgcgcatagtccacattgtcctgcgcgtttcccctccacgatatgccgaaaaagttgcggtaatcgtccaattcgtattttggggaatcggcgatagcggccacggagcacgccgccatgcacgcgccaagcgcgcccccctttataatatttttcatttctatatataacattattatattgccagattttagcactacttttcttcggccttcttaaatttaacgcagtacggcatatttatgacgcccggattattgggaattattttcccgtcttttatttccataagcggcggttttttctttccccatttattggtttcgttgggagccattccctctaacttttcaaaaacgccgcttagcgccgagattttatcgatttcaaatccctgcggtatcggaattgagccgtccatagttatgaacgtaaagtacacttcgccagtctcggggtgctttgcccatattgcagattccgacattcccgcggaaggggaagaatacacgccgttttcgtatttgcgttcagacagcggagtgccgttcagattttcccacactggcaggagcttcgctatttttagacgcgccggaacatctcttatatacatgtatctcgggcaatttcccgtgccgccgattcgcccaaaccacgtgctccacgcgccgttcacggcggccgcagccgctatcttgcgagactgtggctcgtcccaaacattcggagtggacgaccctgtgcgggatttgtcaagaagcccgtttttaaacgcgcgctcgtcgtcaacaaaaccggtagatccgttttcctccaatacaaagtcgggcatatatttttttacgtccgctcccttggatttcatgaggtcggaatccatatagcgcatccagtcgttgtaaacgttgtatggttcgacaataaatttcacgttgggattaagctctttcgcaacgcgctcgcgcaactggcggaagaattcgaagtagccctcggaataggttgcgtagtcgtgcgttacgtcggggtgttttgagcccgaatccttgccggtccaaaacgacagcgttatttggcgccctttgcgagtagcctgttcggcgtcccaaaagtcgccatacggctggggtacgtcccagctgaatcccgcaaacttgaacttcgggttctgtttctgatacctttttacgttctcaataattttgtctatcgttcggtcgattaccttttgctgctggaagtcgagctgcacactgaaaatagtgggcgttgaaaaccagccggtcgcgagattttcagggaaaggcttcgacgcgtctttgagcgcgcatgttgtctcccactcccttatctgctcgggcgtgtacttttttgagggatcgacatacctgcgatatgtaccgtactcgggggtctcaatgtaaaaatacattccgtcggaatcgcggtttttaggcattccccccattgccataacatgcgaaaaccccatgcgcttcgcaaaggagataacctccccagaatcagcctgccagccggcgccaaaatagttgcgataatcgtccttctcgtattttatcgccggagaaggagccgcctgctcggccgccggcgccgatgttgacgcttcctgcgcaaataccgccgcggcggaaaaaatataaatactcgttgctttaagtgtgttcatcgtcgtaattcccattatttgcgtttcgggctatttgttagccgcccctccctttttaaccaaatgcgctatgaaccctgcgtttaccacatacgggctcttcgggactatctttcccctctttacgccaactatgtttttcttcacgggaggcgtttttatctcctgccacaatccgtcaacatggtatatctgctttactctataaccctcaggaatttttacctgccccttgtcggataaaaatacgaaaaacaactttttggtttctggctgtatcgcccatattacgtcgggcgtcatttccgcagtcgggctcgaatagttttcgccgtcccacttgcgcttggaaatgggcgtaccgttcaagttttcccatacggcgacggcgcggttgagcttcattcgtgccggaatgtcccttatcgtgcggtagccgggattgtttccggtgcctccgggacgcccaaaccagcctgtccacgcgccgtttgaggcggcggccccggctattttcctgagagtctcgtcgtcaaaaacattcggggttgtcgaggctacgcgcgtcttgtccaacagcccgttctcaaagttcttcggatcgtcgacaaactcggttccgttaccttcggaacatataaggtcgggcatatattcggcgcgcttgtcgccttttgacttcataaaatcccaatccatatagcgcatccagtcgttgtaaacgctgtacggctcaactatccatttcgcgtcgggatttatcttgcgcgctttctcaaatagcctgtggtaaaattcaaaatgtccctcggaataagtcgcgtactcgtgggtgacgtcggggtgctttacgctcgcgtctttgccggtccaatgggcgagcgtcacttgcgagccgttgtccatcttctttgtcttgtgctcgctccaaaagtcgccctgcggctggggtacgtcccacgcaaagcccgagaatttgaaatcgagattggccatttgtatcttctttaccttctcgattattttgtttgttatgtcctcaatgaccttctcttgctgcaaatccagagtcgccgtaaaatggtgcggcggcacaaaccaaccagttgccatattttgggggaaaggcttgtcgagcgatattagagagcatgtcgtctcccattcgcgtatgacttccggcggatatttttttgatatgtctatcgtcctcctgtacacgctgtattccggagactccatgacaaagaacattcccttcgagagcgggtgcttttccattccgcctttgtaataaacgtggcggtagcccatctgctttgcgtagcgaagggtctcgtccacactgcttatccagcaaagaccgaaaaagtttctgtaatcgtccatcgaatagttcggaatatccggcgccgcgcctttttcagggacaggctttgccgcttcgacttcattagcgggcttcgccggctcgttcgcgtcctgggcgcacgccgcgcagattgcaaaagttgacacgctcgccgcgcatcttatcagcttttctattttcatgtatattgtcattaataattactcaattaaacgcgcctcccccaaaacggccgcgcaagtgatttattggattttgatttttttgacaacgctgtcaagccaactctgcaatacgctctttttaaacttgtacgaatattcccaatgaaatattttattgctatgaaaaataaaacgacatcggcaatattcgcactcataatatctttcaccctatgcgccgcttcggacaaacccgatgccgcaaaagataaatcaaactgcggcgaaaatccgcggttccagtctaaaatagacccagaatggccgcaatggcaaaaacgctcatacaattatggcatggataaaacaaaagttcccgtcccgatattcttcgatgccccgatagcgacaaactcgacaataatggtgcgcggcggcgaaaatttcaaaaaacgctgggggcttcacgtgtttgaagcgtatgccgccgacgacacctcgcgaataacaatgatactcaacaagcattttgaagaaggcatgcccgtcgccgagctctattattacgcctccgcatacgggcaagggctaaacgcgtacaactggtttagaataggctcggacgttccataccattcgttcatgttttcgcgcgacaaggcaatattttatgggcagaccgaattccgcaacctaatacgcctcgacaacatcggctcagcagacctctccgacaaaaatgtggactggaaagagtcgaacaaggaggctaaaaagacagtcaaacgcgaagactatcccactgaatccacataccgccacgctattaccgccgaaggatataaaaaagaggcaaaatatttgaaggcaaacgcgctaaaaaaagccggaaacggaacaatgttttacgacaaagactacgacataatagtagtaaaagtcggcggaaaatggaaaaaactgcccgtggaggaactgccggaaggccaccctttaaaggaagagagctccgcgaaagattctgcggataataaatagccgccccgctcatactccgcttggggtttggaatattttgccccaaacctcggcatagacaaaaatctcgcctataattcaggctttgggatattttgcgctatgcctcggcggaggtctttatcctcaactatctcggcaactccaagctttttgatacaatgccgcgctcagctcagtttactttcctacgaattccgcaaatgcaactttgcattttttaattctatgcgtcggaaaaataaaaaaacgtaaaagaattttccgaactgccgaaaatagagtatcattgaataaaatgctcccccaaaattgttgcaccgccgccttatagaaaaagcgcgcacggcgcgcaatgcgctttgggataaaaaacgccgtttgtgcctttttgcgaaaaactaatatttatagagtccaatttatttgcggcaaagcgcctcaaacatgcggcgcaatattcctacacgttttcggcttcaacaaaaactaagcgggtatatttcaatacaaatattttaacgccactaggcgccccttcgaaatatgtccaccgcaaaaaaaatactcacgcggggaaaatttttctgttatgcatcagttgccaacgggcaattttatgtcttcgcgcggctttccgccttttgaatcaataaaggatatatcgatttctttagaattggcggaaacaatcattaaatcgacgttggaattgaccacgttcgggacatttataccgtctttgtctgccggatataacggcaagctgttctgcttgggattgaaagagtgcaaatgcccgctgagaatcacgtccgcgccggattcgtttatcagcggcataaaaagcttcctgaaatggagcgagccgtgccacgcgccccacgccggcgggacgtgcactattattatttttacaggcgcttttttgaaatcttcgttttttatcaattctgcgaaccattcggcctgttcccggcggtaagcgtcaaagtcagctgtggaaaagtattctatgtcgctgtcgggcttatcttcaccggcatcgagcattacaaagtatgtgccgccccatttgaaagagtagtacggtttgcctgtcggcgtcgggaaatattttaaaaattcctcggagaactccccccgcgtctcgtggttgccgcgcacaaaataaaccggcttctcgcttccggtaaactttactatctcgttcatgaagccttcgaatatctgccgctcggaatccatgcggcttaacatatcgccgttgagaacgataaaatctatatctttcggggcgcgagagagcaaatcggacaggcgctgggagtcctcatgaatatcgttgaccaccgcaaattttaccttttcagatgagtttggaatggggcgcagcaaaaaaggttttcccctatatacgtcgcttccagcatagtctccatagacgactttctcgccgtccctccccgtcacctctgcagagagcaccctatatctcacgggcttggagatatttttaaggcgcacgctatgaacagtcccgacaagtttcttgcccatcggagaattgaaaaactttggccgttcgtatgcgtaaaagtgcgtgccgtcgtccggagccgtttccacccacgataccgccggacggttggtaatccatgttatcacggcttcatctccgtaaagagagtgaatgtacgggccgtattttatggcgaacttttccgccttctcaggcttttccgccgaaaatgcgcaaactgcggcgattaaaaacgccgccatagcaaatattatgcgtttcataggataaaaaaatatattcagcgctcgcgcgcgcaataaaaaaaagaacacgcctgttcatattattgcatgccttccatctattttacgcaaaccaaccaacaaaaaagcggctcgaagatccacgctccaagccgcttgggaaaaattctgttattcaaaaaaattaacgcctgcgcctaaaccccgcaagcccgaagcagagcccgccaagcaatgcagcaatttcggcgggttcgggcaccacagtcagctgcaatattgtgccatccgcattaaacgccaactcgtattccttctccaaacctactatcccaaaatccttagaaaggtcgtcgtcgggcgtcccgtttagagaaaatccgcccgccgcgtttatgagatcatacgtcccatcgcctacttcaaagtccgtaaagtcgaagtttatttttccaccctgcgtcgagcaggtgccagtggttatcagctcgctgccttccacaagctctgccacctgaaaattcagcaccccagccacaacaagatctttaggcccatttttataatggtacacgttcaaattcttaatataagtattgagaaccgcgcctgagaaaacttccacattcgctccggtgactttatcaagcgccccagtttcctttgtcccgaaatttaccgttccggagcatatcattatgggatggtcagcgttgacttgaaaagtcgtttgggaggcgtcggcggcgcgcaccacgcttacagtagaatcggcattttcaagaacgactttgaatgtagccatattataagtcacattcgcatcagacgtatccttagaacctaacgatattgtcatattcttgcggccgccgaacgaaaatacagtctgcaatctctgtccgttataccagcctcccatatccattatttggttggtagagggcaatactatttcaaggggcgaacaaccctcttctactccggtaaattcgcctatgcctatccatggatatttatagtcgtatccgggcatactatcaagaggtgttggttccgtatttacataaaatcctttttgggtgccatcgtgcaaataagagctaatatttatgtttgaggttccggcatcatagtaattagaatagtcaagaaggctcgcgccggaatcgcctttaaaaatcagggcggcgtttgaggcggacaccatagctaatagcgcaacataggcaaggagagacccataaatagttttcatatttcagattaaatcgaatttattttcaaatacttatatggtattttataaatgtcaatagcattaaaatactcaaacttttcaatatcatactatacttaattaaatattcaaaattcacatatctattattcattttgcaaactgtataattaacacaaaaaaagtttagccgcacttggctaaacttttttacattccttaatttttacctaacgcctgcgcatcattgccgcatacctgccgcgcaagctctaaatctggtagtcttcgctattttgaccctctttgaaaagccgcgcgtatgccgccgctatgaacgccgttaaaggtattgccaatatcattccaagtattccgtcgagagctatcccccagaaaaatacggaaaatattatgactgtcgggtgcaaccccgtcttgccgcccattatcttcggcgtcagaaaatacccctccaacatctggaccgccacaaacacgcaaagcgcaagcgccgccgtaatcagaccgccccctggctggaaaaacgcagtcggcaatatggttcccagcccgactatcgttccaaaatacggtattatgtttaacattcccgcaataaatccaagcaaaaatccaaaccttaccccgacaaccgtgagccccaagcctatcaatacccccattatgaacgctatcagcacctgccccctaaaaaatgccgacattatcgaggcaaacctgcgcgcaaagaaaatcgcgtccgccttcatcttcgggctcataaattctatattattttcaagaaactcaaaaaagtcaaagcgcgacgtcaacatataatacaaatagataggcgccactgcaaacgccgccacaaaagacgcaaacgagaccgccccgccggttgcgctcgcggcagtcttaaaaaaattgcccatatatccggaaaccgtctccaaagaaagattttttagcgcaatatcctttaacgcggcggttttttcggcgattatatcctttaactggggaaaatgctccaccatgcgcgccgacgccttcgaaaacaaatcgggcagcgacgctgcaaacgcgcatatctccgatatgaacgccggcaaaaccgccaccagcccccccgttatcaccacaaccaaaaacgccatcattatccagcacgccgccgtgcgcccaaccctgagcctatccgccatgaaatccactgccggctttaaaataaacgacaatatcaccgcaagcgccaacggccaaatcaccgccccgaacttgtccagaaacgcacccaatatcttaaacaccgcaatcgcgaatccgcctatcgcgcatatcgataagcaaagaatcgcaatccccgccactttttgctggaatccgtttaacatttgaaaagaatataatctttaaaaaaccgacaatgcaaacaaatttatcaacccccaaaaccgcgccggcccagaaaaaacgcgaagccgtcgccgctgcggccaacgggggattcattgaggtgcgcggcgcatgcgaacacaacctcaaaaatgtggacgtcgatatcccgcgcggaaaaattgtcgccttcacaggcagaagcggctccggaaaaacaaccctcgcattcgacacaatttacgcagagggatacagaaagtacatggaaagcctatccgcggacgcaaggagggctttgagccaaattgacaagccggctgtcggttcaatatcggggctatcgccggtaatcgccatagagcagataaaatccctcggctcaaacccgcgcacaacactcgccaccctcacggaaatcgcggactactcgcgcctcgtatggagcgtcgcgggagagcaaagatgcccgcacgacggcggaaaaatatcacgcagaagcctcgacgaatgtgtcgatgcagtcctcgcccttccgtccgacgcccgcatttatatcctcgcgccgcgcatttgcgcacgcccgtcggaaatcaaggacgaagtaaagtcgctgaggcagcaggcttggcagcgcgcaaggctcgcgggcgaaattttcgagctcgacgacccggcggagggaaagcgcattttctcatcgctttcagccgcgaaaaaataccggcttgaacttgtcgttgaccgcttcacatcggcatcggcgtcgcgcgaaagggtcgcggactccctcgagctcgcgtttagggagggaagcgaatccgccgtggcgctttactcgtccgaatcgcaaacggcgggagaatttagggaaatgcacctgagctcggcgctctcgtgcgaaatttgcggggagacattcaaggagctcagcgttcgaagcttctcattcaaccaccctgacggcgcgtgcccgcactgtggcggcattggaagggtaatgcgcacttcccctgagctcgccgttccagacgactcaaaaagcgtgagggcgggcgccgtaaaagcgtggagatacggcgcaaaaagcatgattataaagcggaaatcgattctccgccaactctcagagcaaattccgttcgacatcaataccccgtggcgcgacctccccaaaaaagtccgcgacaccattctatacggcgacccggaaagagtgtttatgctgaggctaaaacgcggaaactcgcggcccgagcctgtcgtattcggaggggttctcgcggacgtggacagaatctgcaagtccactccaagcgacgccctgcgcgcgcgcctctcaattttccagacttccgtcacttgccccgaatgcggaggggcgaggctctcggaacgctcgcggaacgtctttgtaggaggggtttcatacgacaagttctttgcaatgagtgtcgatgaagcccgcggattcgtggaaaaactgcttcaagacccaaaatattcgcccgttcacgaagccctcgaaggcctctcggcgcggctcggatttctcgacagagtcgggctctcgtaccttacgctcgaccgcgaggcctctacgctatcaggaggcgaagctcagcgcgcgcgcttggcaacacagctcggcatgaatctcacaggtgtcacttacgtgctcgacgagcccacaatcggcctccaccccgcggacgacaacatgttaatcggcgctctcaaaagcctgcgcgacagcggaaacactgtgctgctcgtggagcacgacgaagccgcgcttaaagcgtcggactggattgttgagctcggcccggaggccggcgaaaacggcggaagactcgtcttcaacgggactgtcgccgactgtatgaaatctaaggagtcgcgaaccggaatgtacctatccggacgggcgaaaatcgaaaggcattcgctgcaaatgcccccgggaaagcaatggatagaaattaaaaaggcgcgcgaaaacaaccttaaaaatataaacgctaaattccccgttgggctgtttaccgtcgtatgcggcgtgtcgggctcaggcaagagcacgctcgtaaacgaaatactcgcgaaggccgcggcgttcaagctaaacggcgcaaaggaaatatgcggggcgcacggggggatttccggccttgaaaatttcgtatcgtgcgtgagggttgaccagtcgccaatcggcaagagcccgcgctcgaacccggcaacctacacaaagcttttcgacctcctgcgcgagctctattcgcaatgcccggcagcaaaagtccgcggatacggcccgggcagattcagcttcaacctaaaaggaggaaggtgcgaaaactgctgcggagacggctctatacgcctcgatatgcagttcctcggcgacgtgtacgtcacctgcccgagctgcggagggaagcgctacaaccgcgaaacgctcgaagtccgctacaaggggctaaacatcgctgaggctctaaacctgactgtcgatgaggcaatggaagttttcgccccgcaccagcggattatggcaaagcttgaaacgcttagcaatgtcgggctcggatacataaggctcgggcaagcggcaaacaccctatcgggaggcgaagcgcagcggataaagctttctctcgaactctcccgccgcccgcgcgggcacgccctgtacattctcgacgagcccaccaccggactgcactgggacgatgtcgataaactcctgcggctactattcgggctcagggacgccgggcatacggttatagtaatagaacaccaccccgactttataaggctcgccgactggcttgtggaactcggcccgtcgggcggcaaggacggcggaaagataatatttgaaggaactcctcaaaagctcgaaggggcggatacgccgacggcgaaattcaccctgaacaaatgacggagtattttgtcaaaatgaaaacgaaaaaatatcgccgccgcggctgaaaattccgcgcggaatttaaaacaaaggacttatgaacttagtcgaatacggaatcgacacgtcgcagcttagggaaataacgcttgcggacaaacctaaaatcgactccctactgtcgctcgcgccaaatttaggctgtgagaactgctttacaaacctgtttgtttggaggggcatatatttgctaaaactgctctatattgcggaagacagggctgtaatatacaatgggcgcgacaagtgcatatacttcccaatagggcgcattccaagcccgcgggagctgcttgaaatccaccgcgctttctcggaaaacaaactgctcttaccggacagccgcatatacaacgtaccgccggactatcccgaaaagttccccgaagcccaggcgctgttcgacttcgacgcaaaccccggcgaggcggactacatttacgatgtggagaagcagattgccctcaccggccctaagctaagaaaaaagcgcaaccacataaaacactttaccgcgcaaaatccgaacgcctccgtcgagcccatgggcgagtcaaactttaaaagtgtgctcaggtttatggacagcgaagacgacaaaaagcacctattcgcggaggaagttgcaatcgcagaagcgttcgagaatttccgcacactcggcctgtacgggactgtcctatactccgaacccggcaaaatagcggcggctgcagtcatgggcccgatgagctccaccgcacattccgtccactttgaaaaatccgacaaactcgtggaaggggcgagccaaatgattgtaaagtgcgaagcccaatccatactcgaacacggcggaaagttcatgaaccgcgaacaagacctcggcgatcctaacctaaggcacgcgaaggaatcgctcgacccggatttcatgtacggccgactcggggcaaaacccagaaagggcgcaacggcatgattaaaatattcgaactggacacccacagcccgaagtcgtacgcagacggagtcgaaaggctctacgaactcgcaggctggtcgccttcgggcgaaagttccgaaagcgcggcaagggcgattaaaaactcgtattgcgccttcggagcttttgacggacaaaagcttgtcggcttcttccgcgcactgtcggacggcgtttccgacgcgtatttgctcgacctgttcgtcgatccggaatacaggggccgcggaataggcggcgaacttgccgcaagaattatcgcaaaattaaagggagacggcatcgaatggataaccgcaatctcaactcccgaagcgaaaaatctatatttgcgaataggcaagcgcatgaaagcgcacgtcccgattcgctttttgtgaaatctgcaaaaaccgccgttaacacgcgccgcaaaaaaagaagcgtagcaaactttttttgtgggcgactgcgcaatagcaacattaggcgcaattgaatgcccaattgccgccgcgcgtactccccgacattgaagtttgccttgcaaaggcagcaggctcatcgcgcggaatatgccttgcagcggccgccgcaacacccgtttaatgcaattaatcgcgcaaaatctgaggcaaaaaagtttgctaaaataaatgctcttttaatttttaccaagctcttccccgcaagcgccgcaaaaatgcgcaatacgccggaaggacttttaagcgccgcccccgcattccgggaaactgcgacttaccgcccaatccaaattttttataacagtaaaatacttgcgccagtcagaacatagttgacaatttaagcgcgtctaattctattaaaaatctcttatgcccgaaaaccaacaaaaactttcggaaaacctcgaggactacctcgaaacaatctcgtcgctgtcggcgggaacgggggcggcgcggccgtccgacatcgccgccgcaatgagcgtcaaaaggccgtcggtgaccgccgcgctcaattcgctcagggaaaaggggcttgtagaatacgaaaaatataaacccgtaacccttacaaaagacggcgaagccgtggctatgaatgtaaggcgcaagcacaggctgcttagcgacttcttcaccggagttttaggcgtaaacgcgagcgaagcggatctcgccgcatgccgaatggagcatgcgctcgaagattcaataatgagaaagctcgtaaaattcctcaaaggccgcggaaccggcatgtgctcagcctgcccaaaccgctcgccgacctgcgaggcaacttgcccgcacgcgatgccgcttagcgaactttcaaaaggcgaacgcgcgcttgtcctttccatagacaagaaaatcggaaacctcgcgacttacgccggaatgggccttacaataggctcgacagtttcaatactgcgcgtggcgccgctcggggaccccgtgataataagcgtccacggctcggaaatttcaatgagaaaatcccagctgcgaaacattatggttaagcgcatataaaaatttttaaaaccaagttaggcaaaactaacatatgaaaaacggccatcttaaaatactgctcgccgggaatccgaactccggaaagacgaccatttttaacgaactctcgggaatgagggcgaaagtcggcaactacgccggcgtgacagttgaaaagaagactggcaagttcagcgcgggaggctttgaaatagaagtcgaagacctgccgggcgtctatacgctatcggcctccacagccgaggaaaaagtcgccgccgacgcgatttcggcgggggacttcgaccttatcgtaaatgtcgtagattcgtccaattttgagagaaacctatttctcacaatgcagcttgcggagatgaaaatgccgatgattgtagccctaaacatgagcgacgaactcgaaaaagagggcaaattcattgatgcggcctccctttctgccgcgattggctgcccggtgattaaaaccacaggctacgacgcccgctccgtatccggtcttaaaaatttcattgtggaaaacgcgcgcgcatgcaccctcgcgcacttcccgtggaaggcctccggcgacaatatcctcacgagaaaaatggcggaaatttccagaataatttccgatgccctcccgccgcccttcaagtcgtacgcggattggatggctgtgagatttctcgaaaaagacgcctcagtgaccgcctccatacgcgaaaaagccccgcatatttacgaagccgcaaaagcctgcgccgccgagcttgaagcccagacggacgaaaaccccggcgcgctcgtggcagccgcaaggtacaaaattatagacgacatttgcatgccgtgcctaaaaacccgcgcccacgcacgcgcaaatgctacaagaatactagactgcatatttctaaacaggtttgtaggcatacccattttcttcgcgctgatgtacggcgtattcgaatttgtttttgcgctcggagaaccgctgatggcagttcttgaacatttttttgcggtgctcgcaggcgcaataggggcttcgtggcccgacagcatgcctttcctaaaaaagctcgttattgagggcgtcataggaggagtcggcggagtattcgtatttctgccgaatgtcgccctgctcttccttgcgctctcgattctcgaagacagcgggtatatggcaagggcggcattcctttgcgacaggtttatgcgaaggtttgggctgagcggctccagcgtgattccaatgcttcttggcttcggctgctcggtcccggccattatggcaacgcgcgcgctaaaatcgcgaatggaaaggctggcgacgattatggtgattccgctatttagctgcggggcgcgcttccccgtttacatgctgcttatccccgcgttttttgcgccaaagtactgtggcccggttatgtttgcaatttatgtaataggcatcgcggcggcaatggcgctcgcaaaagttttgcgcgaaaccgtcgtaaaaggcgaagactcgtcgttcctgatagagctgccgccttacaggctcccgagaattaagacggtggcgctggaagtatggtgcaaaacctacggatttatccaaaaggcgggtacgataattttggcgatgtccataatactttggacgctctcaacattcccggaaaagaaaaattttacgcaagattacgatgccgccatcgcaaaaatagaggcggacacctccatcgacgcaaaaacaaaagcttcccaaacggcgcaaatagaaaacgcaaagctaaaagaatcgttcgactacactgcaatgggcagaattggcaatgcgctcgaaccgctctttaaacccctcggattcgataataaaatagtaagcgcgcttatagggtcgctcgcggcgaaggaggtatttatatcgcaactcggaataatatacggctcgggctcgggcgacaaaaatgcggacgtttcacttcggcaaaaaatatctgccgactacaatcaggcccagggcataagcattcttatattcatattaatgacagccccctgcatcgcgactctcgcaactacttactccgaaactaagtcgttaaaaatggcagctgcgcaattttttgggctcgcgctgctcgcatattgcatggcgtttattttttacaggatagcgctgctcgcatagcgcgttgcttcaattattgcaatcttgcgcaatgcatgctgcccaaaggtattatatttcaatagtaaaacaacaatctgcattcttattttaggaagataggcattttttagttgtcgtaaaataagttgatttttttaaaaaaacggcaaaaatacccgcatgaatgcgagtaaactatctttcaaaataatacttttcaccttggctctaaattgctgtggcatgctctcagcagctgaaaatacattttatttttggggagacgcaacgggatatcaaaaaatgccgaatgtcgtcgacgcagcatcttggagtacatcaagaagcgaatatgtaccgccatctgaggggacgaatgtcaactctacggacgcgaactgggtaatagactacgaagcgcacttgcccataagcatgcgcagagagggatactattacaatataacaaccccaactcttaacttgggttcgatatcaatagtaaacttcaactacaacactatcgaatcatattatgactctaagggcaatctgataactggcgacaacgcaagcgccaaaacaatgctaatttccgacgccaacaatgcatactggaatattggcaattttacgtttacaggcggaacatcttcggcgacagtagtgtttgggtcgtcaaaattcaattcaacgcaacctgaagttacgcttgggagcgtcgatataggcagcgacggcgcaaaatcaattatatacttcggcggagacgcttcgggcgtttgcctcgccaccatgggcgacaatgccgggaaaaacgtcactatgaatgaagatgcctgcatgaaatacctaacagtaaacggagatttcaacataacaggcaattcaactgtcggcttgaatgtctggaatgaagacacatccgcgctgcactcggaaaacacgcccgacattgtaatagacggagtcgtgagaatgacgccttccagcaccggagagctcccgcgactaaatattttaaacagggtaaacgtcataagctggagctcctcgaagcccgcgcctggggcaacgcacatttacgcaaaaatcggcggtcttgacggcatgggcgtttttacgaacaactcgcgcacaatggaatcgagcacggtaaaattgatatttacaaatgaagtggattgcgaattcagcggcgaattcagcgaaaagcccgccgacgacgtcactactgtaatgagcgttaaaatggccggcattgacgggaaaaagcagataatccacgcagacgcgcaatttagcggcacagtggaagtcgaaagcggaactcttataatgaaaagctcaaccgccctcggcaaactaactatgagaggcggcgcatttggaggcatcgacggtggagttaaagtctccggcgccgactggtacggcggcgacattatcctttacggcgccgatgcgctcaatagcggaatcgccgacaaaataacagttgacggcaaactttcaaaacttggagacggcccaataggagtggactttaacggctatgaagtgttatccgagaatatagacaatgaagaattcttctacgagctattgacggcaaccgagcgcgaaggcttctccgacgacgcaaatgaagatttttacgccaagaatcttgaaaactgcttcgcaaattttgaatgggtgggcaatacgcttacggtatcgttcgcgagcgtcccggaaccggccgagataggcgcgctgatagggcttttagcgcttgcaatagcggcgcgtaggaaaagatagccctatttgctgcggaaagcattactcgctaacaaaacttcaaaaagcttcggttaagccgaagctttttttgtttccctaattatccccccataaaatattttttccataagcgcatattaaacaaaaaatacggaacttgacaaacattgcaccctcagatttgttttatataaaaaactcaatttcaatacaaaggattgacagattccgcacacgtatttttatgtaaatgtacggcgcgcaactatcgatactttaagcgccgtttcaccaaagggaggaaataataaacatgagggaaatactgctcgatacagatatcgccgaacttcacatgccgctcatattcgaatcgcatgatgaggctgtttccgaattcgggcgcgcattacgcacaatgcaaaacctcggcgcccagattgtctgcgcagaactattcgggccaaagtgggtggcggaagcggcaggaaatattttggagggaataccggcaaaccatattttaccgctccgcgaaaatgagcttccggttctcgcaggcgcccatattaccgcaattagagggacgcgcgcgaattttaacaaagtaggagactactttaccgcaacgtatgcggcgggcggaataaaatattttagaagcttcggaataacgccgggaaaatccgatgctgagggctacggggaaactttaaaaaatctctcggagatgaagcgcctgctcgaaagcggaggatataaatttacagacattgcaagaacttggttttacaattttgaattgctcgactggtactccgaatttaaccgcgccagaactgagtttttccagaaagaaggcatatttaaagcgctgcta

SEQ ID NO: 1245 - DNA, 8032 bp, Unknown
  16S sequences of unknown bacteria
cctcttcaataacctcgtccgcgacagtatctgcccatacgacaatcagcatccctgctccaagctggatacattttttctgtgccattgtatcagctccgacaatgacgatccttttttccacttcataatgatccagacgctccggccgggtcattgcaatgatgctgacctttccgttgatcgcaacctgcggatcgtcatagatgatcgcgccattgattgtcttacggatattttcgcaggaggtatgtgccagaatgtcgatggaacgcgctgtgtcgtccagtccgacgacagaaatatccgatttcgtcaccattccgagcagatgctgtgtggtatcgaccactccgcaataggcacagttatgttcctgcatgatctgcattgcctcgtaaatcgtcgtgtccggcgtgattgcgacaggagcatccatctcgatctccgagagcttcatccgcgcatcctgcagatgtagcggtgcttcaaagccgaaccgcttcagtagatattccgtctccgaattcaatgaaccaagacggcaggggatcgccgggatccccattgattttttaaaaaaggcataggcgatagaggatgcgatcgaatccgtatccggatgccgatgcccggtaatatatactggacttttctttttcatggcagaagatacctccgtaattttcctccgaatcaggcaagcctgtccggggtcatttaaccatcatttttatatcaaaagcataccgtcagaatgaaggaaagtcaatcctgtgtttgtgtcagccggatttgtcagcacctgatttatcagaataatcagataattatgctataaaataaaaaaagtaaaaaagatacttgacataaagaaaacattatgatattattaagctatcaaaaggaaagacaaatacaagaaagaggtacagtccaatgaagtaagaatctttcacccaaaagaaacaagaaggacacacaccgaaaaggggttggtaccagtgaaaggaagagatccgtagcttacggagaatgttcaattccaaatttaaagacaggaggtacggtccaaagggaaagtaaagcttcaaattcgcagacaatgaaagtagaaggtgtagacaatgaaattacaggaaattcattgagagcccgatcgaaggaaagaaaaatcgatcgggctcttatctgtctgactgcttctttacaaaacagaaactttctggtagaataacataatgaaacgcatgaaatgcgaagcaatccgtgtatcatagcataatattacggggtatggcgtagcttggtagcgcgctcggctgggggccgagaggtcgcaggttcaaatcctgttgccccgatcaagagcacatttgcgaaaagcagatgtgctcttttactggatatttatacaatgatgataccggcaaaggagagagaaacaaatgaaagaaaaaaacagttttagcggctcgatcggattcgttctggccgcagcgggaagtgcggtcggagtggggaatatctggcgattcccgtatttatgtgcgaaggatggcggagggcttttcctgctcgtgtaccttgtgcttgtactcaccttcggctttgtgcttctgactacggatgtagcgatcgggcggaagacgaagaagaatgcattgaaggcgtttggggcgctcaaaaagcgctggggctttctcggctatctgacgtttctcgtgccgactttgattatgacgtattattccgtcatcggcggatggatcacgaaatattttgtgtcgtatgtcgtatcggatggaagtgcgctcgcggaggacggatattttacttccttcatcacttccaaagtagctccgatcgtctttatgctcattttccttgcgctgaccgcatggatcgtctatcgcggcgtcgaaaaaggcattgagaaattttcgagctttattatgccggggctgatcgtactgatcgtcgtgatcgcagtgttttctctgacactgtcccacacggatgcggacgacacggtgcgcaccggtatgcagggactgatggtctatctgaagccggactttaccggtctgacggtcaagcgctttcttgagatcctgctggatgcgatgagccagctgttcttttcgttaagcgtctctatgggaatcatggtcacgtatggctcctatgtaaaagatgatgtgaatctttccaaggcgatgaaccagatcgagctgtttgataccggggtggcggtccttgcaggtatgatgatcattccggcggtgttcgtatttcttggtaccgatggcatggcgtccggaccgagtctgatctttatttcattgccgaaggtctttcaggcgatgggaggtgcaggacggattgtggcggctgcttttttcctgatgctcggcttcgcggcgctgacctcctgcgtatccgtcatggagacgctcgtggcgaactgcatggagctgtttcatcagccacgtaagaagatgtgcgcgctgatcggaatttattcgcttgtcacggctgtcgtgatctgccttggctacaacgtattctactttgaactgaagctgccgaacggatcggccgctcagctcctggatctgatggactatatcagcaacagcttcctgatgccgttcatctctctgctcacgagcatcctgatcggctgggtcgtaaagccacactggatcatcagcgaagtggaaaagaacggggagcatttccgccgggcaaggctgtattatattatgatccgctacattgtgcctccggtcatgctgattttgttccttgtgtcaaccggatttgtgaattggctgttttagccgaatcaagcaagaggaaataagcggtaacaaaaacgggtatgcaaacgctaaattgcgtaagcagtttctaaaatcatttcttattgactaataaaacatccggagcgtacaatgagtaaaacgaatcaaaagcgaggtgagggcagatgcagagcttgtcaaaagcgatggcaggagacgcctgtacggtaaaatggatgtttggggttccggagctgctccgatacctgagagcgaatcacattgaggagggaagcgcgatccaggtcgtgcagaactgctggggaaatatgattgtggaggcagaaggaaagtattttgcagtcagtaaggacgtggcagaccggatcaaggtctgagccggaaaatgatgcagccgttggatgtagaaagtctaacggctgtattttttattctgcgaacaccgaaataaataacctgccgtctcagtggatttgctcctccagagttctgctatgtcggtgaacctgttggtggggctgatttggcagctgcctgcgcgaataaacgacaaggtacgaatgcgcttatcaaattgccaacaattgatactttgaccgcaagatgtgcattgaaattgggggtacgccctgctatactgtcaataccagagaaaaatgccataaattctgacattagtacagaaaaaggcaatacgaacaaattaaaattcccgcgacaaagctgcaaggatcaattccgtcggagatactatgtcgaaaaagttttgaagatagcacgcagggaacgcgggaatataaaaaagggggatttacgcatgaagatttatgtcaatgcgaatgcaggacgcgatggcaatggtacggctgccatgccgttccgccacatcaatgatgcagcaaaagttgctatgccgggtgacgaggtactcgtggcaccgggaatttaccgggaatatgtcgatccggtgcatgccgggactgaggatgcacggatttcctaccgcagcacagagccgctcggtgccgtcatcaccggagcagagcaggtaaagacatggaaacagtacgacggaaatgtatgggtatgccgtatcagcaacagcatcttcggcagttacaatccatatacgatcttcgtctacggtgactggtattttgcaaaagcagacaagcataccggctgtgtctatttaaatgaccgtgcgatctatgagacagccacgctggcagactgtatcgccggtgaggtctacgagtgcagctgggtaccggaagagtccgtatacaaatggtataccgagcaggacacggagacagacgagactgttatctatgcaaatttccagggcaagaatccgaacgaggagaacgtcgagatcaacgtacgccgcgagtgcttcttcccgtcgaagaccggtgtgagctacatcaccgtcagcggattcaatatcaataaagcagcgacgacttgggcgcctccggccgcttttcaggacggtatgatcggcccgcactggagtaagggctggatcattgaggactgtgacatttcgaacagtaaatgtgccggtatctccgttggcaaatacctcgacccggacaacgaccactactttacttataagcaggtcaagagtccgacccagatggagcgcgacgccgtatgccgcggccagtatcatggatggctgaaggagaaggtcggcagccatatcatccgcagaaataacatccatcactgtgagcagggcggtatcatcggccgtatgggtggcgtattcagcatcattgaggacaaccatatccatcacatcaacaatatgatggagcagggcggagcagagatcgcaggtatcaagatgcacgcggccatcgacgtgacgatgcgccgcaaccacatccaccactgcacgatgggcatctggtgcgactgggaggcacagggcacacgcctatctcagaatctgttgcatgacaaccagcgcccggcttttgcgaagccactgaagggtggcatgatgtctcaggatatcttcgtagaggtcagccacggcccgacactgatcgataacaacatcatgctttccgatgcgggtatgcgttttgccacacagggtgtcgcaatggtacacaatctcatctgcggcgcactgacctgcgtaggagagggcaccagctggagatatacaccgtaccatattccgcaccgcactgaggtcatgggctttatgaccttcctgcacggcgatgaccgtttctacaataatattttcgttcagaagcatcctgctgaggatatcatcaccccgcatgattccgatgatggttttgattctgagaaccgtacagtcggcacctggacgtttgacgagtatccgacatatgacgagtggatctcccagtttgactttacgaagccggcagatatgaagaagctcgagcctgcacatttcggacaccttccggtatggagtgagggaaatgtatacctcggaggagcaaaagcatggaagcatgagaaagatggactggtcactgctgaagaccgcagtgccgtaaaggtagagctggtggagaaggatggcagctactatctggatacaaatatttatgagctgatcaaagatttcaggagccacagcatggtaaataccggtgtactcggaaaagcattcgagccggagcagccgtttgagaatccggatggcaccacgattcagttcgatgcagattacttcggaggccaccgcggcaccgagattctcccgggaccgttcgcggcagcggaggatgcgaaaaaagcactgtaatcaagtaaatacagaaataccgaaaggccggagcgatccggcctttttcactttcattgcgtacctgtaattgctttgcgcaattgaacactattccgacggatatctgaactgggttgcaccgttttatctgctgctcggctttctggctgtctcagatcattggttatacggcggtctgcatcgccagcccactggcatggcttggtgcgatcgcattgcttatcccggtctactacagaatgatgcgcggagtgcctgccgcggtataattctgctttctttttttggcattttgcacattattttgtgaaaaaattgaacaaaactgacaaaaatccagttccatgggatttattgggaatatctcttgctttttcttctgagatgggctatacttcgagccgtagagctatgcagagtaagttcatgtgcgtaaagtgcctttcggatggagagttgccgaaggacgaaaagagaaatcttgcggtacgtgaattgcttctcgctgcaacagaagataagtaaattaaaattatctcctattgtgtgcgaaaaagtaaaaaggaggtaatttttttatggaaaaaaaagggaacatgtttctcgactcagccaaagagctgaaaaaaacgtctgcacttgcggtctgtgcgatgctggctgcacttgccctgattctgaattctgtggcttcgattaatatcggaccgtatgtaaaaatcggtttttccggtatcccgaaccagcttatggactatctgttcggaccggtttccggctgtctgtttgcaggtgtgctggatctggtaaagttcttcatgaagccggacggaccattcttcttcggcttcacattcaatgcgatgctggcagcgttcatttacggctgcttttattatcgccgcaagttgaccatctggcgtgtgcttgcagcaaagtttgtagtcattctgatcgtaaatgtgttgctgaatacgttatggctggacatgctctacggaaagggattcctcgcgatcctgccgatgcgtgcattcaagaacctgatcatgtggccgatcgattccgtcattttctttacgatcacccgcctgctcgagcagaccggaattttccgtatattccgtcatggccaggttccggctatggactgatcgccaaggcattcttgaactgataacaataaaaacaaatgaatagctctatcagaaaaagcaatgggagtgttcctgcggatgcagtggcactccctttttggtatatcttttactcatacactcatgtcaaaacatgtttcctatgtaaaggcagatatgatagcatactatacattattttcttacagatactccacctgaaacccattctccctgcaataccggtccatcttagacccctgatagcagcgcacggtcgtggcacggttgatgatccactcgccaataaattccgggtcgtggcgcacttcgagatactgcaggcggttgcagccgtggaacgcctatttaccgatgtagcggacattttcgggcaggcgaatccaggccaggttcacacatttgaagaacgcgctgtcctctaatacttcgaggcttttcggcagttcaagctccggaaaagcacagaagtaaaatgcctgtacgctgatcttccggatgctcgccggcaaatgcagagaagagagcgatttgcagcggtagaaagcgcggctgccgatctcagtgaccgtatccggcaacgcgatgtcggtcagagaagtacattcacaaaatgcattcggctggatcacgcgcataccgtcgtcgccatagaaagaaaccgatgttaatttgcggtcagccttaaagacatcccgtgagagcgtagggagcgatgccggaagcgtggcggtggtcagattctggcagtctgcgaaagcctgcatgccaagctcgcacagtttttccgggagctgaaccgatctaaggaaatagcagccataaaacgcattcgctccgatacgggacagcgtggacgggaactgtacggactggatgacatttcgtttctggaaagcgccatttgcgatgatatccatatacttcgggatgcgcacgttttcagcaagatagcgaccagccatctggcgggtcaggaccttcggggcggaacgatgaacttcataatacataaaaacactccttagtgggtggaaatggcaccggaaagtccaccttattgaaaacgatctgcaatacctgtaagccataccggggcaaggtgctcatcgacggcaagccggtcggaaaatataagagcggcgatctgtttcgccacaatctggccctgctcccgcaggacccgaaaagcctgtttgtgaaaaagacggtacgggaggagcttctgg

SEQ ID NO: 1246 - DNA, 10632 bp, Unknown
  16S sequences of unknown bacteria
gcacagtggaaagaagattatccggagatctatgaaaagacgctgcagggggttccgatgcgccgcttcgccgatccggaaggcgacgtgggccgtgtctgcgtctttctggcttcggaagacgcatctttcatcacgggagagacgatttccgtacagggaggcggaagcctgagaccgtaaaattctgaaaatccgtggattttcaggctaactggcccttcgctccacatcccccgcagatgtttgaaacgttcaaaaaaagaacgaaccgctttccgtaaagaagaaagcggttcgttcttttcatttctatttattgccaataaatttgcagacggtctttgcttccagtctgcggtcttgctttatatcattcataaaattgtcatttttcgtttcgtccccggcagggacagcggaatccccctgctgcagacgggagttcccctctgcaggccgaaatcgcgtttcggctgcggcgcgccttggcgcatcgcttttccgtttaaagatatccttccgatgtcagaaacgaattaattctgtcgtacttggaaagcacttttgtcgcgtacttcgtattgtacgatccttttttgacgctgccgattccccagttataagaagacagagctttgactctgtcctgaccgaaggtggtcagcgcctggccgagatatatcgctcccatctgtatattcggcttcatctgcagcagctgagctttagaaaaaccatagctctctcccgtagaaagtttgatctgcatcagtccggcgcaattatgagaattcaggattcccgtataaaatgtgctctcgcactgagcgacagccatcagcagtttaggatccacgctgtagattttgccgtaagcatcaaagtagcggaccatatttgcggcttcgttcatcggcacattcggattgatgtgcacgatataggcagcgcgacccttgatggaattggaatcggctgctttgaaataggacgcggcgtctatttcatcatcagtactgatatacacgcccgaatagctttcgtaatacgacgaccatccgaacggttcataagaaacgattgcgtttagcggaacatacactattgtattctttaccagtacaggttgctccatgagatcgatctgagatgcagtgagcttcggaatcccgatttttgaatcctctgcttctgatgtctcgccgtccgccgttttatcggctccttccgcagccggaacttcgtctgacatctcccgggcgttcggcccggacgtcacgacagcttcactgctgccgctgccgacggtgccgtcctctgtctctgacagttctccactgtaaacctcggcggcctcatcggcagcatcgaaattcatcgcgctgctgacttcaaatacagcattcagaatcactgcattcgtattttcccctgttacatttgcctgttcattcgtcaagcttgcatccccgttttgagcgtcctgatacacgacaacgctgatgtccgtacggacggctgccggaaccttctccagattgtttttcactcccctttcggtaaggttcttctgtacaggattcgtcttcaaaattttcagtgtgcggctttcgttgtccatttccgcctcaaaccccataatctttccgatttctgaatccatcggaacgtaaaggcggtcattgtgcatgagaaatggattactaagttcatagttgactatgttttccccgttaatgacaatgtttttcagaaaaaaatcaccctgaatgacttcatccgcataaatagaaattgaagagaaaattaagatcgtcaatgaaagccacacagataaaagcttctttgccatatctttcttcctctcttcggaacgtatgttgttttaacgtacgagcagattatatcaccctgatcttctaatgtccagaaataatttaatcaaatagccatttcttccgtatattatacgacgaattatccttttttgtataatttttctatacaaatagacaaattagtacaaaatatttctaaacgcatccaatcagaccaaattggacggcgtattatttttccagatagtttcttttatttaccacctgtccgccgcgcacaaaaaaacggggaacacgccggtttacggcacagaccacctcatatccgatggtgcggtatctgtctcccacctcgtcggcagagataaattccccgccctggcggccgaaaaggacgacttcttctccgatttcgacattttcaaaaccgttgagatcgatcatacactgatccatgcagatactgccgagcactctcacccgctttccccgaaagagcacttccgcgcgtccgctctgcgctctggtatatccgtcggcatagcccacggcgatggtgccgatctgatctcccggcgcagaggtgtagcgtccgccgtaactgatctcacacgcttccttcaccgtcttcacatggacgattctggtcttaaaagacatcacaggacgaattttcagctgtttccgatccacctctctcgaaggataaatgccgtagaggataatccccggacgcaccatatcatgataagtgtccggcatttccataatagccgcactgttggccgcgtgtttctgttttatctgtattccccgcgcacgaagcttgtctgcaaattcgagatagcgccggtgctgattcagagcccgcgtcttatctctttcatccgccgtggcgaaatgagtaaacagcccttcgatccgcacatcgggaagtgacgcgatcttttccacttcctccgctccccggtcgtcagcagaaaatccgattcgcgtcattcccgtatcgactttgatatgaatccgggcagtcctgcctgttcttcccgcggcatccgacagaaggcgggccttttcgcaagaggtcaccgcatgctgcagatccgccgctactgacaattcctccgtgccgtagggaatgtttcccaaaacgagaatatctctgtccggttcatactgacgcagctccaatgcttcatccaggcttgataccgcgaactgatcggcgcccgcctccttcagcgtcccgatcacgtcctctgcagaatgaccgtatgcatttgccttaactacagcgcagatctgaacgtccgctcccactttttcccgtatatttttcatattataagacagagcgtccaaatcgatttccgcccatttcgcctctgtcttcatctcatcactgtaactcatccatcctcttttctgacgttatacctctcatagccggcttcatccaagactcgcagacaccggctcctgtccgcctgctacagcgacctgcaggccgctttctgtccgaacgctgtttttcgacgattctatcttaccaatgatccatccgccgaacaactgtaaaatgagaagaaagacaaataaaacccacttttttacaggagaaaaagcagaaacaactgcaggatttacaggtttcgccgcttcccccaaatcaaaccgagacgataaaaaacaccggagtctgattcgactccggtgcatctgacttctaaaaactttatttctccaattcctccagcagtttcggaatgacttcaaacagatctcccacgatgccgtaatcggcgaaattaaagatggctgcataccggtgaatattgatggcgatgacgatatccgactcccacatacccacgatatgctgtgtcgcaccggaaatgccgcatgcgatgtagattttcggctttaccgtagcgcccgcctgaccgacctgatgttcaaaatcgatccatcccagatccacagccacgcgggaagctcccaccactccgttgagcttgtcggctaaccgatagataatatcaaatccttccggtccgcctacgcctcttccgccggatacgataatatccgcatccgtgagcgccaccacttttttggctacttttgccacctcgcggatctgcgtcatcatatccgcaggatcggcctccggcgaaacggcgatgatctcacccttacggtccggctggcggctgccttccaaaactccgggacgtgctgtgacaacagccattttattctcatctgcaaagacgattttaccgaggaaatttccgccgaaagatgttttgtcagcagagagctttccctcttcatcgaagtaaactctgccgcattcggagataattccgatatccatgcgcgctgcgagacgaggcgccagatcacgccggtcaaagaccgaaccgaacaggaaaatcctcggatgatgccgcctgacaagcttctccagaaccctggtaaaaagttcgttgttgtaattcccgtagatttcatcatccaggacgtagaccttatccgctccgaactcgatgagttcccgtccgtaccgctccacaccgttaccgatgatgacagcgcagacttcgccgccggtatgatctgccagcgaccgggccgcgcccaggacttcactggtgacattatgaagcttttccggcgtgtgctcggcatacacccatacgtcgtttgtaagctgtgattcctctgacctctgcagcaatgtcataatcctcctctttctgcctcggaattctctctgtccgttttccgcccctttattttttcttaggcgcgaaagtatcggcagcgataaccatctgctgcacctgagaagttccttcgtaaatctctgtaatctttgcgtctctgtacattctctcgatcgggcggtccgccatataaccgtatccgccgtggaactgaatcgacttcctcgtgatgtccacggccgcctcagaagccgctaatttggccatagccgcctccgccgtgtacggcagtcccttatccttattgtctgcggctctgtataccagcagtctggcggattccagctgcatccggattctggccacttcaaaccgcagcgtatcgaaacgggaaagcgtaacgccgaactgctctctctccatcatataatcgatcatgcggtcatacgctccctgcgcgatccccagagactgagccgccacgccgattcttccgccgtccagcgtccccatagcgatactgaagccctgccccggttcccccagacggttttccttcggaacaatgacgttttcgaaatgcatttccgccgtctgagatgcgcggatgcccatcttcttttccagctttccggtacggataccttcggaatcaccgtctacgataaatgtggaaatccctgcgtttcctttgctcttatccgtcatggcgaatacgatatacgtgcctgccagcccgccgtttgttatgaatttcttatgagcgttgagcacatagtgatcgccctgatccaccgcggtggctaactgcctggaagcgtcggtgcccgcatcaggttccgtcagacagaacgcgccgatctttcttcccgaagccagatccggaagaaattttttcttctgctcatctgtgccgtaccggagaatcggacctcctgccaacgatgtgttcgcggatatgatgattgccgtagacgcgcagatctttgcgatctcttccaccaccagagcataagagacataatccgtaccgccgccctcgtattctttcggaatcggcaggcccagaaaaccgagatctgccattctctttacgttctcatgagggaactgcgccttttcgtccagctccgacgccaccggctcgacatattccttcgcgaaatccgccgctttttttctgagcgcttcctgttcacttgtcaacctgaaatccataacaacctcctgtaatatatacatattcagagccaaccatttttcatatacaaaatatacaaatatattttatcaccttttattttctttggctacatattttcatcttcttcaataatgagattcgatttcatcttttccagcaccttcttctcgattctggaaacctgaacctgcgaaattcccaggcgctgtcccgtctgctgctgagtcatgtcctcaaaataccgcatgatgatgattttacgctctctctcccccaggcggccgatcacatttttcaaatccagacggtccgcttcatcccggtcgctgataaactgacggggagtggacacggtgtcgttaaacacttctccgtccagactgacgataccgcacagagtatttttcgcttccagaatttcagagacttcttccggcgtcttctccagtatctccgccagttctccgattcgcggacttctccctttgtcgtgcataaaagtctcttccgccgctttcagaagacgcacatcctgcttcagctgccggctcatcttgatgcggccgtcatcccggagataccgccggatctcccccatgatcataggtaccgcgtaagtggaaaacatcacctcgaatttaggatcaaaacggtcgatagctttcagaaggcccagataaccgatctgcatcagatcttcgtattcataggaaccgccggagaatttccgggcgctgacacttaccagtccggtattttcacggatcagacgcgcccgcgcctcctcgtcgccctgctgagcggcctcgatcaggcggtacgtctcgagacgccgtttctgctcctgatcactccgcatagccgatatccagcttttttatcatgacgacttccgttccttttcccggctccgactttaccgtcagacgatccgtaaagctctccatgacggtaaaacccataccggaacgctccccgtcggtattcgtagtataaagcggttccatcgcctgctccacatccgggattcctacgccttcatcccggatacaaatccgaacccggccttccgcggaatattcacattccatatagatcgtaccttcgccgccgcggtaaccgtggatcacggaattgctcaccgcttccgacaccgcggttttaatctccacgacttcctccactacgggatcgagaggcagcagaaaagcgcccgccacactccttgcaaagccttcattctcggatcggctttcaaaagagatcttaaacgagtttcccggtctcatttcccttccctcctttctcataaatatattccagcgcgctgcgctttgatgaagtcttcggtatcagaccgaaaagcccggacagccccagaacgcggctgacatacggactgcccggtacgatgacgatagaaccggccagatctttcactttgttgtatcgtcccatggccagcccgatgccggagctgtccataaaggaaacatcggaataatcgagaatcagatttttcgcgtgaaatgccgtcatagattcgtcgatttcccggcggatcgacgccgcattgtgatggtcgatttctccgcacagactgacgatcagaatatcttctgtaaaatcatagattgcgtttttcaaattgatctcccccttcgcagaagattatatcttcctcaaaagagacgcgccttctgtcatacacaccaaattcagcccatacccgcgtttttccgacgctgtctgccaacggccgccagaatctccggctctgcgacagaaagcttctgggccgcaatcaattgccgggattaaatattcaaaaagagattttttctaaaaatatccggcagtgtccgcaggacagggaaaatacgaaaaaacgaaaaaagagaaagcggatctgttttctcacctacggcggctgccgtaacgcacagacggaatccgcttcttctttcggacaaaatttcacgataccggcggcaaaacgaaaaaaagaaaagggacttcgccccttttcccgcctactttttgaaaaaagaaaaaccttttttctcataaggttctgtacggacgccggtcacctcatagccggctgaccgaatcgattcttccagcttgctgctgtttatcggatcttccgcgataatctctgttttccctttcttatgagacgacgtcactttcttcaccgcaaaccggttcctcaccgcatcgttgatgtgcgcttcacacattccgcaggccatgccttcgacgtccaaagttatttttaccactgtatttcacacctcctcgcgcaaaagttagaaaaaactaactcaaactttaaaacaaagcggctgccaaggtgagcagccgccggcttacgatttcagcatacaccttccgcacagaaaaatcaattctctctgcagctgaaaccgacgttattttagataaaacgataagaatctcccggtctttttgcaaagatgtgcgggaatcctgtcgtctcacctccgttgacatcatccgaacagattcaggaatattcccgcgacgacagcggaaccgatgacacccgctacgttcggacccatcgcatgcatcagcagataattattcggatccgctctctgcccttctttatgcgctacacgggctgccatcggcaccgcggatacacctgccgcaccgatgagcggattgatcttctttttgctgaacagattcatgatctttgcgaagagaattcctcccgccgtacctcctgcgaacgctacgattccgagaacgagaataaaaagagtctcctttttgaggaaaagatctgcccttgcagaagctcccaccgacagtcccagaagaatggtgacaatattgatcagcgcattctgcgccgtctccgacaatctcccggtcacaccgctctctctcagcagatttcccatcatcagcatgccgatcagcgacgccgccgacggcagaagaatgacggtcacgatagccgacacgatcgggaagagaatcttttcatttttgctcacctgacgcggaggatccatgcggatcgcccgctctttttccgtggtgagcaggcgcataatcggaggctgtatgatcgggatcagcgccatgtaggaataagcgcagactgcgatagcccccagaagttcgggagccatcttcagcgccaccaaaatggctgtagggccgtcggcgccgccgatgataccgatggccgccgcctgctgagcggagaagaatccgctggacgcggcgcccgcaaaagtgatgaaaatgccgaactgcgccgcagctcccaggagaagagactttggatttgccagaagcggagaaaagtctgtcatcgctccgattcccataaacacaagaggcggcagaattccgatctcgtccagtttgtaaaagtaataaaacagacctcctgcggcttctcctgaaggagcgtcaaagatcccggtaagcggaatatttgaaaggagcataccgaagccgatcggtacgagaagcagcggttcaaagccttttttgatcgcgagatagataaaaatcagcgccacgataatcatcgcgaaactcttcagatcgagattgaaaagtccggtactgagaaaaaaatctctgaatacgtctattatcatatctgaatcctctgttattccaccgtcagcagaacatcgcccgtattcacagcgtcgccggtcttcactgcgatcattcccaccctgccggttttatgagaattaatttcattttccatcttcatcgcttcgagaatgatgagagtctctcccgcgtatacctcatctcccggattgacgcagattttcacgacagttcccggcatcggcgaactgagagaatcctcctgagaggatactccttccgggatcctggcaggctgttctttcttcttcggagttttcggtgttctgcttctgtgaatcgcagattcccggtccgtctgaccgctttctgcagcggctttcgcccctgtgtctgcagctcgctctccggcatccgccgcgtcccgggaatccgtatctttcgcctcatccgcggattccgccgagacagaagcggcggtagcagcggcgtttctttcctccacttccacatcaaatactttaccgttcactttaatgctgtagcgtttcatctatctgttccatccttcctgttcgccgaacccatcgccggctcccgctctccacgcagcctcttcatacggcctgcgcacgatttttctgattctgatttcatccgccggacggccttcatatgcgcaaatcgctgccataatcaccgccgccgtctcttcgtcaggcgcgtcgtcccgtcctccgttgaccgccggtacacacgccgccggcggagcgggattttctatgtgagctcccctcacagctctccccaccgtttcaaaaccgtggcgttccgcttcctgacgcttatagagcttcgcacgtctcagctttctggcacgctgtacctgacgccggtattccaaattcatttcataacggctgatctgacgccggagaagcgtgataatcagcatcagcgcgatcagcacgataaatgtgacgccgagacccatcagtcctgtcaccgccgtagccttcagcttatccgcgacagacatccccatcatgagatccggatcggcaaatttctctatgagattgtattccagttccatgttttaaacctttcgataactacagcggaatatttccatgttttttcttcggccggctctcccgcttcgcagccatcatctcaaaggccgccgccactctctgacgcgtggaagccggatcgataacgtcgtccacat

SEQ ID NO: 1247 - DNA, 7163 bp, Unknown
  16S sequences of unknown bacteria
cgagacctgtatccagaatcgccacaaccgttccttttccggtgtatccctccgcgcttaccgcgtcccctccgatcgaaggaacgctctccgtggttttcgtctcattttccggaggttctacatactcgtgaaaacctgagacaaacgcattttttacaccgtccatctcttttatcgtctcaagatcgccgtaatcagcgctcagagaaaatccgtttaacacgacagaatattctttttcaatttccgcatccatatcgctgcgggtcagcgtcttttggaagctctttctgctctccgaagccgccttctgaagttccttagcccggtcagactcaaagaaatccgttacagacgcatattttgcagcatatgaaatcagcggtttatcctcgagttcgacgataattctgactcggtcatccgactgatattccgtctgtctttgaatttcttcctctacaggctgaaataaagattcactgccttctgcctccccggactgcagactcttatccgcagcgtaagacagctgcactgcggaaaacagcaggcagcaggataaagacaatgcggtgaatcgcctcaaatattttcttaacatctctttggtttattctttcctttctcagtaactcccgacgataaacggatgatatgttcatttaagttagtctaagttaaccttaggatttttttagtatatcagagatttccgatttgtaaaataatttttacggttattttcaatatttataaaaaatattcttaaaggcatttcctttcttctttttattgacaatccccttcttttatgtaagaattaaaacgttcatttaagttaagaaaaccggcagaaaaagatatctttttccgcctattttttagtcttaaagttagattaaactaactcactgtgacagacgcttctggaaattttacgacggtattccggaaataattttgtccagcgataccccagcgataaaataattatcccgaaatctcaggttactttaggactcggatcagagaatctgtattctctcggttccgataaaaattcatccgcattttctcaaggtccgctgtcttcggattctgacagcagaaaacaaaatccacaggcgagctcttctttcaatgtcaggaatctgaaaaaacaggacaaagagaaaatacgaagcagaaaacagcaaaattttaaggaggttttatgacaaaacagcagaccactaacgctggccgaaatcgtatcatgatctttctttcggcagttacagccgttatgctactcctgtgcaccggcgttccgcaggtttacgcagcttcggaatctctggcggttagcggtacggtaacggtaggtgactttacagtgacgtcccgttccggaaatgccaccatcacaggctactcaggcagcggcggagaaatcaccctgccgcagcaggtagaaatccagggagagatgctcactgtaaccggcatgagcgccaacaccagcgtatttaaaggaaataaaaaaattacaaaagtcacgatcccagacggatatgtctctatcgaaggcggagcctttcagggctgcaccgcgctgacggaagtcaacattccgggctcggtctcttccgtcggcttcagcgctttcgaagaatgcacctcgctgaacagcgtgacatttcaggaaggcaacgcctccgatttatccatcggaatgagcgcttttaaaaactgtaatctctcttccgtcacactgccttccagactgaacagtctgcatggtctcgcattcgcgggcaatgacaatctggcggatctcaatctggccggggaatcggtaaccttcgcggcagcggacggagccgtatacgatctcaccggggagagcggtgcagaattagtcgcctatgcgccaggcagaaccgcagctgaatttaccgttccggatacgatcgcagataagccggtgacgagcattggactgagcgcattccgttatcatgaaaatctgcagaaagtaacactgcctgcatcggtaacggaaatcaattcctacgcctttgaggcgatgactgctctgaaggaactggctctcaagacggaaacgcctccgacactcgctgcaaacgcgtgtacgaatctgccggaaggcagcaaaatcatcgtcgaaaaccaggaggtagccgacgcttttgcgtgcccgaatccggaagagttatggccgacatactattacacagaggatcgaaccaccgttgaaatccgtggcgggggaacagaaaatccggacaatgtaagcgccgttgtgtcgatcgaagcgcagcccgctctgtcagaaggcagcgcagtttatgaaatctatctgaatgaggcggaaaatattaccacggttcttctgaaaatcgctttcgacccgagtcaggtaaatcaaggtactctgagttgtgtttccgatcagttcgacgtttcctcgtcttcctggaatgaggaagacggccgtctggtattgaaggcctatctgggaaaaaccggggataccggctatacctcggaagaaaagacaaagatcgcagaaatccgagtgccgataaaggaaaatatatctggaaaaatcaccgcggagctgaccaaagcagcctgcgcaggcattactacagaagatgaaagcgctatggaaggagcgactgaaatcctgccgccttcttccgccttcatcgtagtggaaaattgcgacgtcaacggcgacggtgaaattgatatcgtggacatcgccgaagcgcagcgacactaccgtctcacttccgaaaatgaaaactgggaaacagcgaaaaaatgcgacgtaaacagcgacggaaaaatcgatatcgaagactttatcgctattttcctcgccatcagcgatttctaacagaacttacaagaggtgtaatttatgaacacaacatataaacaaagcagaagcagaagcagaaatttccttttcgcttttgcactgatgctcgccgtctcggttctctttctttgcagcccagaggcccatgccgcaggcaacaacggaggactgatcggcgcccacatcgaagacggtgtgctgaaaggttattacggagacggaggagatattgtcattccaaataccgtaaccgccatcgacggagaagcatttaagggaaacgataatgtgaccagtattacgatccccggaagcgttcagcttatcggatattatgcgttcgacggctgcacggaattagagagagtcatattttccgatccggtcgacggtgcggagatgacgatccgtctggacgcgttctccaactgcccaaaactctctgatatcgaaattccagctaccgctacctacgtaaccggaaatattttcaagaactgcaccagtctcaaaaaaatccgggtacacgaagataacccgtattattttactgatgaaaacggcgttctcttcggaccttgggtagattatggcgaaccgcagtacgaagacagtaattacgctcttaccgcatatccttgcggccgtacgggcggatacactgttcctgataccgtgaacggaaaaacgatcaatcaggtttgggccagtgcttttcggacggcaaaaggactgacctccatcgattttgccgatggcatcacgattctcggaggaaacgcctttgaagaaacgggattgacagaagttacgatcccggaaaccgtaaaatcaatcggcgcatctctctttgaaaattgtacggatctggaggaagccactctgccggaaagtatcacttctgtcccgatgtcctgcttccaaggctgcagcagtctcagcagattaaatctgccggacagcatcacaacttttgaaatgtatgccttcaaggactgcacatccctcacgtcactgatcacaccgaaaaaactgaccggtatcacgctggcgtcctttgaaggatgcaaaaatctgcagagagtcgtcatctcgccagctgtcatcaatttcccgagcgacgaatatgtggggtactacgatccttttgaagacgctccaagatcgctggtcgtctatgttcagaaaggctctgcggcagaaaagtgggcgtacaataacatttccgactggggatacagctatgtcgtcctcgacgatgtatacgacctgagcagtgtcggaaaagttccattttatctgatggatatgggaaataaaatcagattagacggaaatttcgaaatcggtacgacgctgaaagttacctctgtgtcctcgggagaagaatatgacacgtttaaggcagctgcagacggcagcgcgctgaaggtatatcaggtatctctcctgccttcgggtgccgacgtacagggggaaatgtctctcagcgtcggaattccttccggatttacaaaaaaagcccttctctacagttacgaagacggcagcgctgcacagctcaacacatcggtaaacgctacaaccgccactgcgaagatcagcggcctcggctgcttcgccctgattgacagctctgtggaaggaggagacgatgacggctccgtgacctccgtagagctgaaccgcagttccgctgaaatggagatcggcgatcagatacagctctcttcctctgtaaaaccgactaatgcgacagataaatcgattacctggagcagttccaattccaaggtagcgacggtaaacaacaagggtgtggtcaccgctgtctccgcaggctctgctgaaatcaaagcgacagcacacaacggagtctacgcgacctgcagcatcacggtaaacggcgaggaaacacccgagcctgatgacgatatgatccagacagacgcgtcgctgcgcgcaaacggcagctcttctgacgaaaaaaaatccgccttttctctatctttgacaaatgcttcgagaatctctaccgtacaggtgacattccagacgtctaccgacaacgtcaccttcaccggacagaacggttttacgacaattggaggtattcagggtgaatggagggatcagatttataccggaacagcggtactcgcctatctgaacggaagtaaagaactcttctccaatacgggaagtcaggtcatcgcccagattgaagccggagcagaaaaagctaccctgaaaatcacagagataaaggttgcaggatgggataaagacgaaaccgtgcgttacggtaccgtcaacggcatcgatcctgatgaggctaccttcacaggtactctgagctacgatatcaacagcgacggcaaagtcgatcttctcgatctggcggaagctcagaaatattaccgtgccgcatccggcagtgcagaatggcagaatgcctcccgctgcgactttgtagcggacggcgtgatctccatcgacgacttcatcgaaatctggatgaactttacgaaataacccgcgtttatcgaagataaacagatatatagacacaaaaacaacaggggcatccgccgcagacaaacaaccgtctcacaaacggccggatgtcccgttaagggagaaactatgcgcaagaaaataaaaaagacgatgctgacactcttgtcctcactgatattgtcgggcatcttctgtacctccgcctttgcggcggtgattactccgtcccgtacggaaattaccgtacctaaggggaccgatactttcagctttgacgtgattctgcaggcggacaaagattttgccggcgcggaattcggactgcttccttcttcctccgatgtgacactggaaaaaatttctttttccgattctctaaccggcgaatctacagtgaacacggtgaaagacggatgcctgtacttcggtttcttcgcgggcacaaataaattcaaagccggcgaatataccgtcgcctcggtaacctatcgatataccggcacagctgcgagaaccgtccgtctggccgaatcaaaaatcgtcaccatcgatgaatcgacaaataaaacttccggagataccacctccgatcctttcacagtaaccgtcaggcgctccgataattccggaggcggcggaagcaccggcacagacaagtatgccgtctccatagaaaatactatcggtggaacgattcaggcagaccccgtctctgcttcttccggagaaacaatccggcttaccctcataccggaaacgggatacgagcctgataaaatcacagtaaccgactctgccggaaactccgtcgacctgacaggcagcggcagcagttacagctttaccatgccagccgcttctgtcacggtaaaagcaaccttccagaaagtcactgatcctgacacaaaagagttgccttttaccgatgtaacctccggagtctggtatgaagacgccgtaaaatatgtctatgagaacggtctgatgagcggtactacagacaccctgtttcggccggattccacaaccacccgcggcatgatcgtcaccgttctccaccgactggaaggcaaaccttctcccgcagcttcttccttcacagatgtaaaatcggaccagtattacgcggaagcagtcagctgggcagcctccaacaatattgtaaatggctacgataacagccgcttcggacctgacgatccgatcacacgggaacaaatggcatccatattgtatcgctatactgcctataaaggttacgataccaccgctcctgacaatctgtccggttttaccgacgccgcgcagatcagctcctacgcaaaaactgcaatgcagtgggcaaatgaaaagggtcttgttaccggtgtcggcagctccacactgcagccgaaaggcaacgctacccgcgctcaaatcgctacgattttgatgcgtttctgcgaaaatatcgctaaataaaaaactcacagataaaaacagctcatgaaaatgagctgttttcttttatacttttctcgcctcgtagcttacgattttctatatgaaaaaatcctccgacagcgaaaatcagcggttctattcgataaaaaaaacggctttcagaccccttccttttcatgatctattctccttcacaatctattctctctattccccgcagctgagaatctcctttcgctgtcgcatttttcccctgcggctgaagccgcgtaaattgtttgaaccgaaagccgcgtaaaat

SEQ ID NO: 1248 - DNA, 32759 bp, Unknown
  16S sequences of unknown bacteria
tgttccgatatttacatgcggcttatttctttcaaacttttgctttgccattttagaacctccgtaaatctttaaataatttatggatcaggccacgcctgacacatatttctgaagtggagctgacgagcaggcttgaactgccgaacctcttccttaccaaggaagtgctctaccaactgagctacgtcagcacaatacttgtacgaatttatactactatatttaccattcaatgtcaataatattccgccgcgatttttcgctttatgcgctgaagcgcgttatctatcgacttcggactcttgcctgttttctcggctatatcggtataattttgaccggaaatgtaaagctgccatacctggagttcaaatttgctcaaaatctgtgacattgccgaagttatttcatcaatcgtatcctgaataagtatcatttcttccggattgctcacaggtgctgcgagaatattctctatcacatctttttccccgccgctttcctcaagcggtctgttcagtgatatcgaattattaagcggaccgtgtttcatgcgctttgccgtctttatcgccgttattatctgtctgttgatacatacggccgcaaacgtcctaaacagagtatcacgatcactgcaataatctcgcacagccttaaaaagccctatcattccttcctgaataacatcttcagcatccgctcccgcaataaaatacatacgcgccctgcttttcacaagctccttataacgatttatcagaacctcttccgcagtttcatcacccgcctgcgcgagctccgccaacttttcatcattaaataaattataattttcagtcacagcttctctccatccgcacttttgatcgattccattcgctgctcaaacagttcaaaacgaaaacaatctccctatccccatatacgtttttccaccggaatattcagcctttcctttaataaataaaagctgtattacagtccgcctacctcttaaaatcctaaaagtctattcttttatatctcgctggcgtcttacctcatacataagtaccgccgccgcattcgatgcattaagtgaggtaatctttcctctcattggcatcgatacggtaaaatcgcacttctcgcgtacgagtctgctgatgccaaagccttccgaaccgataactacagcaacagctcctgtcagatcggcttcgtaatacatttgttctcccatatcacaagccactatccaaagaccctcgcgtttgagttcgtctatcgtgcgcgcaatattgacaacgcgcgcaacaggaacatattcaactgctcccgcagatgccttggcaactgtctctgtcagcccaacgcttcttcgtttcggcactattactccatgcgcgccggcgccctccgccgtacgcattatcgcgcccagattatgcggatcctcaaggccatcgagtattattatgaaaggatcttctcccttttcgcgagccgctttgagtatgtctgccacctcacagtattcatagaccgacacatatgctatgacgccttgatgtgcatcgcctcccgatgctctgtcaagtgcggctttgtcagtaaatattattggaatgcgcttttcttttgccatccctatgatttttttaatcgagccctcaagtcccggtcctaccataagcttatctatatcacgtcccgcacgcagcgcttctgtcacaggattgcgtcctattatcaaatttgtcttacctgaattcatttattctcctctttgtatacacccgcaaatctaatattttcgcgtcttttccgcagtatttttcagccattaacaattcttttgattgcccttttcccttataaatcagcacctcctgctacctgctgtattttacaaatttatactttataccgttatcttcctgcacttcgctctcgtacgttattttcagcatacctgatatagcaagctcatcgagattttcaaaatacttgtccgccgaaaatttctcatctatcttggtgataaggatttcattgcaatatggaaaaaattgcttgtatacgctttctccgccgcataccataacatcctcttcaagatctataccttccgcaaattccatagaaagcagcatcgccatcagttcatcaaacgatgttgcaagtaaaattctcgcgccttccgccgccttaggctcgtaattctcatcgccggaaagcactatcgtcgtcctgcccggaagtgctttccctcccggaagtgattccagcgttttcctgcccattatcagcacctttcccagcgtgttttccctgaaatatttaagatctccaggcaaatgcgccaaaagcttaccatcctttcctattccccaatttttatctactgccgcaatagctttcatttttattctcctttgtatatgccctcattgttaagtcttgcttaattcttccgcctttattttttctgtttcttctgcttcggctccgataagtcgtcgtacatcgctgcaagcagaccctcaagatactctctgctatctacatcgtcaacaagcagcatttccctgccgccttcataaggcagctcatacaaaactgtctttagatacgccgcagcagatgccacgggcttgacaagcagcctgtcatcgtatattccgcctacaacctttccgcggtaataaatgatatattcacccatcattgctcttatcgacaactcggaaagccctgaaagctggcctaatataaattccatatattctttactcgatgccatatcgctgctccttttgacaaacgccctcattcatttttgtataaggtataataatcacattctaaattatccatcatccgcgtatacaagcgcttagcgccatcaaaagctttattataaacaactggcgcaggcttttattcaaatcattccaaaagtctcatcagtcaatttaatctgctgcgattttttgctcttttccatagacttctccttatgtttatacctccgtcagcttatttaacgcctcttcctttgttgtcaaaaagaaaaaatccttgccgcagttggcctcgtaaataaagtccttaagcggcttgcttgtataatgtgaataatcgccgaaaaccgccgccttgatatgataattcaaaaatttttgcaggatttcacccgccattccactgctcaatacaaaaaattcctcggcaaccacatttttatctattgcaatacgataagcaccgcactcatatttagcagtcatcgccaaatcgagcgccgactgcgcatccttaataatcttttcctttccagaaacgagagctatatcaattccattctgttttatatgctttatattcattctgtctaaatttccttaatctcaatttttgatattctgcgatttctccaagcctccgctttcaggctcgctgctcctttttcatctgaaaatcatatgcaaagtttcccgctcatcaacctgctgctatttataataaaaatctatattcccataaaagccttttatctgcggactatgacaatgcatagtttattcgcttactgaattcttctatcatcttcaaatttaatttcaaaactgtcttttctaaaatccttgtactaaacagcacaaaatttataccgcaatcggaataccggttatctgcgggtttttctgataatccgtaatctcgatatcatctgttgtaaagtcatagaaattctttatatccggattgagcctgaatttcggcgccggatactgcggacgctctatgagctcttttactatatctatgtgcctgtcatatatgtgggcatctgcgataacatgtacgagctcacccggtacaagccccgatacctgtgcgaacatatgcacaagcacggaatactgcaccacattccagttattagcggcgaggatatcctgtgaacgctgattgagtatagcattcagcttattccccgtaacattgaaggtcatactgtatgcgcacggctcgagattcatctcactcaagtctgcaaaattgtatatatttgtcattattctgcgagaatatggggcatttttcaaattccaaagcacattatcaacctgatccatttcaccctgcacaaatttatatttgacacccatttgatagccgtaagccttaccgattgagccgtcctcatcagcccactcgtcccatatatgcggcttcaagtcattgatattgttggattttctttgccatatccaaaggacttcatcaacagccgactttattgcggtcggtcgcaatgtcagcgccggaaattcctcggcaaggtcatatctgttcacaatgccgaagcgctttatcgtatgtgccggagttccgtcctcccagcgcggccgcacctgctggccctcagaagaatagccgttttctataatatctctgcacatattcacaaataaaacatccgctttgctcatatcgtctttatcctttcaattttatactaaaattacttccgcttttcatatgcggccgcagcacagcagctcgaaaatatataaatatttaccttttatatttacagctatgcatacgttcaaacaacaaattctgtattttacatatgataaaaccgctgattttctgccatatacaagaaaagcggcattttacttttgccacaattcgttttctatgtaagatatagcagtttttgcaaacaaatcaagtctttcggtctgccctgtcaggtaaagaaaacctacaagcgcctcaaacgctgtcgcccatttatatgtgatgggatcgacatttttgggttttgtagcggacttcctgttgcgcgcgcgccgcacaagcgctgcctcttcagcagtcagcagaaaacgcgcatctgccgaagcacactcgcgcgcactatactccgcgctctcgcccgcatccaaagttttgctgagcaagtccctgcagccgcccaaatcaccgccgctgtccaaagccgcagcatctttatactccgcagaaacacacgcgcgcttatcagtctgcgcggcttcgcgctctctcataaggcgctttatcacctgtgcctgtccgtccgcacgcacaaacgctacagcgcgcctgtgaagagcatcagtatgcgccgcatctttttccattacatgcgacctgatatacacttcgtataccgcatcgccaatatacgcaagcgaagtggtattaagtttttttacatccattacgccttcctatttgcctattttgatttatcatttatcacagcaccgatgttcataaaaagatcatttgccgctgtatttttccgccgatggcctctatgcacgcaatttaacatcctcagtcaaatgtaatcggtctcacgtcatttgttaaggcactgaacacgtaagatttttcgctgtaatgcttaactatgctgcggatggcctccgccgtttcggtgcttgactccgtatcgtgcatcaaaaggaatatgcgctgcttttcctgcgccgtcataatcgccatatccgctatgctctccgcatcggctcctgcctcattgtcaccgcacgccgcattccaatcgtaatacacaaatccgcgtcttaacatctctgccgtaagctgttttcttatatgcatattatatttatttactgttccatttctgaatctgaaaatctggggcttttcaccagtaatgctgtaaacatactcaaattccttgttaaagtctgcaagataagtctcgactgactgataaagcctgtttgccggcagcgtatgaccgtatattcctatggtgtgtccctcgtcgtaaatacgctttattatctcatcgctgccattcgtattttttcccccggaaacaaaaaatgtcgcctttattcccagctctgaaagcgtgtcgagtatcacttccgtactatctgacggtccaccatcaaatgtaaaataaaaatatctgtcttcgttatatatatgagcaaattctacagcttcttcaacatacatatcaggaaacagcgactgataagcaagctcctcgtctgccgcactatcacttacggaaatgttttcgccatgcgcagtatcagcaggcgcattttccagctgctcttccagctcagcaagttcgaggctcaaatctctgcacctgataaatgatatagccaatccggcggcaagtcctacaattactgctgcgatgataattataacttttttaaaagatcttacgttgccaaactcagatttgcccattcatatcttattccttaataatctgtaccccctgaggcgtatctttaaggataatccccttttctttaagaatatctcttatctcatctgcgcgcgcaaaattcttttccgctctcgccttctgtctctcgtctacaagcgcctgaacttcatcgctaatagcgtcagtctcttccttactttgaagaagaccgagcacatccgtaagctcagtcaaagctgtaagtgcttcagcagcaaagcttctcgtcgctccgccgcgagtctccgtatttatcgccgatatcatctcgaatatcgctgtaatggcatctgccgtgttgaggtcgtcgtccattttctcgatatactctgtcctgtattcaccaagctgcttaagagtttcaagctcgcttgctgtcatatcacctaaattgcccgcagtcttgagatattcgagattgtcttttgcattctgcattctcgcaagtccgtttttcgcctgctccataagcgcatccgaaaagtttatcggatttctgtaatgccccgagagaaggaaaaacctcataacttcaccgctgtaatcctttaagatatcgcgcactgtaaagaaattgcccttagacttgctcatcttctcattatctatcgtgatgtagccgttgtgcatccagtattttgcaaacggcaccccattgcagcactccgactgtgctatttcattttcgtggtgcggaaactgcaaatcctgtccgcctgcgtgaatatctatcgtatcgccgaggtgctttttggacattgccgaacactctatgtgccagcccggtcttcccataccccaaggcgactgccacgctatttcatcctccgtctttctcgctttccaaagtgcaaaatcgagcgggtcttctttaatgtcgcctacttcgattctcgctccggcttctaagtcatctatgttctgctttgaaagtttgccgtactcaggaaattttctcgtcgaaaaatatacgtctccgttaacttcatacgcaaagcccttgtccacaagcgtctttacaaaatctataatctcaggaatatgctcggaaactctcgggtgtacggtagccggcttaacattaagcgccgccgcatccttaaaatattcctggatatatttttctgaaacctcgggcgccgttatgccctcttccttggccctgtttataatcttgtcgtccacatctgtgaagttttgcacaaatttcacattataccctctgtattcgagatatcttctaagcgtatcaaatacgacaaaaggcctggcatttcctatatgaaagaagttatacacggtaggtccgcatacataaatctttacttcgtttttatctatcggtacaaattcttcttttttccgcgttaatgtattgtacactttcataatttttacctctgaaaataaaaatattaggcaagtagtagttatacctgcctaatattatatactggattcattattttttcaaacatattataagtagtttaccgggtttttttgtacaccgttaatctcaacttcaaagtgaagtacgtttcctgtagcatttcccgtggagcctaccgttccaataacttcacccttctgcacattctgtccgacagatacgctgatactgtcacaatgcgcatattttgtcaccacgccgttgccgtgatcaacttttattatattgccatagctgccgctccagcctgcaaatactacagttcccgagtcggatgccattacggctgttcctttcggcgctcttaggtctatgcccttgtgtgttcttgcaccgccgctcctgcttgctccatagccagatgaaatttcaactgatgccacaggatactgaagataaccggagccgctctgtactgctatctgcttcgtacctgtaagcgctatctgcgtaaccggctctgccgttacgacctcctgaataacattgctcgctaccgtgatgccgtttgtctttgttctctcataagttacctgcttactgccgttcacacctgtgctctgcacctgcacctgtcccttgtacagtgcgtcggactcagtgtagcttactccgtacggtatgctctccgtctccgttaccacttctgttaccgtgatgtgtacaaacggattctgctgataaagatttatggtctgccctacagaaagctttgtcgttgcacccggattcatctgttcgagttcatataccgaaatattattcgcaatggctatgtcccaaagcgtatcgccgcctttgaccgtgtaggtaagaggcaccgccgttccgttaaggatataacgtatagcttcttccacttcacagatgtatgtctcggcaacattttgatccgcctcggcttcggccgccgtcacgatatcttcctctctgtatgaaatctcttcttcatagagaacttcttttatctctgcacccggcgtagtaaaattagcaattataccgtcgagcacggctttggcgtcatcttcggtcgctacataaagtatgtcctcgccgtttattgccaatgcgtacgccgtttcttcgtcaaatgatgcgccgccttttttcaatgactcagcgcttttgtctgtatccgcgtcttcatttcccgctgaaagcaacccgctgagcataatacttccgtctacgttttctgtttctccgaaaacatctatcatcgcaatctctgcaatatcgcctatcttaagtgatttagcctctgctttgacagcatccggcgcatctgacgctcctgcgacagatcctaccgtaagcactgcggtcagagcagctgcgcaaactctgatttttctgttcatagttccgttcctcacattttatcctgtagtattactcgattgtatctataatgttacacaaatattacaattgtgtcaacccaagaaggcaatttttcacataacattcatattccttattttggaataaactgctgtatgtaaggcggcagctatgatttgacagattagtctccgctaaaattttttagcaatttttgcttgactttaccttattttcacataaaatttttctgattactcttcgataaccgtcacttttttcattctctgcggctcgcgcggcttatccatcatatctctgcttacgcttacaatttcatccgccgtttccattccttccgtaatttttccgaatgccgcatactgtccgtcaaggtgcggagcgtcagctaccataataaagaactggctgcctgctgagtcagggtgcatcgcgcgcgccatcgaaagcactcctctttcgtgcttgagatcatttttaaaaccgtttgccgagaactctccatagatattgtgcccagggcctcccgtacccgtgccctgcggacatcctccctgtatcataaatcccggaataactctgtggaagatgagaccgtcgtaaaatcccttgtccgcaagctcgcggaaattagcgaccgtcttcggtgcaatctcaggataaagttcgcctttcatcaccttgccgttttccatttcaattactattttaagcatattattcctccatagtattcaaattatttctcattattctatcataatgcactgttcagcgcaagccgggcagtatatctttagctgatatatgcgcctataatacaatgagccgctgtgaagtgcacagcggctcaattttaacttatatgttccaaatgagatttcgtatcttatttgctgtaatcgaagaatcctactccagtctttcttccgagctttcctgctcttaccatctttctgaggagcggatgaggtctgtacttcgtatctccgaattctctgtaaagagtttccataatagcaagacaaacatcaagtcctacgaggtcaccgagtgcgagaggtcccattggatggttagcaccaagctgcatagcctggtcgataccctctgctgttgcaacaccgtcagcaagaataccaactgcttcgttgatcatagggatgagaattctgtttactacgaatcccggagcttcctcaacctttacaggagtcttaccgagaacagttgcaagctctgtaacagtcttttcagtctcttccgatgtagcaagaccgcagataatctcaacaagtttcattgcaggtacaggattgaagaagtgcataccgataaccttgtcaggtctttccgttgcggaagcaatctcagtaattgacaatgatgaagtatttgtagcgatgatagcttccggcttgcagagcttatcgagctcagcaaaaagcgccttcttggattccatctcttctgttgcagcttctatgataagatcagcatcagcaacgatactgatatctgttgagccgtggattcttcccataatttcttccttagcctcagcagtgatcttttccttagcaacgagcttatctaaattcttgtttacagttgcgatacccttttcaacagaagtctctcttcttgctctaagtactacttcgtaaccgttctgtgcgagaacctggatgattccggcacccattgtacctgttccaagtacgccgattttcttcattataatatcctcccttaaaaaaatattacatagctttgttaaaaaattaactttttatattacaattatatcacatctgcccggattgtaaagcacaattttcttaaaaggcatactttttatcaatttttggaagaatcgtctgcactctctatatcgccgtctgcacttgtttccaaatacttctcaaaattatatattctgtctatcatgtcctctgtttcatccatatctacataccagtacgacgcgccgtttgccgtgccggagctgccaggagccatccaggtatatacgttctcggaatcaagacttacagcctttgccgcaatttttaaaatcatatcgagagttatatcagactctatttcatcaaacgccactttggcgacatccacaataccatgatcgagcgcctgtttaaaagccgctttcacaaattcctgatgtgcgcctattctgccaatatctccgtttgcataacccttcctgtatctcaaatactttacagcatcgtctcccgaaagcaccgtcggtccctcttcaaaatatatatgaagcggcggcgtatcgtacggatcgtcgtatttcattgtaaacggtatatctataggcactccgcccatttcgtcaactatcgcccgtacagcatcgtaatccactaccacataataattgataggaatgccaagaagcacatcggaaactgcctctgccgtcttaaccacaccctccgagtgatatatagaatttattttcatccaggccgcgcccgtatactgcgagcgataataataagtatctctcggcacagaaataatatctacgcgctgattttcaagatcgtagcttcctaccataataacgtccgtgagcccgtcgtttacacccagaagcagaacattcactctttcgctgttcttaaaattctcataaaacggattatccgggtctataatgtaatccatctcgtccattatgctttccgttcccgcaaaaagtctcaccccgccaatttttccgagcgccacatttacaggaataagcacgatagtaaaaatcgccaaaaatataacaaactgctttaaaaaatacttcttatcaaacttccctaaaaatctcttcatttccccttgactttttatttcctttatttacaataatttcttcatttcctttttgtaattctcaacacccggctgattaaacgcattgattcctgaaagtccgcagcatactgcacaatttatttcaaagaaatacataagctgccccatataataaggcgtaagctccggaatatctatctttattattggcacgccgcttttttcatgggcgcgcattaccgcattcattgccgcattattaagacagttcatgctcatacccgcaagcggctctcctgcggagcttggaactttaaaatcatgagtcggcgaaacaacattaagcacagtctcaaagaaacactgtctgccttcctgcagaaactgacccatagaatgaagatccgcgctcatagacagcgacacaggaaaaatacctttaccgtccttcccctccgattctccaaacagctgtttgagccattccgcaaaatatgaaagctgcggctcataatattcaaatacttccgctgtctttttctggccgagcaaatagcgcacagcagcatagtcaaaaaatgacggatcctcttccgcaatttccgatgcatctttggctcctacaataaactcctttatatttggaccggacgcagctatcggaagcagtcccgccgctgtaagcaccgaatatctgccgcccacatcttcgccaatatcaaatactttgtatccctctgcttctgcttccctgcgcagagagccgctcttgcccgtaatgacataaatacgttctttaacttcttcttcgctgtactttgtctccagcgccgctttgagcatagcaaaagcagcctttgtttccatcgtttctcccgattttgaaacaacgcacaagcaaacatcatttcccaaaaattctctcagtatgcgcagatgataagctgcgctgaaattgtttccggcaaatataatatttactccgtcgtttatccacgaagcaagactgccgtcgcgctcctgctccggaagtccgatagagcccctcgcaccaatagcctccgtcactgcgcgcgtgccgagatacgaaccgccgatgcctataactatcaaaatactgcattttttctttatctcagctgccgcatcaattatatgcgccagctcgctttcgctgtatgcaaatggtaaattgacccaacctgtcatatcaattttccctgagcgaagctttctatattcatcatctatacgagatttaagtttatcaatttcttctttttttataccggctcttgttatatctgcttttatgtccatacagcttactcctttttcttgattatataaaagtatacattcaagagtaagtttcagtcaagcacaaatttcagcgtgcaatttataaaaaaacaacaaaaatcccccgtttccaagctccggaaccgagggcttttgctttttttcaattctaagccgcaaggactttccaaaaatacataaagacttttgattaacgctttgagaactgtgaagctcgtcttgccttcttgagtccgtacttctttctttccttcattctggagtctcttgtcaggaatcctgccgctttgagagacgctctgtatgcttctctgtcagccacgcaaagtgctcttgaaataccgtgtctgagcgcgcctgcctgacctgtaaatccaccgccgtttactgtcgctactacatcgaacttgccttcgcagcctgctaccataaacggtctttttacttctctcttaacgatttccttcgcgccgaagtattcgtcaagcggcttcttgtttactgtaatatttccgtttcccgggatgagccttactctggctactgatgattttcttctgcctgttgcggcatactgtaattttgccatttcttatttcctccctttcttaaaacttccatacttcaggcttctgtgcagcgtgactgtgctcaggtcctgcgtaaacttttaacttcttatacatctgtcttccaagcgctccatcaggcatcatacctttcacggcgtgtctgataatttcctccggctttttagcctggagcttttcgaaagagatctctctgagaccgcccggatatcccgtatgtctcttgtagatcttttcctttctcttcttgcctgtaacctctatcttctcggcattgataacgattacatagtcgccgcagtcgacatgcggtgtgtaagtcggctttttctttccgcgaagaatcgaagcgacctctgacgcgagtcttccaagcgtctgaccctctgcgtctatcacataccacttgcgctctacttcatgcggctttgcaataaatgatttcatttttcttcctttctgcctacttggtttgctgagcaagctttttcggctgtacctacttggtttccgcgaaaaacaaactttataccgctttccgccgaaactttttcggcccactaatttctattagttggaagcccatggacggaactccatccggtgcttcacacacataaactattttatctttttaacagcacaatgtcaacaattaagttgaatatacggctattttttcttatttatgcttatagggctctttctttattcaccacaattacattttcagctttctgtaattgtgctttaagataagttcagtaagcccctccgcatttttcttctctatgcgttcaacaatttcctcgtggtctttattggcctcgcggaaataattgaacatactctctgaatcctccgaaaaaaccgttgtccttatcacattacgtctgagatcgtccataaggcctatgagcatctgattgccgcagatatcgagatacgcatggtgaaaacggtcttgcagctcttgataatcgtcaaaattttctctttctatcgcatcatcaatcttgcttacaataatgcgcagcgtatcgatatccttatcctttgcagttttcataatcttttccagtatatatatatcgagagccgaaataatctcaaatacctcgtacgtctgctgctcggtcatctgctttacaaaaaagcccttgcgcggcacattgtcaagaataccgtcggctgcaagctgtatgagcgcctcatttatcggcggtctgctcactccgagctgctcctgaagctccgcaatatttattttgtcaccgtaatcaagttcgtttgtccttatcatatgtactacatgttcgtacacttgctcacgcacagattttatttttaccatctgctttttctccgtttctaaacagcaaagataatttttaaatgagctcaactacatggaatgtctttttgcctttttgtataataagcctgccatcctcaaacatatcactcttaaccataagcttcttatccgtaaccttctttccgcccacggtaagtccgccctgctctatagttctgaagccctctccattgctcggcacaagtccgagctcttttatcagatttacaacgccgaggccttcgccttcaaatctcgctctttccatttgcgtagtaggcatattagccgcatttccgccgccgccaaaggccgcctttgccccctcaagggcctttttcgcttcctcttcgccatgcacgagctttgtcacctcaaaggcgagaatttccttagccttatttatctccgcgccctcaagtgacgaaagacgattcacttcgtccatcggcaggaaagtcagcatgcgcaggcacttgttcacatccgcatcctctacatttctccagtactggaaaaattcatacggcgatgtcttctcagcccggagccagagagcgcctttctgcgtcttgcccatcttcttgccgtccgatgtcgtgagcagcgcaaacgtcataccgtagacatccttgacgcagaatctctttgtcagcttagtgccgccgagaatattcgaccactgatcattgccgccaaactgcattttcacatcaaagtcgcgcgccataaccataaagtcgtatgactgcatcagcatataattgaattcgaggaacgaaaggcctttttccattctttgcttataacagtccgctctgagcatttcattaacgctgaaatgcggtcctatttcccgcaagaactcaacatagtttatcggccgcagccactccgcattgttcacgcttatagcctttcccggctccggcactttgtttgccctgccaggcgcatagacgccgccgtttccttcgtatttccattcgtcgtcaaattcaataaaacggtcgaaaagctttttaaactgattgcaattttcgtctatcatctctaccgtcatcatctttcgcatatctgttctgccggacgggtcgcccaccattcccgtaccgccgccgagcagcaccacaggtgtatgtccgtacttctgcatatacatcataatgattacctgcatgaagtgacctacatgaagacagtctgctgtcgggtcaaatcctatgtagaattttatcttttcctttccgagaagctcgcgtatcgcttcatcgtcagtcgtctgctctataaagcctctttctttcagcacatcatatacattggtgtgctcgctcacattatcgggtataaaatttttcataccttttcctccttaactcctttcacaaatgcgtccaagccgtgcattttccgtgttttgcgcatcttctcgcctatttagtaccgaatattctgtctcccgcatctccgagtcccggcactatgtatgcatgctcatttaatctctcatctttagccgcgataaatatgtctacatccggatgcgcctctcttaacgcttcaatgccctccggcgccgctatgaggcacataaaaatgatacttttgccgcctcttgctttgacaaaatcaatagccgccgccgcactgccgcctgttgccagcatcgggtcaacgacgaatatctgcctcttttctatgtcattcggaagcttgcagtaatattcaacaggcttgtgggtttcgggatccctgaaaagtccgatgtgtccgacttttgcgttcggcacaagcgccagcattccatccaccattccgaggccggcacggagaataggcactatcgcaatatcctctccgtcaagcattttaacctttgcactgcatataggagtctctatttctacttccctgagcggcagatcccttgtcgcctcatatgccatgagcattgcaatttcctttacaagttctctgaaatccttcgtcgatgtctctttctttctgataagagccgttttgtgctgaattaacggatgatcaaatacataaacttttcccacttttctgctcctccgatttttatccttatttttaactatattttaaatatgcagtatcacatattatcgagcatatcgacgcgtcttttatgcctgccgccttcaaattccgtcgccagaaacgcctttacaatctcaagcgcaagctcattttcagtcgttctgccaccgagtgcaagcatgttggcatcgttgtggcggcgcgtcatttccgccatatgtaccgatgtgcagagcgcgcatcttacgcctttcaccttgtttgccgccatcgaaatacctatgccggtaccgcatacaacgataccgcgctccgcctgcccggaaacaacagcctctgcgcactttttgccatactccggataatcaaccgattctgctgaatttgttccgagattcaatacatcgtatcccgcttctgtaagatacttggctattttctctttaagcacaaacccgccgtggtcgctcgcaaccgcaattttcataaattcctcctgcaaatacatcaaacttttacaatattatatcccgcgcttttgagcatcctgttcataactgcaaagccaacgccgtcattatccgaaagtgcgcctgcaataatgaggtctacatcttccttatccatttcacgcaaatccgcaaatagatcatgcgcagcttctataaacgctttctcttcaaaaaggatcactcccactttattgccgatgctctcgttaagcgcctttaatctacctatctcttttttcacattgtcacgctgaccttcaataaccaccatctccgcttttggcgcataatgcttgtacttcatacccggcgatttcggtttaaaatcatcgccgaagccaccgtcaaggctgtctttattttcacctgctgctacagccacgctgccctcatttttaatgtcttcatcgcccgtgcttaaagagccgagagtccctgcggtctttgggcgcgcaaatagcgatttatcgtattcaaccttttttccgagtgccgctcctatatcctctgccgtaagaattcccggtctcagaataataggaatcttcccggtcatatcgacaactgtcgattctatgcctacgcggcagtcctcaccctcaatcacagcatctatttttccggcaaggtcatctataacgtgctgagcctttgtcgggctcggttttccggaaatattcgcactcggcgctgctatcgggcagcctgcctcgtttataagcgcaagcgccgtttcactgtccggcattcttatagccaccgtatcgagcccgcccgtcgtaacactcggcactatatccttttttttaacaaccattgtgagcggtcccggccaaaatgtatctatgagcgtaactatgtcttccgacaatctcggcgtcagctgtcctatatcggaagctctcgctatatgcactatcatcggattatcgctcggtctgcctttggctgcgtatattttgccagttgcctctgcgtcgagcgcatttgcaccaaggccgtatacagtttctgttggaaaagcaacgagcccgccttttctgataatatccgccgcttcccttatattttcggctgtaggttttaataccttcgtttccatatccctatctcttaatctttcttctaaatatcggcaaaattaaaagtttttcatcttctccgcctggtcgtttgtaatgagaccgtcaattatctcatcaatatccccatcgaggaaatagtcgagcttgtatattgtcagtcctatcctgtgatccgaaacacggccctgcgggaaattatatgttcttattctctcagaacggtcacccgatcctacctgactctttctctgttcggatatttccttattttgttcactcagcttgagatcatagagtcttgctcttaataccttgaatgctttttccttattcttaatctgtgacttttcatcctgacaggttactacaagtcccgtcggaatatgtgttaatcttacggctgaatccgtggtatttacacactgtcctccgttacccgatgctctgtaaacgtctactctgacatcgttcggatttatctcaactgcgacatcgtcaacctcgggaagcacagccaccgtcgccgccgatgtatggatgcggcccgatgactccgtttccggaacgcgctgtactctgtgcgcaccgctttcatatttcagacgtgagtaagcgccctttccttttatgagcattaccgcttccttgatgccgccaagcccggtatcattcatttccataacttccgttttccagcccctgcgctcggcatagcgcatatacattctgagaaggtcagctccgaagagagcagcttcctctcctcctgttcccgctcttatctcgagaattacatttttatcatcgttagggtctttcggaagcagaagtattttaagctcgttttcatactgctcaagcttctcgtcaagttcagcaatttccatcttagccatctcacgcagctcctcatcactgctgtcaagcatctccttggctcctgcgagatccgatttggcttttttgtattctctgtatttatttacaataggctccatttcgctcatttctttcatatgcttttgccacaccgcctgattgtttataatttcggggtccgacactttatgcgaaagttcctcatatttttccagtataaagtccaatttatcaaacataaaataaaaatctccttatatttaatatatccaaatctgactgtatattatatcataaaaaagcttttttaacaagtacctgtgcagtctacttccttttttgcaaaatatatggctaaaatctgtctatcacaagcgcaaaactgatatttttgcaaaccgatactttttttgcttacgaatggccgcaaaaatgtgttaaaatatattatgtaaagtaaaagtagcaataaccaacagtagagaacaggagtatttaatatgtttaaaagcggagattatattatttacggaagcacaggggtttgtctggttgcggacatcttcatccccgaatcaattgcagacttgggcgaagcgcgcctgtattacaagcttactcccctgctcggaagtgagataatatacgttcctgtggatgctccggtttttatgcgtccgattataacaaaaggacaggcagaagcccttatcgacaaaatccccgaaatcagcagcagtgatttcgagggtaaagaccgccgccaaactgtcgaaagttacaagctttctatcggtactcataactgtgaggacctcataaagcttataaaagccgtttactgcaaaactcagaatttaataaaatgcggcaaaaagcccggtcagacagatacgcaatacttaaaacaagccgaaacacttcttcacagcgagcttgcgactgcacttaacataccttttgacgatgtgccgacttatattgcagcaaagctcagtaatacagaacagaaagatgcgatgcaaaatcaatgattttgcatcgcatctttttaaacgtgtctttattttaaaaagaaataccttttcacatttttaaaatgaatacctttaagcaattttacagcaccttgtcgagaaagtccttcgtcctctgctctttaggattgccgaacacttcttccggtgtgccctcctcaactatatagccgccgtctataaacagcacacgatccgcaacctctctcgcaaaaccgatttcatgcgtaactatcgccatagtcattccttccgccgcaagccctttcattactgccagtacctcgccgaccatctcaggatcgagcgccgaagtcggctcgtcgaaaagcataatttcaggcttcatacagagcgcacgcgcaatagcgactctctgtttctgtcctcctgaaagctgcgccggatatgcggatgccttgtcctcaagtcccacgcgcgcaagcatcgcgagagcctgttccctcgcctcctctttgctcgccttcttaagatcaacaggcgcaagcataagattttttataacattgagattgttaaaaaggttaaaatgctgaaataccataccgatattttcacgcactttatttatatccaccttcttgtcggtgatgctatagccgcctacaaccaccttgccgcctgtaatctcttccagaccgttaagacagcgcagaaaagtcgacttgccgcttcccgaagggccgacaataacaacgacttcgccttcatatatatcggtagaaatgctcttcagcacctcgagctttccgaaatttttcttgagcgcatccacatggatttttatattatttttattcacggccacgagcaagtctcccttctatatattttgcaagaagcgaaagcagtgttattacaaatagatacataagtgctacaattccccaagtctggaaaagcgcaaaagtatttgcaacaacgttcttagcggaatttacgagctccggaaatccgataaccgaaagaatagacgtatctttcagcgtgattataaactggttaataatactcggtatcatcgtctttatcgcctgtggcagcactaccctttgcatcgagcgccaataaggaagtccgaggctccttgctgcttccatctgtcccttatcaacggactgaatacctcctcttataatctccgacatatatgcgccgcagttaagagaaaggcagattgttcctgcctgcagcccggaaaatttgagcggtatacctaaaatatcttttgcgaactgcggcacaccgaaaaatacgaaaaacgccagaactatcatcggcacccctcgtatagcatatacaaaaacaaaggaaacagctctgcaaaaacggttttttacaacgctcattattccaaatatcaacccgattatacaggcgaaaaacaacccgcagagcgcaagcaccagcgtttgtccgagcgcctctacaagcagatgtccgtaattagtgataacatttaccattgaaagaactccttacaaaaatagtaaacggcggaacccgacattgggttccgccggattatatacagttcttaaaactatccgagatacttagctatgatttcatcataagtaccgttttccttgatgttcttaagtccagcattgaacatgtcgaggaattcctgattttcttcattgaaaatagcaaggccataaggtgaaccttcgttttctgttccgtcaacaaccttcatagtaagatctccgtcagcgattgacgccttcataataggcgtgtcttcaaaacaagcaactgcctgtccgcccattacagcctgatacatcgtcggggaatcttcaaaataattgattgtaaatccatatgtctccataaggctctccgcatatgaagctccctgagttcctgtcttaacagcaacgagcttgccgttcagatcttcaaaaccagtgatatctgagtcagcagcaacagccatgcactgcgtagcctgatagtatccgtctgagaaagtccagccgctgtcgattctttcttgagtaattgaagcgccggcaatcatagcatcagcctgactcgactggcaggcagcgattgaagcgtcccaaccaaggctgttgagctcatactcaaaaccctgatcctctgcgatagccgcaagaatatcaacatcaatacctacaaattcgccgtcagcgtttgtatattcaaaaggcttgaatacggtatccgtagctataacccataccttaccgtcgttatctccgtttgcactgtcaccgccgcatccggcgagaattccgagcataaggcaaagaacaagcataattgataaaaactttttcattttactcttcctctcttttataaaacaatttcatttcacatattagtgaatacgccaatctctcatactattattataattatacgggaaataatagtcaataaaaacttgaagacatttatacctgtatacaattttagatatcgcatacatttatcagtagccctattgcttaacttttcacccttatcatcatcttttatatattttccgaatatattgacaattttgtctgagcagcgttataattgatgtaattatcatcgcatttattttattttttgaaaggagccaactatgacacgatttgcaaaacgcattggaggcggtatcaatcccgcatacggcagaatcttcgctatgttcgatcagccgggcgttatttctctcggtgacggagtaccggatgcaagcacattcccagccgccgaacttgaaaaaacaacaaaagaggtttttgaggattttaaaaacgacagctcatttaccaacaagctgttctcatattgggaatcggcaggcgtgcccgaactcgtaagcgtgcttgaagaaagatatatgggtaagtttgaaagcggtaatccggaaaaagacacactgctcacatttgccggcgcgcagcaggtaatcgatctggcagcaagggttttcctcgaccccggcgacaccattatagttgaagaaaacagctacggcggcgctatcacagcgttcagaagctacgaagccaatgtaatcggcgttgcgaccgacgaagaaggtatcgttcccgaagcgctcgaagccgcgctcaaagccgatcccaatgtaaagctcatatatacaatcgcaactttttccaatcctatgggtatcgaaaccacgctcgcaagaagacaggctatgtacgacctcgccgtaaaatatgatgtaatcattcttgaagacagtccgtactttgagctccgttactcgggtgaatatattccttcgatcaagagcctcgataagacaggacacgttatatttgccggctcgctttcaaaaatcgtaagtcccggcgttcgtctcggctttgccatcggcagcaaggaaattatgcaggtaatcggcgccgaaaaagacaatcagactatcggcaatccaggactaatccagcttgcagtggccaaatatttgcgcgaatacgaccttgacgcacatatcgcagaagcgtgcgatctctaccgcaaaaaaagagacgctatgctcaaagctcttgaaaatgagctcggcggcgtcgcatcttggacacatcccgagggcggctttttcctgtggctcactctcccggaaggagtatcaggcgacgaattctcggcttatgtagcggaacagaagaaagtcatcatctatccgggctcaatgtacagaccggacggcaaggatataaatgcagtgcgtctcaacttctcagttccgacagaggagcagatcgacgagtgcataaagcgcatcgcggacggactgcgcgaatttatgaaataacctgccaataaaaaagctctttattttctatattatataaccggctgcatttatcaaacgtcagccggttttttcatttgtatgtattattgccaatgcagctatttaatacgtaaatatatgagccgctttattatttttgtatcgttttcggaaaataggatatctaattttcgtaatttaaattatgaaacatcttttcttcaatagtttctataaaacaaactccaaaacgcttagattcgtttcggagtctgttttttgtaaggagtaactattattttgttgtttgttgcttatttgttctgttatttattcaaagccttatcagcctcatgcaggattttgcaggccgcctgtatatcgtccattgacgatgcataggaaattctgacaaatccctcgccctcagagccgaatatcgtgcccgttaccattacaataccgtaattttcgacgagccagtcaacaaattcctctgatgtcattcccgtcttctttatattcataaagatataaaacgcgcctttcggcatcttgcaggaaaaatgctttgtcttgtttatttcgccgacaaagtaatttcttctttcctcaaattccacacgcatcttttcaaccgtgttgtacttctcttcatcattaagcgcaacagctgccgcctgaagcacaaacgccggaatacccgatacttgaagtcctgtatgaacataaagcttctcaaaatactgttccggagttattatatagcccactctccagcccgtcatcgaaaacgcctttgaaaatccgttgattatgatcgtcttatcgcgcaggcttggaatcgacgccggcgatacagccttcgttccatcatatacaagtctttcataaatttcgtccgaacagatcagtatatctttatccgctactatctcggcaacaccttcgaggttttccttcgtaagcaccccgccgataggattgttcggcgagcagataactatcatcttcgtcttatccgttatcagcgatttaaactcgtcaaggtcaatctggaaatcattttcttccctgagcgaatattttactgcctttgctccgcatactcccgctatgttctcataaatattgtacataggattgggaacgagcacctcatcttcaggatcaaggaacgatgtaagcacgagatacgcagcctgtgccgcgccgcaggttgaaataacctgcttgggatcgaacttaagtccgttatctctctcgtacttgtcgcataccgcctgtctgaatacgagcgggccttcatatgccggatatgttgtgaagccgtcttcaagggccttttcacatgcgtctattatatatctcggtgtagcaaaatcaggctggcccatcgtaaacatatacatctgtcttccctgcgcgcgcatttcctgcgccttggcgcttaacagcctgatctttgacattccaagatcatcaagtctttttgccgctttcatataaatctcctttatttataaatactgcacttacacaatgcgtatgtcctgccaaatgccctatccttttataaacttatagccttcgacgaaagccgccttgtttgcatcaacgggaatacccttatgctcgaaataggactcaacagccttcacagccacatcctcagggaataagtctgtacccgcgatcacggctcccgccataacaacggacattcctctcggatttccggctttttcggcaagtttgccggccggtacttttacaacctttacgcccttcttctcgggaatatccgccgccagctcctcttccgcgaaaacgattccgccttcttccacctggtcgatatacttcggaacctgcgactggtgaagaaccgctaagatattcatctcttccataaaaggccatacgatagggtcatcgtcgatcttaatcttcgttgccgcatttcctcccctcatttccgagccgtactcaggaatatatgtaacatttttccccagagacgccgaggcttccgcgagaatcataccgagagtaagcactccctgaccgcctattccggcgcatacaattttattaagcatatttctcacctaacctttcaattcaccgagtttgaagtagtgctgatttacgttttctattctgtccatagaatcaacaggcgtcatcttccagttggtagggcacggggcaaggatttccacgaacgaataacctctcttgtctctctggcactcaaacgctttcttgatgtatgttttagttttgttgaactccgcgatgttagcaacgcttcctcttgcgatatagccgacatccatagtagcgagcatctccgcaagctcaagcggctttccgaatacgctgtagtccgtaccgtatcttgaagtaactggcttctggtcatcgagcgatgtaggcgccgtctgtcctcccgtcattccatatacgccgttgtttacaaatattacagtgatattctcgtttctctttgccgcgtatatcgtttccgctatacctatcgaacctgcatctccgtctccctgatacgaaagcactatgttatcaggaagtactttcttcatcgccgcggctactgccgctgctcttccgtgaggcgcctgcacatagtcaaagcctatgctgttctttacagacataccgcagcctacacagcatgctcctatgagatcttcctcaagcccaagctcctctattacacacgctattgccttaactattattccgtgtccgcagcctgcgcagaaagtggttttatcctgtaatattgcaggtcttttaaatacctttgccatcttctatacctccttttccttgcccgcaagaacactctttgctttatctattatcatatcaactgtaggataaattgctcccgtcgtatatgaatatgtaggtactgccgagcgtacagctataactatatcctctgacatctgtgccataatgctcatctcaaccgccagatatgctttcggatgcacgtttgcaaacgctttcttcgggaacggccacagtgtctgaagtcttataagtccaatcttcatgccctctttgcgcgccttgtttaccgcttccttacacgctcttgacattgttccgtaagccacgagaattatctccgcatcctctgtcatatagctttcccaacgctgctcgttctcttccataagtgcgagatgctctctcagctcgccctcatacttaggcattccgtatccgccgtaaaatctcggcttgaagcccttaatcttttcagctctgtgtctgtgaattgcccactcaagcttctcaggatcatgctctgtcatctcgtccggaaattcaactgcttcaaccatcgttccgatagagccgtctaccgctacaattacaggatttctgtacttttccgccgtttcaaacgctataggcataaaatctactgcctcctgaagtgagcccggcgcgagtactatgcatctgtaatctccgtgcccgccgtttttagcgagctgtaaatagtcgccctgtgccgggttgatatcaccgataccgctcgcatatcttgttacatctactataactcccggtatctcgtttgacgccatatatgaaatcccctcctgcataagcgagaatcccggtcccgatgatgccgtaagcgatcttactccgcaagccgcggctcccattaccatatttactcccgctatctcagattccgtctgtgtgaagcttcctccaacctcgtgaagcctccagctcatatgctcaagaagctcgctctgaggtgtaattggatatcctgcaaagaagcggcatcccgctcttacggcagcttctgcaatagcgtagtttcctttcataagcacctttgcctttgccatttattccacccccacttctatcgcccagtcaggacagatgttaaagcagattccgcactgaacgcacttttcctcatccacctgaatatatttgtagcctttttcattcatatgctccgaaaatgatatcgcctttctcgggcattccctgatgcaatagccgcacgccttgcatctttccttcgcaatttttactttactcatattattcctccgcttttattgcctgattactttgccgcctttcagcagttattgcgctttttcctctgctgctaatgctgcgctgccgatcttcataactctcttccctgcaatgcactttttatcgtgacttcttacccagaagcagtcgagaatacctacagcgcagttagcaataagcagcataaagatgaacttatagccttcgtttccgtattggtcaagccacttgccaaagagcggcgggagcagcatatttgaaagcgtgcttgcttttgtcgctatgccgatagctgtacctgcaacaatcggacttatatgcagctctctcaggatagagtatgttaccgagtagagtgcaaagattacaagcgacggaagcaccgaataaatcatcacgaatacaggattcgtttccgaagtgaagaaaatcggaactgcaagcataagcgccgaaatagtaaacgctactataaaccacttgcttgacgacttaaataccttatccgccattataccgcctataggcgccacaaccattgctccatactgtctcactaccgaaagcgccgatgaagccgtaggatccataccaacaacatctatcagatacggattgaagtaggaaatgtgcgtatagatcgtaaatgttgtaaagtaagctatggcaagcatatatgttcccggccatttgagcacgtcccagacatacttaactctgataggctcgtcgccttttaagaatacgcctctttctgccatctgcttttcattgtcaaggaataatacggcaagtatagttcctataagagttaccacacccatcgtacataccgccatacgaagtccgccgccaaactggttcattatccaaagagggacagcgttgccaagcgctccgcaaagtccattgacaagataatatgtaccgaatgagttacctgactcctcctcaccgccgagattgttaatgtacttaacaaggcacggccaatacgcgcaaagcgataatgcctgtaaaatccataaaactcttgcgacattgaatgagccaacaaagaacataaatacgaattcgaggactgttattgctccggcggaaaatacgataacccttttagcatcaaatttatccgcaagatacggtccaaagaacacacaaagcagtgcggttgttgatgaataggatgtcagtgtgccgagctgagtgtttgttacgttcattgcctccatcatctgctcatagaagatagaacgcatatacatgcaggtgtacattacaccgcctacatagcccagcgtgattaaacccatccattttctgaatttattttgctgtttcacttggaaaaagcctcccttctttatttgtatactttatgtttgtatactttgttatattcatattatcataaagaatttaaatttcaagctttttcgacataatttgattgtttattttttgtacaaaaaatgcggccgacctaatcgaccgcatcgctgctgttttgcctcttatttattcttcaaacagagagtccctcgcatcgtcatgccaatgttcatatactctcttcttgctttcttctacatcccctgatttaatggcttcaagtatgtgcctgtgctcgtcattcatctgtgaaagcatcgaatacagattttcaatatccggatcaaagtaagtaaccctgataattttcttttcaaggtactttattgtatcgccaacagcgtcgtttccgcatctgttcctgtaaagctcgtgaaacatttcctgatattcataatactgttcgtatacctgaaggcttatcgccatatccatttttttaatagcattctccagctcgtttataacttcatccgtcattttcggcatcgccttgccgatagcgtacgaatcgagcatccctatcagtgaatatatatcattttttttcttttcgtccactctttttacaaaaaagcctttacgcggcacattttccaggatatcatcagcagaaagctgtatcaaagcttcccttatcggtgttcggcttatgcccattttttccaccaaaaaaccttcgcttatcttatcgcctacataaacctcaccattttgtatgagtttaacaacaaattcataaacctgatcgctcaaagattttacactcataattttcacctcatatacttacataaaccatacaatacctttttatcttagaatataatcataaaaaagtcaagctttcggaacagcgggataggaagtcccgaaacacctgaaaatcaagcctctgcataacatagtattctgcaaaggcctgcaataccaagaatacgatgcgcccaatttaacaaatttaaaagcttagtacttaataaagctattatgttatttttccgaagcagcgcacttaaaacttcaacattatctgctatctttatctttttatgaaaaaccgaagccagggcgaaaaaaatccaaggttttgagcataaacctcggattttacacctctattctacagccataactccgatattttcggcaaagctgagagcggtatccgtctttgtcaaaagctcatcgcgcgtaagacccggcgccatagctgtaaccgtcggctcgccgtcaagaaactctataacacagagctctgttactatcacgctcacgcacccgatcgctgtaagcggcatagtgcattcatccactattttagattcaccattcttggaacaatgctccatagcgacgattacctttttcgcgccggaaacaagatccatcgcaccgcccattccgtttacggacttacccggaaccgcccaattcgcaagatttccgtgtttatcaacctgcagcgcaccgagaacggtagcatcaagatgcccgcctcttgccatcgcaaacgatattgaactgtcaaagcagcagccgcccggtatcagagttacatactcgtttcccgcgttgcataaatccttatgtccctcctttgacgttgtcaattccttagagtgcgctttttcccactccgtatcgttgtcaaaagccctgccgacaattttatcctgacctataatcccattttcgccatgaagaagcaccgtcattccctcgggaatatatgaacctacgagagtcggaatacccactccgagatttacaaaatcaccatcatgcagcatcgctgcaacattttttgctataatatttctattgtcaagcatatctatacctccatcgactgcactacatgatccacaaaaactccagggagctgcacctgatcggcttctatttctcccggctcaacaatctcctccgcttcgagaattaccatttttgccgccatcgccatcagcggattaaaattcatagccgaatatttaaataccgcatttcccattgtatcagctctaaagcatttaacaagcgctatatcgccgtgaagcgctttctcaagaatatactctttcccgtcgatcgtccggcgctcttttccttcctcaaccacagttccaactcctgtcggtgtataaaatccagctatacctgatcccgcagctctcagcctttccgcaagcgttccctgcggtataagctcatatgtaagagttcccttgtttatattcgagtgtacagtcgcgtttgaccctaaaaaagaaaccttgatatgcgttataatccccttatcgagaagtccgggacaggcgtttttcaatttcgcgttggcatagccgccatcctcagacacggaggttaaattcgtcaaatcccttttttccagctcatgcaaaagcgtaaacgccgccccactcccgccaaagccgcctaccaagaccgtatcaccgcttttcaccttgtctatcgcagtctttacatcaattactttactttccatactatctcctttgttttgtatactttatgataatatattataatactgtacccataaatgtcaattaaaaaagaaaaatcggacaatcgccgtaatcagc

SEQ ID NO: 1249 - DNA, 32759 bp, Unknown
  16S sequences of unknown bacteria
tcttgctttccttgctctgtatcgttttcaaggttcgttgctctcaagcgagcttgtacataatagcacgctttaggcgctctgtcaacaggttttttgccatttttctgaacttttttgtgcatccgaacgttcgtatccacccatctttcgtctctatcttaaaatacgaactttcaattcaaaattccaataaaatattctggttttgtaaatttcaacatgaagaggcggacagccgccatagccgtccgcccctgtttgtgtcactcgctcttatgcgccgcctcgcaatagaagcagcgatagatctgcttctcccgatcggccagcacaaaaatctggtccaattcctgctcagtctgagtaatacagcgcgggtttttacacttcatcacattcaccactcgcgcgggcatctcaggttttttcttctccaccagtttcccgtcgcgaatgatgttgacgctgatccccggatcaatgtagcccagcaaatccagatccagggggatctcctggtcaattttgatgatgtcctttttgcccatgcgctgcgacttggcgttcttgatgatggccacagagcagtccagggcgtccagtcccagatagtgatagatttccatgctgcgcccggcgtggatatggtcgattacatagccgttctggatgctgtcaatattcatgcctccacctccaaaagcttcatcagcagggcttcgcgcatatatttgccattcgaaacctggcggaaatagcatgcgcggggatcgtcgtccacggcgcggctgatttcgttcacgcgcggcagaggatgcagcacgcacaaatcgcggcgtgccaggcgcatcttttcagtatcaaggatatagctgtccttgaggcgcacatagtccgcctcgttaaagaagcgctcgcgctgcacacgggtcatgtagagaatatcgagggtgccgatcacatcctccagccgctccacttccacgaagctgacgccgtttttgtgcatgctttcgcgcacatattcgggcacgcgcagctcctccggagagatgagcacaaagcgaatgctcttgtagcgcatcatggcgttgatgaggctgtgcaccgtgcggccgaactgaaggtctccgcaacagccgatgaccagctggttgagccgtcccttctcgcggcggatggtgagcagatccgccagcgtctgcgtggggtgattatgtccgccgtcgcccgcgttgatgatgggcacggggctgacctgggccgccgcggtgggcgcgccttccttggggtgacgcatggcgatgacgtccgcatagcatcccacggtgcgcaccgtatcagccacgctttcacccttggatgcagaagagctgtccgccgatgaaaaaccaagcacgctcccgcccaattccagcatggcggcctcaaaactcagccgcgtgcgggtgctgggctcataaaaaagcgttgccagcttcttcccatgcatgcattcagcataccgtttagggctttggataatgtcgtctgcgcggtccatcaggtcatccagctcctgcgtgctcaggtcacggatatcaagcagatgtctgggcatgcgtgtacctcctcagttgtgcatccaactctcgtcgctggggttgttgcggaaacgaatgagccgttccacctgttccggacggatatagcccttctccgccgccacctgtaccatcacgtcgaagttggacaggctcacgtttttcaccccggcggcggccagccggtccagtcccttctgcatgccataggtgaagatgctcgcgatgcccagcacctccgcgccggcctcgcgcagcgcctccaccacgtcgatgacgcttccgccggtggagatcaggtcctccaccacgaccaccttctggcctttttccagcttgccctcaatgcggttctgacggccgtggtccttgttgccgccgcgcacgtagcccatgggcaggtgcatcatgtgcgccacaatggccgcgtgggcgatgcccgcggtggacgtgcccatgagtacctccacatccggatattcacggcggataatttccatcaggccgttttccacctggtcgcgcacctcgggcgcggtcaaggtcaggcggttgtcgcagtaaatggggctcttgatgccgctggcccaggtgaagggttcctcgggcctgagaaacaccgcgccgatggacaataacgcacccgcaatctgtttttccatgatggtctttcctcctttgtcactcgccaaggaattccttcacgcagcgccgataggccgccacggggtccgctgcctgggtgatgggccgccccaccacgatatagtcgctcccgcccaggcgcgccttttcgggggtcatcacgcgcgcctgatcatccgccgccgaatccgcaaagcggatgcccggcgtcaccgtctggaacgccgcgccgcaggcttccttcaccagccccgcctccagcggcgagcacaccacgccgtccagcccggcctctttggcgttctgggcgtacttcttcacggtgtcgggcatgctggcattgatgagcagctcccgctgcatgcgctcctcgctggtggaggtgagctgcgtcaccgccagcagcatggggcgcgttccatccggacgggtcaggccttccagcgccgccttcatcatgtcgatggtgcctgcggcgtgcaggttggtcatgtccacatccagcctggacagcgaagccatggcctttttgacggtgttgggaatgtcgtggagcttcagatccagaaagatcttgtgtccccgcgccttgatctcccgcacgatctgcgggccctcggcatagaacagctccatacccaccttcacgtagggcttgcgcgcctcgttttcaaacttgtccagaaaggcgtacaccgcctccgcgctgggaaagtccaatgcgataatcacgtctccgcggctcatttccacgcacctccgataatgtcttgcaatcgctcgatgcccaggcgctccatctcgccgggcaacgcctcgatgatcttcgggcaaatgtaggggtccaccagattctgtgcgcccacctgcacggcggtcgccccggccaacatcatttcgatcacatcgcgcgcgctgctcaccccgcccatgccgatcacggggatcttcaccgcccgcgccacctgatacaccatgcgcaacgccaccgggaacaccgccgggccggagaagccgcccatgacgttggcgatcacgggtttgcgctttttcaggtcgatgcgcatgcccaaaagcgtgttaatcagactcagcccgtccgcgcccgcatcctcgcaggcttttgcgatggatacgatatccgtcacattggggctcagcttgatgtaaacaggcttggtcgttacggccttgacggcgcgcgtcacctccgccgcgctttcggcgcaggtaccgaacgccattccgccgccatgtacgttggggcaactgacgttgacctcgatgaggcccacctgctcctgctggtccatcaggcggcagcactcctcatattccgccacggaaaagccgctgatattggcgatgacctttttatgaaagaacgttttcagctcgggcagctcatgctcgatcacatgatgcacgccggggttttgcagtcccacggcgttgatcatgcctgccgtgcactccgcgatgcggggcgtggggttgccaaagcgcgcctccagcgtggttcccttgaaggcgaacgtgcccaatacgttgatgtcgtacagctcgtgaaattcctcgccatagccgaaacagccgctggcgggaatgacggggttgtcaaccgtccagccggagagggtcacgtgcgtatctaccataggatctcctcccttttgagcaccgggccatccttgcagatgcgcttgctgccgtacctggtttggcacgaacagcccatgcacaccccgaagccgcaggccatgcgctcctcaaagctgaactgcccatggatgtcctgtttttcgcacagggcatgcacggcgcgcagcatgggctccggtccgcaggcgtatacatagtcgtattttccttccaggggaaccatggcgtcggttacaaagcccttcacgccctgcgtgccgtcggccgtggtcacggtcaagggcacgcccagcgcctcaaactccctttgccagaacacttcggccgcggtgttgaatcccagaatcacccgcggctccttgcactcggccagcagctttttgcacaagccgtacaggggcggcgtacccacgcccccgcccaccagcagcggaaactgcgaggccgtcacctcgtccagccggtccacatcaaagccgttgccaaggccggtcaaaaggtccagctccgtgcccgccgcatagtggctcatggcctcggtgcccagacccaccaccttgtagatcagatccagcgtgcctttctcgccgggtcgccagtcgcataccgagatagggcgtctgaggtaaaagcccggcagctgcacctgcacaaactgacccggccgcacgatggcgcgcgtgtcgcctgaaaggcgcatatggtacacgttctgggtgagcggctcgtggctttcgatcacaaaacgcatcggtccgcctcccttacgagtcgatggtggagatgcacagcgtgatttcctccagcacctccaggagcacccgcaccgtgtccagcgcggtgaacatggtcacattgttctccaccgcgcagcggcgaatctgcgcgccgtcgctgtcgcggcccaggttggcaggctcgcgggtgttgatgacgtagttgacgtgtccctgccggagggaatcgaggatctcctcgctgccctcgctgagcttcttgcggacgcgggtgcggatgccgttggccttgaggaactcggcggttccgcgcgtggcctcgatgttgaagcccatgtcatagaagcggcggataaggggcagggcctcggccttgtcgctgtcggcaatggtcacaaagatggtgccgtagttggccacgttcatgccggaggactgcatggccttgtagagcgcgcgggtgaggcgcttgtcgtagccgatggcctcgccggtggatttcatctcggggctcaggtaggcgtccatgccgcgcagcttggagaagctgaaggccggggccttgacgtaccacttctccttttccggggccatgacctccacaatgccctgttcgcgcaggctgtggcccagcatcacgcgggtggcgatgtcagccaggggcacgcccgtggccttgctgaggaaaggcaccgtgcgcgaggaccgggggttgacctcgatcacatacacgttgtcctggcggtccacgatgaactggatgttgtacaggcccacgatgccaatgcccaggcccagccgcaccgtgtagtcgatgatggtctggcgcgccttctcgctcaccgagaaggtgggatagacgctgatggagtcgccgctgtgcacgccggtgcgctccacgtgctccatgatgccggggatgtagacattttctccgtcgcacacggcgtccgtctccagctccttgccggtgatgtagtggtccacgagcaccggctggtcctcgctgaccagcacggcggtcttgagatagtggcgcagggcctcctcgttgggcacgatctgcatggcgcggccgcccagcacatagctgggccgcaccagcaccggatagccgatgcgctcggccacgcgaacgccggcctcgatatccgtcacggcctcgccgttgggctggggaatgcccagcgattccatcaccttttcaaaggcgtcgcggttttccgcgcggcggatggcctccacgtcggtgccgatgatcttcacacccatgtcgtgcaggcgctcggccaggttgatggccgtctgaccgcccaggctcaccaccacgccctccgggttttcgagggtgacgatgttcatcacatcctccacggtgaggggctcgaagtagagcttgtcgctggtggtgtagtcggtggagacggtttccgggttgttgttgatgatgatggcctcataccccgcccggcggatggtccagatggcatgcacagtcgagtagtcaaactccacgccctgcccgatgcggatggggccggagccgagcacgatgatctttttgcgatccgaaaccacggactcgttttcctgctcgtaggtggagtagaagtagggcacgtagctttcaaactcgctggcgcaggtgtcgatcatcttgtagacgggcatgaagccatgggccttgcgaaggaggaaaacctccttttcggtcatgtcccagacctggccgatgtacttgtcgctgaagcccagcttcttggccgcgaaaagcgtcgcctcgtcgcggggatgcgatttaagcacggcctcgaactccacgatgtttttgatcttttccaggaacagcatgtcgatcttggtgcggtcgtagatcaatcccaggtccacgccgcagcgaatgagctgggcgatggcgaacagccggtcgtccgtaccgtcctggatgtagtccagaagctcgtccacgggcttgttgtcaaagcggggcatatagatgtggcacacgccgatctccagcgacctaacggccttgagcaggctttcctcaatggtgcggcccacgctcatcacttcgccggtggccttcatctgggtgctcaggcggttgctggcgccctccagcttgtcaaaggggaagcgcgccattttgctgaccacgtagtccagcgctggctcaaagcaggccggcgtgttggccagggcaatctcctccagatgcatgcccaccgccaccttggccgacacgcgcgcgatggggtagccgctggccttggacgcaagggccgaggagcgggacacgcggggattgacctcgatcaggtaatactggaagctgtaggggtccagggcgaactgcacgttgcacccgccctcgatcttcagcgcccggatgatcttgagcgcgctgtcgcgcagcatgtgatattccttgttggtcagtgtctggctggggcacagcacgatggagtcgcccgtgtgcacgcccacggggtcgatgttttccatgttacagatggcgatggcggtgtcgtttgcgtcgcgcatcacctcgtactcgatctccttgtagcccttgatgctcttttccaccagcacctgatgcaccggggagagtttgagcgcatttttgagcagctcctccatctcctcagggttgtcggcaaagccgccgcccgtgccgcccagcgtaaacgcgggccggagcaccaccgggtagccgatttgctccgccgcacggaagccctcctccatgctggtggcgatcaaagacggcagtaccggctcgcccagccgctcgcacagttccttgaacttctcgcggtcctccgccatctcgatggattcaaagctggtgcccaggatttccacctggcactcgtccagcacgcccttgcgctgcagctgcatggcgaggttgagtcccgtctgcccgcccaggcccggcagaatcgcatccggccgctcatagcgcaggattttggccacgtattccagcgtgagcggctccatatataccttgtcagcgatgtccacgtccgtcatgatggtggcggggttggagttgaccagaatgacctcgtacccttcctcgcgcagggccaggcacgcctgcgtgcccgcgtagtcaaactccgccgcctgcccgatcacgatggggccggagccgatcaccagaatgcggtgaatatccatgcgcttaggcatgcttcttctccccttccatcaagtcgataaagcgcttgaacagatatgtgctgtcctgcgggcccggtgcgctctccgggtggtactgcacggaaaacagtttgtccggcagacaggccacgccctcggcggtgccgtcaagcagattctggtgtgtgagaatcaggcccgtgccctgcagggagccttcatccaccgcaaaggagtggttctggctggtgatctcgatcttgccggtggccagctcgcgcacgggatggttgccgccgcggtggccgaatttcatcttaaaggtgcgcgccccgcacgccaacgcaatcatctgatgccccaggcagatgccgaagatgggcagccgcccgcgcagcgcgcgtaccagatcgatcaccgggcgcacatcctcgggatctccggggccgttggagaggaacagcccgtcgggcttgaagctgagaatggtgtcggcaggggtgtcgtagggcaccacggtcacgttgcagccgaactggttgagctttcgcacgatgttgagcttgatgccgcagtccaccgccaccacgctgtagcgcgggttgggggtgcgggcgtaccacttcttcttgcagctcacgcggctgacgcagtcggtgggcagctgataggcgcgcacgcgctccagcgcctcctcgacaggggtatccgcgtcgcagatcagcgcgcgctggctgccctcgttgcggatcatccggccgatgcgccgcgtgtccacgccctgcaggccgggaatgccgttttcttccaaaatctcgcccagcgttttggtatagcggaagttgctgggcatgtcgcagtattcgcgcaccaccagcccgcccatggtgggcacgcgggtttcgttgtcctcgtcggtgatgccgtagttgccgatgaggggataggtcatcaccaccgtctgcgcggtgtagctggggtcggtcacgatttcctgatagcccaccatggaggtgttgaacaccagctcgcacaccgcgtcgttcatggagccaaagcccgtgccctcgtgcacgctgccgttttccatcaccagcatgcgccgctttaccgctgccgccatacgcaattccctcccacataggtttccatgcatttgccccgcacccgccagcccgcaaagggcgtggcccgccccttggaaaggaaggtctccgggtcgatggcaaaggtttcgtccaggtcaaagatcgcaaaatcgcccgcgccgggttcaatgcctgccgggggcaggccgaagcgcgcacgcggtgtgtccgtcatggcgcgcagcatcgttgccagcggcgcacgccccgtcagcgccaggcctgtgtagagcaccgggaacgcgcactccagccccaccacgcccatcaggcttttttccagcccgcgcgccttttcctcggcgctgtgaggcgcgtggtcagtggcgaggatgtcgatggtgccatccagcagtccctccaacagcgcatcgcggtcggccgccgagcggatgggcgggttcatcttgaagcgcccgtcgtcctccagctccgtatcgcacagcagcaggtagtgcggcgccgtctcgcacgttacgtccacgccccgcgccttggcctgccggatgagcgccacgctttcctttgtagacacatggcacacgtgataggggcagctggtttcctccgccaggcgcaggtcgcgctccacctgccgccattcgctctcgctggaaatgcccttgaggccatgctgccgcgcatattcgccctcatggacgcagccgccatgaagcaggctttcatcttcgcaatgtgcggcaatcaggccgcctgcggccttcacgcggcgcatggcctcgcgcatgctgccttcctcctgaatgccgcgtccgtcatccgaaaaggccacggtctgaggccggagtgcctcgaagtcgcacagttctccgcgcccgcgctgacccatcgtgatacacccgtagggatgcacccgtactgccgcatccctgcggatcgcggacagctcctcctccaggtgctccggcgtatcaggcggaggattgaggttgggcatggcgcacacgtcggtatatccgccgcgcgccgcggccagcgtgccgcttttcacgccctccttataaaaaaagcccggctcccgaagatgcacatgaacatcaacaagacccggtatcaacaacttgccccccaacggcaacgcgtccgcctcatgcaaattggaaacactggcaatgcggcctccgtctacggatacatccgcccgcatcagctttcctccatgatacaccgccgcgccgtccagccgaaagtgcacgatcaccgccccctttccgttttcatcaggtgcgtatatccaatcatttatgatacacagaggcaggtggtttgtcaagccatggttcgcggtttttcgcagactttacgccccgcccctcccgtggtatcatactggcgggagggaccgccatgtaccgcattttgatcgtcgaggacgaccccgtcatcaccgaaaccctgtgcgcctacatgggccgctggggcatggaggcgcgcggggtggaggattttcaaaacgtgctgcgcgaatttgccgcctttgatccccagcttgtgctgatggacatctcccttcctttttttgacgggtatcactggtgcgccgagatccgcaaaatcagcaccgcgccgattcttttcatctcttcggcaggcgataacctgaacatcctgcgcgcgctggacgccggcgcggacgacttcgtttccaagccctttgacctgagcgttctcatggccaaggtgcaggcacttttgcgccgtgcctatgatttcgcggggcaaagcgccctgctgacctgcggcgacctgatgctcaacacctccgacggggcggttacgtgccggggccaacgcgcggagctgacacgcaacgaaaaccgcatcctgaccgtgctcatggagaacaagggcaaaatcgtcagccgtgatgcgctcatggcccgcctgtgggaaaccgactcgtttgtggatgaaaacaccctgagcgtcaacatcacgcgcctgcgccgcaagctggccgccgtgggcgcggaggacctgatcaagaccagaaagggcatggggtatctgatcgaatgaaaacgcttcgctgggccccccttcttcttcgctacgcgcgcgaccgtctggcccatatcgtgctggccgtagcatgtccggcggtgtacgcgctggtgtgcgccctcgccggcgcgccgctggcgggggtcgtctacgccggtgcgctggtgcttgcgggcgggctcatcgccctttgcgtggacctgccgcgctacgtccgccgtcaccgcgagctgcaaagcctgctggacggctgcctctacgccgccacagtgctgcccgccccacgcgggcttatggaggaggactggcgcgcgctccttctgtgtgccatcgaccagagcgcgggccaggccgacgcccacgaccgcgaccggcgcgaccgtgaggcctgcatcgccctgtgggcgcatcagatcaaggtgccgctggcggccatgcgcatgctgctccagagcgagcccggccccgcctcggaccggctgacggcggaattgttcaaggtggagcaatacgtggaaatgctgctgggctaccagcgcctcaccggtccctcgaccgacttcaccctgcgccagtgcgacgtgaacgccgtgatgcgcgcttccgcgcgccgcttcgcgcccctgtttatcgagaaaaagctgcgcctgaactatcaggaaacgaccctgcgcgcccttacggatgaaaagtggctggcctttgtgctcgagcaggtgctcagcaacgcggtcaagtacacccgccggggcagcgtgacccttcgtgccgacgaagctgcccatgccgtgatcgtggaggacacgggcatcggcatcgcgccggaggacctgccgcgcgtgtttgaccatggctacacgggcctcaacggccgaaaggacaagcgcgccacgggcctcgggctgtacctttccaggcgcatactggaccagctcggtcataccatttccatcgcgtccgaaccgggccgcggcacgcgggtgaccatcgggctggacagcctgcgtatgcgcgcagaataggccaagatgacaaaaacgtaagctgcgcgggcaaactgtaaggcagacaaatggcacccgtctcccgccgtaaggtatactctgagtcgaagcaaaggaggtatgcctcatggcaatgctggaagtcgatcatctgcaaaagatttataccacacgcttcggcgcaagccaggtgcaggcgctgaccgacgtgaccttctctgtggagaagggcgaatatgtggccatcatgggcgaaagcggcagcggcaaaaccacgctgctcaacattctggccgcgctggacaagcctacccgcggcgaggtgcgcctgaacggaaagctgctttcctccatctctgaaaaggcgctgtccgccttccgccgcgacaacctgggctttgtctttcaggattttaacctgctggacaccttctccatccgtgacaacatctttctgccgctggtgctggcgggctgcccctgccgcgaaatggaaaaccgcctcggccctatcgcccagcagctgggcatcggcggcattctctccaaattcccctacgaagtcagcggcggccagaaacagcgcgccgccgtcgcccgcgccctcatcacccggccccagctcattctggcggacgagcccaccggcgcgctggacagccgtgccacagacagccttctgcgcctgttaggcgaaatcaacgaggacggccagaccatcctcatggttacgcactcggtcaaggcggccagccatgcgggacgtgtgatgttcatcaaggacggcgaggtattccaccagctctaccgcggcctggacggcacggaggggctgtaccagcgcatcagcgacaccctcaccgtcatcgccacgggaggcgcccgccatgcgtaaaggattcttcccacggctggccctcagcggcatccgcaaaaaccgcagcatttactatccctatattctcaccgctgtgctcaccacggccatgatgtacatcatcggctccctgcagcagatcagcaccgactattcgggcaccctggccttttccctgcagctgggtattgtggtgacctccgttttcagcgttgtgtttctgttctacaccaacagctttcttatgcgccggcgcaaaaaggagttcggcctgtataacattctgggcatggaaaagcggcacctggcccgcctcattttctgggaaacggcgatgatgctggcggtcagcctcacgattggactggccgcgggcgtgcttctggacaagctgatgcacctggtgctctcgcgcctggtaggacaggccgtctcgctcacatttgccgtatcgcccggttccatgcgctacaccgccgcgttgatcagtatcacgttcgccctgattctgctcaactccgtgcgtcaggtctacgtcgcccgtcccgtagagctcttgcgcagcgctgaggtgggcgagcgcgagcccaaggcccgctggctgctgggcctgctggggctgatttcgctgggcacgggctactggctcagtgcaaccgtcaaggacgcgggcatgatgattctgttctttttcgtggcggtactgctggtgatcgcgggcacctacctgctgttcacctccggtagcatcacgctgctcaaggctctgcgcaagaaccggcgttactattacaagccggaccacttcatcagcgtatccggcatgatctaccgcatgaagcaaaacgccgtgggccttgccaacgtgtgcatcctgtccaccatggtgctggtgatggtgttttcgacgctttccctgtggctgggcatggaggacaccctcaacagccgcctgcgttcggacatcgatgtgcggtccgcctccacggatgtgtccgcactggaggccgccgtggatgagacgctccggcaggcgggcgcctcacgagaggacacctggacctaccgctacctctccttctcggccctgcccacccccgagggctttgtcagcagcgtttccttcaccgaaagcgacgccctcattgccagccccgccaccttccaggtgatggtcgtggaggactataaccgcatgctgggccgaagcgagacccttgcgcccggcgaggcgctgctggaatgtacccgcggaaactatgagggcgataccctgcgcctgctggacgaaacctttgccatcaaagcgcgcatttccgacggtctgggtgcggggcaggcgctggccagcatctacgattactactgcctggtggtggacagcatggacaccctgcgccgtctggacagtgaacagaaggcggcctacggggatctcgcctccgccatccgcacctccatgagctttgcgctccttcccgcctcaccgcagctatcggagcaggtggccgcgcttctgcgcagccaggcggatgcggacggctttacgagcgtggccgaacgcacggagcttcgtgaaaaccttatgacgctgtatggcggcctgctgtttgtggggctgttcctgggactcctgttcaccatggccatgatcctcatcatctactacaaacagatcaccgaaggctatgaggaccgggagcgctaccgcatcatgcgcaaggtgggtctgagccgccgggagatccgccgctccatctcatcgcagatcctgatcgtctttttcctgcccctggcggcggcagggctgcacgtagccttcgcctttcccggtatcgtcaccatgttccgcgcactcagcatgaccaacgtcacgctgatcgccggctgtgcgctgggcagctttgcgggcttcgcagcgctctatggcgctgtgtacctgctcacagcccgcgtgtactaccgcatcgtcagcgaatgaggtgatggagatgatcaaagccgtttctcccatgcgccagcggcttgcagacggcctgttctggaccggctttgggctgtgctgcctgctgctggtgccggtatgcgtgctgctttggcttattcgcggcatctttgccgcggtggactggtgctcccttaggctgaaaagcgcataataccatgcggggagaggccgagcggcctctcccacccagactgtcaaaaaacccatttggggaggtttggagggcccgcaggccctccaaaatgaatcgtatcgtccggctttgccgggcgggcggggagtttgcgcccctcggcgcaaacatttcttaagcttttggcggaaaaggccggcgcagccggactttttcgacacgctacggggagaggccgagcggcctctcccccacacatgcttctcagtcggtccagaagatcgaccgctggttttccgtcatgctctgcacagcatttgtttcgtcctcgccacccccgccgaagaagttgcgcacggcatcccacaggctgcccgcgccggacagcttggcctgcgccacctggacggcctgcacgccctccagcagaatgccgttgttgagcagctcggcgtgcacgggaatgacgcgataggtgtagactacgccgggctttgcgctggtatcggtatagtagagggtttcgcctgcggtgccgtaaagctcggtgagcacgaagctctcgccgtaggtatcgcgctgtacgcggtagatggcggtgtcggccggctgaatcatcagcagcggatagccgctatcattatgacccacggtgaagttgttgggcgagcgcggcggggtccagatatcgctcttcttggtgggatagttgctggcggagaaatattcggtgtagcggtatgccttgggcgtgaggtccacggcgagcatcggttcgccccgccacttgatggcctgcttgtcgatctccagggcgatgatgccctccggcctggtaaactgcggcttgtcgcggttctggtagagggccttgaagtagtcacgggccatggcggcagtgttgtcgccgccgctgatccacccctgcagcttgtggctgctgtccggctcgtcaaatcccatccagaaggcgcagcaaatctcggtgttgtaagcggccatccagatatcgcggttgccgccgccggtcatgttgacggtaccggtcttgcccgccacgggcgtgcctgcggcggagagcttcgcgcccgttcccgacgaggtgaccgattgcaaaaggctggtcatcaggaatgccgactgctcggagagcacgcgctcgccttcgctgcggtgctggtagagcacacggccggacgcgtccgtcaccttggtgatgaagtgcgggctgttgaacacaccgccattgccgaagggggcataggcagcggccagctgcacgggcgaaacgccgtaggtcatcgctcccagcgcaagggccaggttggaatcgcgatcatccagcggaatccccaccttttccagataggcgcgtcccgcctccaccccaatctggttgagcaacgcaaccgtggctacgttgagactgctttgcagcgccgagcggatgctcacgtttccgtaatacgtgtagctggcgttgcggggtttgtagccgttaaagttggtgggctcgtccttgagaacgctggcggtcgtatatccgtactggtcgatcgccggtgcgtaggccaccaatggcttgagcgccgatcccggctggcgccgcaggcgcgtggcacggttgaagccacggcgcacgtcatagctgcgcccgcccacgatggccagcacctcgcccgtctgggtgttgacgcacgcagccgcgccctgcacgggcgtaccgtccgatgcgtcggcgggaaacacgtttttggtaaactccttatccaactgatcctgatgtgtgcggctcatggtggtttcaatcaccaggccgccggtgagcacctgatcgctggtcatgcccagcagggtttcagcctcatccagcaccgcatccacaaaccagccgtattgcagcgtttccgccgggcgctccaccacggcaatggcctcggccgctgcctcgtcgtgcatggtctggtcgatcatgccctccttgagcatggtgtccagaatgtacaggcggcgggagcggttgttttcttcgctcacatggggcgcgtagtagctgggtgccttgatgctggccgccagcgaagccgcctgcgccagcgtcaggtcctccgcgtccacgccaaaataggtttgcgccgcggcctgaatcccgtaggccccgttgccaaaattaatgtagttgagatacatggccagaatttcgtccttgctcatctgccgctccagattgacggccagccacatctcctccagcttgcgggcaatggtcttttgcgtgctcagatggctctggcggatcagctgcatggtgatggtgcttgcgccctgggcatagcttccctcgcgcagattggccgccagcgcgccaaacaggcgcacgaagtcaatgccatgatggttgtagaatctcaggtcctctgccgccagaaacacctgccgcgtcaggaccggtatgcgctccagcgggatgaccacacggttttccgcgccctgaatcttggtgatcagttcgcccgcattatcatacatccgccccgtctgcggcgcggcggtgatcttgcttatgtccagcgtctgccagttaggtacgtcaaaggcaaagtaggccgccaccagcccgatgacacccaggcttgccagcacagccagcgccgtgcgcaagcggtggcgtttgcgccgcccgtccttttgccgcctccgccgggcacggcggcccgcccgcccggatgactccgcttcctctccgtccttcgtggcctcgccttcgtcggccttcacatctccgttttccatatcctccgccacggtttccgatgcggacaaattgctttcgtcgttcagggcatcttccggaggcatatcctccacccgccgcaaatcctcctccggaaattcgttttccggaggaaggctgtcattttcctcctcgccgccatccggatcttctgcgtcttccggcatggttgtgacaccttccatacccgaatcgttctcggaaggcaaactgccgtcccggagatgattctccggggcctcactgtcatcgaggtcttctttccgtggagcctccggcgcggatgtgccgtcttcgccgcccgaatcactttcgggtggcaaattgtcctccctatgcgaatcgtcctgcgcaggtacgccgcccgccaatgcccggctgtccccgctgcgcgcggcatcctccgccagggcggcctcacgcgcggccggagagtcggcgttttccaccctgtcaaggccctccgggcgcggtgcctcgccgcctgtccgcacgtcgggccgcctggcagcgttcttgcgcttggctttcttcatccaaatccccccaaaccttccgcgccgcattttctcgcgggccatacgtgcttactatgtgcactttcaagcctgaaaaaaccgtggaaaccccaacaataactaccatttacacatacacccgcgcccgtgtatactcattttgaaacaggcacggaggtgttttgaatgggttcctttcagccgggctacgcccttctcctgggcgccatgattgccgtgctggccctgtaccggtttcgacggcgccagcgcgaacccgccggacgcggcgcgcccttccggccatcgcctgcgcccagcgcccgattttcggatgtggccgccaacgacgaggccatggaaagcctgcgtgacgtgctgcattttattcgttcgcccgaaacctacagccgtttcggagcgcgggtgccgcacggtgtgatgctctatggtgcacccggcacaggcaagacgctcatggcgcgggccctggcgggcgaggcgggcgtgccgtttttcgcggtcaacggtgcggactttgtggagatgtacgtgggcgtgggcgcaagccgtgtgcgcgcactgttccaggcggcgcgcaaggccggacgcgcggtcatattctttgatgagatcgacgccatcggcaaaaagcgtgacaaccgcagcgacgagcgtgagcagacccttaacgcccttttgtccgagatgagcggctttggcgagtgcgacggcgtggtggtcgtggccgcgaccaaccgtctggacacactggacgaggcgcttttgcgcgccggacgcttcgaccggcagattgaggtaccgctgccgggtctggccgagcgcctccgcatccttcaggtgcatgcgcgcggcaagccgctggcgcaggatgtgtcactggaggcgctggcgcgggatacggcattgttttccggcgcaaagctggagtgtctgctcaacgaggccgccattctggccgccaagcgagacgctcagtccattgaatccgcagatgtgcaacatgcgctggacactttgctctttggtatggagcgtcccggagccagccgtttggcacacgagcgcgaggtaaccgccgcccatgaggcaggccacgccatcctcaccgccgtgctcttaccgcagagcgaaatccgcaaggtatccatcatccccacgggacgtggcgcggcgggctacagcatggccgtcccgcaggaaaagctgttccacgaaaagcgtgaattgatgcatcacatcgctgtggcactggccggacgagaggccgaggccctgctcctgggtccggagcgcgtaagcactggcgcgtccaacgacatcgaaaaggctgcgctcatcgcccagcgcatggtgtgcgaatggggcatgctgcccctgagcgacgaggtctgcctcttcagccagcagcagaaggaccaggcagcccagcagtggctttcgcaggggcggctgctggccgctggtacgctgcgcgctcatcaggccgcatgggagaggctcacgcgccttctgatggaacgcgaaagcgtggacggcgaagaggtagcacgctgtctggaagcatagagaaagcgtgaagcgggccggttttccctcctggtgggagaaagccggcccgcctttacattgccgccaaaatccgctataatgaccataaacgcgtctatcttgatcgtacggaaggagcacgcccatgaaaggcatcattttggcgggcggcgcaggcacgcgcctgtatcccctcaccatggttaccagcaagcagcttttgcccgtatatgacaagcccatgatctactacccgctgtccacgctcatgctggccggcatccgcgatattctgattatctccaccccggtggataccccccgctttgaggctctcctgggcgatgggagtcaattcggcctgtcgctgtcctatgcggtacagccctcacccgacgggctggcccaggcgtttctgatcggcgaggacttcatcgccggtgagccgtgcgccatgatcctgggcgacaacatcttctacggcaacggtttttccggcatgctgcgcgaggccgtgaccaacgccagaaacggcctggccaccatcttcggctactatgtcaacgaccccgaacgcttcggcatcgtggagtttgacaagcacggccgcgtgctgtccgtggaggaaaagcccgcgcatcccaagagcaattactgcatcaccgggctgtatttctatgacggacgggtgacggagtttgccaggcgtgtcaagcccagtgcccgtggggagctggaaatcaccagccttaacgacctgtatctcaaggatggttccctgcgcgccaaggtgatgggccgcggctttgcctggctggataccggcaccatggacagcctgatggatgcggccaactttgtgcagctcatcgaaaaacgtcagagcatcaaaattgccgcgctggaggaaatcgcctacaaccgcggatggattgaccgtgacacactgttgcaaagtgccgggcgctacggcaaatccccctacggcgagcatctcaagcgcgtggccgagggccgcattctctacgacagcaataccaccgattaaaggagcgaagcgtcatgaacatcatcgttaccggcggagcaggctttatcggctccaactttattttctacctgctcggacatcacccggaggaccgtgtcatctgtctggacaagctgacctatgccggcaatctggaaacccttgctcccgtcatggacgatccgcgctttcgcttcgttcgcgcggatatcgccgatgcggaggcggtcgaccgtctctttgaggaggaaaagccggacatcgtggtcaactttgccgctgaaagccacgtggaccgctccatcaccgacccctgcatctttgtgcgcaccaatgtgatgggcacgcaggtgctgatggaaagttgccgcaaatacggtgtgcggcgcttccaccaggtatccaccgacgaggtgtacggcgatctgcctctggatcggccggacctgtttttcaccgaggaaacgccgctgcatacttcctcgccctattcggccagcaaggccggggctgatctgctggtgctggcttatgcccgttcgtttggcctgccggtaagcatcacccgctgctccaacaactatggcccttatcacttccccgaaaagctgatccccctgatgatctcccgcgccctggcggaccagtccctgcccgtctacggcaagggggaaaacgtgcgcgactggctctacgtggaggaccactgtgccgccatcgacctggtgatgcggctgggccgtgagggtgagatctacaacgtgggcggtcacaacgaacgggccaatatcgacgtggtgcgcgccattctacatgagctgaaaaagcccgaaagcctcatcacctatgtgaccgaccgtcccggccacgaccgtcgctatgccatcgaccccaccaagattcacaacgagctgggctggctgccccagaccacctttgaagacggcatccgccgcaccatccgctggtatctggacaaccgtccctggtgggagcacattctggcaggagagtatcaggactattatgaaaagatgtatgcgaatcgttgagccgcaggccttgcgtcgaatcaaataaacgggaatttctattgacaaattgaaatacccgtgttatagttaatgtcgctgtgacggataagttgttcgtcggagtgacaatgggattatagctcagttggttagagcgccacgttgacatcgtggaggtcataggttcgagccctactaatcccaccattgtaaaagcgcttaatccggaagggattgagcgtttttcttatgttatggaaaagcatcttcaatacaacacctgctctttggtcatctgcctgatccatgcgggattttatcaacctttatggcattcaaggtgcgttcactcaacctgatctatccgttttatcaagaaataataggcataaaaaaagcgccggttacccgccattgcataaaacgccggagacggactgatcgaatcttcctttgtatgagtcaaggtagaacttgtcttttctgctgtgaaaagtcagtcgcgataccgaaaaacacgataccgaggtcagcgaaaacagatcgcaaaattgaatatcatgttcgcatcggcgaatctgattctggctgacaggccctgcctggcagcttaaatcagtgcgccttctgcgagcaaggtgagctcaaaccctcctgctgattacagttcgtcagcaggacggccttttttatcatgttgtgcggtgttgcctaaaatttttgaatgtaatatttcagtcagagccaggaaatgaggcggaacgatgctgacaaaagaagaaatgccggcttgccctgtggccaccaccgtacagctgatcggaagcaagtggaaactcccgattatccgcaatctgatgcagcgtccctggcgctttaataaactgcgccgggatttggagggcattagccaaaaggtgctcacagacagcctccgctcaatggaagaggatggtatccttacccgcactgtctatccggaggtaccgccccgtgtggaatacgccctgagcggtctgggacaatccctgcgcccgatcattgaagcaatggccgagtggggccaaaactataaagaccggtttcaagtaagaaagacggacagaaacgctttgctgaggagccctggagggccgcaggtcctcatccaccgtcgtcgcaggggacactgtcgcgcagagcccatgtttgcttggggctgcggatcgcttggtgctttcgagccaggaatatacccgccaaggaaagggtggcacagtggggagttttcggcaggttgaggcgttgatccgcaggcgtggaatgacaagcagcctcccgtaagtcctgtgtctgtacggcttcgggaggttttctgctgtccacggcttgaatcctggaagtgccaacgcggcgtaagcaagcagcgcttctcccaaggcctgacctcagcctccttctgttgaaacaatcaagtgccggcagcaggcttctgtgctcctgctgccggcactgctgtcatgtttcttcctctccatgtccggcacaacggacctgatctgcggcgcttctctccggcgttttgcgctgcaaaagcacctgccctgccatgtggggttccggaggaaggagccctccctaccgttccagctccaccaccagatgttcgatggcggtatgacggtgcatatagatcacgtgaagccgcccgtccggacccttgcacatggcgggctggcacttgttgcccggtgcgggggccaggtcgagaaggttgtgccaggtgcggccctcgtcatgggagcaggcgagggtcagggggctgcgctcacgccagtcggccacgggtgtgttgttgtaggccatgaggatggtgtcgtcatcccagctgagcacatcgatcttggattcgttgttgaggatggtggtgggttcgggggcggtccaggtaacgccgccgtcgcggctttccgccgtgtaggacaccagcgagcgcacgccgtcgccccagcccgtcgcacctggacaggtgcgcgtgaacatgcggatgaccccgccgggccgcaggcacagcgcgggctcgcggatgaggttgccgtctgcggcggagagcagcgcccccttttcccatgtttcgccgtcgtcatgggagaggtagacgcgcaccgcgccgaagtagcggtccttgatctcgctggaggtggaggcaaagacgatggtgccgtccggcaggagcacgctgtcattggaggcgtggccactctggatgttcgcgggccgcgcgggcagccaggtgcgtccgccgtcggtggtcttgcgcgtccacagctcgtcgcggccgttgcaccaggtggtgaagttgacctccgtatccagaaacttggcgtagagcaggatgatctcgcccttgcggttctggatgaagatggggtcgtggcagcagtagcggatgtcgcagcccactgcgtcgggattggaccacgcctccgcgcccggctccagcaccgagacccagtccttggcatcgcgccccatggggtcaccattccactgcagaaagccaccgttccacacggccagcaggtttccgttgggggccagcgtcaggctgggcatatggtagcactggcgctcgtcaaaccattccaccacccatttgcggtccacgatcgtcgctttcatcgtctttcagctcccttgcgtgtcgtcgaagagaatcagggccgtttccaggctgcccacacccagccccagcgccgcgccgcccttggcgggccggggcgcgagcatgtgctcccgcgcgtcctccgaccggaggacgcggacgcctccgcccggcaggcgggagagcaccacatcctccgccgggtcggagctggcgttgatcaggtagagcgccgtcgtatcaccgtttcggaagcagtacggcgccagataggccaggccgcgcaccatgggcacgtcaaagcctgccgcgtccagcacgtcctgcagaatttcctgccgcacgcggccaagcagcatgggcggcacccccatgccgaaatgaccgaaaggatagatcatcacccgtccgtccaccaccgtctgcccgtgcgcggcgcggcggcggaaggagtcgtaaaatgcggtatacctctccacacgcgtgccgggcaggtagcgcacgtccagcacgtccgagcagaagatcatggccgaggcgcgcgcgccggtccgtccggcgtaaacgtgcccttcctctgcctgctcgtaggcgcaggccccgctgtcctgcgtgagccagcgcgcgctttccacccccgccagatggccaagccccatgtccaatagcgtccacagcgcgtctccgtccagaatgacgaagttgcgcgcaaacaggcggttcagggtttccgcgctccagttgcgcagcacctgacccgaggcggccaccacctgcccgctgagatccgggctcaggcagtaggcggcgggaatgcccagggcgggcagcagctgggcaaagaacgtctcgcggggatagagctcctccatggaagcgccgcgcgtggtgtgcagggtataggacgagtccgggctgcacagcacatgcacgccccgccgttcgcccgcgaacacgcccagggcggtcaggcggttaagaaacggcttcacgtcccggagcatgtcctgatacccgtcctcccagacgatgccgttgccgttgaggtcgtacaggtcgatggtgatgccggcgaggttcagcacaagggcgctgagcagctggaagcgggtaaagcgccgggatttggaaaacagcgaataggggaagttctccagctccgggtacacctcggtctcccggggcagaaaggcgcggttgagcagggccacgcggttgaggcccgccagatacgcgccgggggcctgctcctgatagcccggcaggtggatgcggtccacgggcggcaggcctgccgccagcgcgcgaagcagcgcatgccagtcgcggccctcggcggcatgaacgtgcggcacggagctcatcagccccaccttggtcgtggccgacgcctgccgcacggcctgcccgatggcgcgggcggcggagagcatggtttcgcggctcacatccagccagatcttgcggtaggggtggggcggcccgggccggagcacgccccggagaaattcctcgcgggtgagcgccttgccggcgcgctcgctgtagaggcgcatgtgctcctcacagaagcatccgccccagaccagcggcgcgtggttgtgcaggcggaagtcgtcctccacccacaggatggagggctccagctgcgcatagcgcgcataaaggcctgcgatgtgcctttgccacttctcgcacagggggcagacgcacagcgccgcctcgttaccctccacatccaccatggggcggaagtccagcgcggggtccatgcgcttgccaaggtccgcgtgcatcacgctgtgccagtggttgatcgaaaaggtgacgcccatgcccgaaagcaggtcgcgcacgcgctccatcaggcgcaggtagacatcctgctcctcccgggtcatgtgcccggtgttgagctcctgcacgttggcaaacacggccacatcgtcgatgcgcgcctcccgaacgtagcgcttcagcgcttgcagctcggcctcgtcgttaaagccgggatcacagcagaagcggaagatatagcggaacgggtcgctcacgggcgttcctcctgtcgcgtcacttcaaagccgtagaaggacagcatgggcagccgcatgcagtcgcagggaatggcgaggccggggttcatgcgccacgcgccgtgcagccgtacccggcccacgagcgggcgtgggaaggtgagtgtcaggcagtccgtgccggtaacataggccgagggatgcaccagtcccccatcgtcctccgcgtcgaagggcagttcgcaaggcggcacctcgtaggggttgagccagttgcggatgcggcggaaggtcagtaaaacggtatccggcgcgatgagccgcgcctcttccggctccggggcctcccagtcgatggcccgcccatagcacacggcgagcgcagcgcgggcgcaccgctcgcccaccaccaggttggacgcggcggcattgtggatgaaatcatagagggccaggtcggcggagggcaccaccgccaccccgggcagcgcgtagcgcgcctgccgctgggcctcgcgcaccatgccccactggcggtccagcgtctcggaaggaccctccacacagcggttgatctgcacggtgaggaaaggcaggttgggccgtcccagcgcttcgcgcgtatggcgcacgaacgtgccaaagcgcgcaaggtagctctccgcgctgttttcatacccctcggcctcgccctgcacccacaggaccgccctgggaaccagcccgtccagcatctccagcatgttgcgcagcagcgcgccgttttcctccgggttccaccagcgcagcggcgcgccgccgtaggcgcagggcaccagcccgatggggtagcccagctcgcgtttgaggcgcttggcaaagtgcagccacgggctgtggccggggttgtggttttcatagtgccccacgtacaccgcgcccgtagtctcgcccagcggatgggaggccaggtcccagcgcccgctggggcgcagcacgctcacccccggctcaggatcgtccgccacggggtccttggcccggccggcggcattgctctgcccggcgatgacgaacacatcgcccacgcccacgtgatgcaccatgtccccgcgggtgcaggaaagcccgtcccagccctcgtaggtcatggtggtctcaaggcggtacaggccgcccgccggcacggcggggaaggtgacgcgccaggtcccctcggaggggatctcgcactcggtccagggaatcacggattcgccggtgctctccagcgccacgcgcgccttgaccgtcgcctttgcgggcggcacttcggaaaaggccagcggcagttcctgagaaaggcgaaccagatgataggttccctccaggcggatgggcgcggtaccctccggcccctgctgaaagatttgccacggggacgcgccccgctcgatgatgacgccagcgttcatagacaacgctcctttatgagccgcatgcgcgggattgacgggcggcggggcggtccgtctgccccaccccacgggagaagaaacacagcgccatcccagccgccgagatggccagccacgcggtgagcaccgccgtccagcctccgttttcgctgagcgccccaaagcccgtgctggccagcgcgctgcccacgtaggcggaggcgttgagcaggccggtgaccgtcgccatccggcccatggcgtggaagcgcagcggcagaaggctgagcagcatggtgctcgcgccggtcatgcaggtggtgctcacgatcagcatcaggatggtgacggccacgcttccccggcccgctgccgtccaaagcgcgatgcccgcgccgcagatggcgaaggccgccgcggccgtggccgcctcgctccagcgcaggcggtttctaagccagttgaaggcatacacgccgcccaggttgaccggcggcacaatcatggtcagggcgatggaggtggcggcggggaagccgaagctctcctgcaggtaggagggtgcccaggtgatgatgccgtcgcgcagcaggccgtacatcaccgaggctgccacgaccggcaggaggcacacaagcacgcgccacggccccggcgccctttcgggagcggcgtcctccggctgcccgttcatgtcggggatgccgcttttctcgctgatgcgctccagcgcgcgcatgccgaagatccacacggccccgcccgcggccatggccgcgccgcccagccagaacgacagccgccacccccacggcgaggccacgcacaatacgcacatcaggtacgcgcccagcgtgccggcgggggtggtggtggacaggttgaggcaggtgcgggcgcactgcgcgtcctgcgtcaggtcggccacggccttgatcatgggcgtccacaccaacgactgcagcaggccgttgacggcccacaaaacgaccatctgcccggctgtgccgctcagcgccatacccaggttgaccgccgcgccgcccagcagccccacggccaccaggagcctggggcgcaggcggtcggccaggaggccgctgaagagctgcgcgcccccgtagcacacgaagaaggcgctggacacccggcccagctccagcttggagagattttcggcctcgttgatggcggcgatgcaggcggtgaagttgagccggcccagataagtggaaaagtagctcagccagcagacggcgaagagcaaatagatgctgtgatgcgtatagagcttcttcatgcgcattcatcccctgcgggagacgtcggaggggtcagagaaagtacgggttcatccacgccttgcggcctgcgccgtcggtgagctgcacccagaggaaacgcgcgttttcgggcaccgcgtccatggggaattcaacatgggtcaggtcgttttggggcgaaaaggcccggtggatgggattgatgccctgccccatcacgtgaatgcggcgaaccggcgagcagtccagatggaacacgccgtcctcaatgaagcagccgtggatctccgggccggtggaggcgtagaaggccatgcggtcatacgcctcgatgatggccggatagctcagctccggggccttgaacaccacccagccgccgcaggaatcgtcctcgcagccgcggccctcgtggttgtcgtcggcggcgatcatgcggatgggccgcttgagcatgcgaagcgcgaggatgcactcgttctggctgttgccgttgttgttttccagctcggcgctgtggttgtagatctccatgccgtcgaagtcgccgtaggtgaggaactcgtccggcccctcggccgaccaggtggggtggttgtagttgacgatgtagccgccccggtggaactcgtccaccttggcgcggatggcctcgcccgtgtactgctccgcgcggtagatgggcacggggcgggcggggtcgcgcaggatggcgcagagatggcaggtctggttgaagtcgtgctttttgccgtagaggaagctgtcggtatccacctcgatgcccgtgagcgcgagaaagcgctcatcggtgaggtcgctgtgatccacgagcacgttgtggtcggtgaaggccaccacgctgtagccgttggccaggtagtgcgccttgacctcttcgggggtcagccgcccgtcggagagggtggtgtggcagtgcaggttggccttgtagctgccataggaagcaggcagtaactcaattctggacatgacggcgtttctccttcccaaatgccgcgaagaacgccgcccccgccattcgggcagggggcggcgcctgtgagtctgccgtccggaggacggcggcgcaaaatcagccgaagttctctctcgcttcgcggatggcctcgttgacggcctcctccagcgcggggccgccagcggcctcaaactcggcgcggtactgctcccagccggtctccacatcgagctggccgcccagcatctgggacagatagcggttggtaatttcaaacagggtggtctgcaccttgccccactcggcgtccagcgcggccaggccgtagtaggagggcagctgcacgtagacgttgtccacgaaggcctgcacggtgtcgatggcgtactggtagcactcgcgcgcctcgccctcggcccagtcaagggtgttgtcatagggggtggtcacggcatcccaccagtcgttgttgaccaggtccagcttcatctcgctggcgcagaacaggtaggagaaccacatgtagcggcagcggtcggggttgggatagccgtaggacttgttgatgttgacgaactcgtcgaggttgtagaccacggtatcgccgtccatggtgtaggtcaggccctcgatgccgcggaagagcaggttctggccgtcttcgctggccaggaactccaccagatccagcacgcggtcgggataggcgcagctggtgggaatgaagtagtgagcgcccacgtaggagggcacgtcatagacacgcatccagttgccgtcgttgtcggtgagggcggtgcccagggtgagatcggccagggagccgtcgtcgggatgggccttcatccaggagtcatagagcttcttgaactgggtgtaatagccgtagctgtagccgtaggaggccaaggttccgttgttgaaggcggcatagccgtcgtcctcgtccaccagggtgcccacgccgttgtggatgccgtcgtttgcatacatctcggccaggatcttcatgacctccttgctctcgtcggagacggtcatgagcgtccagtgctcctcgtcggtgccgatcttgctctcgtcatcgggcacaaagccggtccacatccagtcgtaggtggcgggggtgcgaaggctcgttcccagaggcttggcgatggtgccgtcgatctcggcccagttggtcagcttggcgttgtagggccaccagccggagtagccggcctccacggccttctgggtgaacgccacgaactcgtccacggtcgcgggcaccttgccctcgttgacctcctcgaggatggcggtgttgtaggccggcacgcccgcaaaggagggataggcgcgggctgagaacgaatagatggcgtaggccttattctcgtcgccggtgtacatcttgttgtacatcttgtactcgtcggtgttgatgatcttgtagaggatgggatagcgctccggctcggcgttgatgatggcggcgatgtcatacaccgcttcctcctcggcgaactggcggatcttggtggcctcgccccaggtggggaagaggtccggcgccatgcccacggccagctcggtggagagcctgtcgtcatatccctcgatgccggtgtcgtattccaaagtgatgttcacggcctgctcgatggccttcttgatgggatcgttggccatgccttcctggtcgtccacgctgttggcatactgcgaaaaacggatgttcaccatctcacgggcggcatttgcctccgggccggtggcctcgccggatgcaaagcccggcaccgcgagaaccagcatcgtcaggcacatggccagcgcaagcgcttttttcagggtagttgtcatggtttctactcctcctttttgatgggttgatgggaatatgtgtgtcaagccatggcaggcccgtacatccttactccttgacggcgccgatgagcacgcccttggcgaagtgcttctgcaggaaggggtacacgcacatgatgggcagcatggcgcagatgatggtcgccatgcgcagcgccatgggcggcggcagctgtgcgccgatatccaccgcgccggtgcgcatctgcgacatcatggccgaatcggtgagcacccggcgcagcacccaggcaaagggctgcaaagtgggcttggtggcgatgtacatcatgtagctgtagtagtcgttccagaagcccacggcgataaacaggctgaccgccgccagcatgggcttggacaggggcagaatcacctgaaagaacacgcgcacgtcgttgcagccgtcgatgcgggcggcgtcttccagctcgcggggcacggagtaggaaaagtagttgcgcatgatgatgaagtacgtgatgctcagcccatagggcagcaccatcacccaataggtgcggatgagcttcatctccatgtagagcatgtaggtggggatcaggccgccggc

SEQ ID NO: 1250 - DNA, 6613 bp, Unknown
  16S sequences of unknown bacteria
ccagaaacagttcccgcagggcaagcttgtgcgtgccatccgcggttccgtctatgatgtagcggtcgatctccgctccgacagcaagaccttcggaaaatggtacggcatcgagctgaccgaggaaaaccataaacagttctacatcccgcagggctttgcacacggctttctcgtgctcagcgacattgcagaattttgctacaagtgcacggatttctatcatccgggtgatgaaggcggcatggcatggaatgatccggagatcggtatcacctggcctcagcttgcaggcacctaccagggcagcgcttccgctgaaggctacacgctctctgacggcacaccgctgaatttaagtgacaaggatcaaaaatgggtcggactgaaggataccttccatttctaatttttctttataaccagctatcagaacatttgcattgactttttccgatatctgcgcgatactaaaaaatgtttggaaaagccgaaaggctgtaatactgtgacatgaggagaaaacactatggaaaaaattgctagttttactgtgaatcatcttacactccgtccgggcgtttacgtatcaagaaaagatcatgtaggtgctgaggttgtgacgactttcgatctgcgtatgaccgctccgaatctggagccggtactcaataccgctgaagttcactccattgagcatcttggcgctacttatctccgcaatcacccggagtacaaagataagaccatctactttggaccgatgggatgccgcactggattctatctgatccttgcaggtgatcttgagtcaaaggacatcgtagatctgctcgtttccatgttccgcttcatccgcgactatgagggcgagatcccgggagcgtctccaagagactgcggtaattaccttgatctgaacctttccatggctcattactgggcaaagcgctatctggaggttctggaaaatattaccgaagatcgtctggtatatcacgaataaatacaatatcctatcgcagattttctttgtaatgcaaaaagcaggagtcgatattttcagtcaatatcactcctgcttttttgcatacccttccggatttcgtcagatctgtacgtttccttttatcaggtcgcaatctgcctcgctcgttccgatgtacagctcatttctattttaataccttccccaaaaagcaggatattttacgcagatcctgctgcttccttctatatttctgacagaaccgtttctttaccagtccttccagaccttccgcatgcgattatatgcttcgtataacacacttctcggagacgccacattcagtcgaatacatcctcttccggcttccccgaatacgcttcccatataaacagatgcatttgcctttttcaggaaccactcttccaattgctgttccgttaatccggtatcctgataatctatccagagcaggtacgttccctctcgcggatagatatgcagctccggaaaatgctctgcaaaaaacgctcttgtgaatgcttcattctcatctatgtattttttgactgcctcgtaccagtcatcacattttgtgtaggccgtttctaccgcagtcacagcaaaaatattcggattgtgcattccaatacgatcaatcacggctgcaatcctgtttctcagatcttcattcggaataatcatataagagacaatcactcccggaatattgaaggtcttcgtaggtgcactcgccacaaccagccgctcattcatctcttctgaaaccgacagcatcgtatgatgctttactcccgttttcgttaaatcaccgtgaatttcatccgtaaacagaatcagatcatgcttcttacaaaactctgccgtctgctgcatttcttccatggaccacgcacgccccgtcggattatgtggattgcacataatcatcattctggtgcggtgaactacccattgtctaaagccaatgggattgcggtagccttatttcaaaaatttactatcctcattatatcaataaaatatttttcagtcaatagtttatagttcattatttatattattacgaaatactttttttcagttaaaaaattgtccataaactgcattcatccttgcatattcttattttcttgcttataataaacactgtaagtgttctggcatggcaatttacaatgaaataaatttcatccaacacgcacatctaatgctgttgggattctcacaactatgataccccccggattgttccatgtgctgcactccctggtatcatctaaatcagtcagcatcataaaagaaaagaggtagcaagcttatggacaattccttcttaaaactcacagaaacagaccggaatattctcaattccttctcactcatgctggacggactcggcgcataccttggaaacggatatgaattagtactgcacagtctggaaagcctagatcactccgtcataaagatcatcaacggacattataccggtcgaagcgatggctctcccatcacggatcttgccctgaaaatgctcgggcagcttgaacaggatccttctcgcaccgtttctccatactttaataaaaacaattcccattctttacttcgctcctgcaccattccaatcacaggtgagcacgggcggatcatcggcttgctttgcgtgaattttcatatggaaatgccactttccgaatttctgcaggagctgcttccgtcacaggatttttcttctgcatctcaagcttcttccgaaacattttcagacaatatcgacgacctgatactttcttcgcttgtcaaaacaaaagaagctgtgttccatgatcctaccatttcttcctcaaacaaaaacaaggaaatcattctccgtttgtatcagcagggaattttccagctgaaggatgccgtgatcaccgtttccaagcagctgaacatttccaaaaataccgtttatatgcaccttcggaatttcaagctttcttctccgacggaatagacaccatgacaaaaggggatccgcttaatgatttatatcacaaagcggatccccttttgatatttcgaagtttatcaggcagactcagcctatcttcttcccttcccctccctgccgcgcactccggtacttggtcggtgacattcccgtgtgttttttaaaggcgagcgaaaaataatttatatctgtatatcccacggtctgcgcgatctctccgatcttcatcgtcgtcgcctcgagcagcgccttcgctttttcgatccgcttacggacaatgtattcgttgcagccctctccggtgatgcgtttgaacagccgtgagagataatttggcgttacgtacagctccgctgccagccctgccaccgagagatcctcacctaagcgctcccggatctgcgcctttgccttgcgaatcagctcatggtcatttccgctgcgcatcaaaaaaagccgctccaaaaatacttccgtgacctcgcaggcggtctcccgtgaggttccgtttaatgacttcatcagcgcattcaaactctcctccgaacggttaccactgtcatttaaacaggaaaatgccatcgtcgctgccagctcaaagcagcactgctgtgtatagcgtgcagaaagattgtaagattctaccgccatccggaagcgtccgaaaatatgaagtgcctgctctgcatccgccacgcttcctgccagtgcatttttaaattcccgaaatacatcctgaaaaatatctgcccgcttccgatcaacccgactgcggatgatcatatcctgaaactcctttcgttcgttattcaggctattctgcgcatcgttccatgagatatggagctgctcgacaccgcttacgacactgccaatcaccagccgcacacggatcgcatattcctcctgaagaatttccgccagctcagaagccagctcttcggcatctccattttcctcctgcagaaaaaaggcaagcagaatccgtccactgtgatccaaaaatgtgatgccaagatgccgcgcatcaagcatatccatacagaggttctgaatattccgcatacgaaatatcctgccttcttcgtcctcctccgatacacgatccggcatcaccatccccgcctgcattttctgatgtgggtcagtcttccattccgcaaacagctgcaatacccggctgctatccgccttcccgttaaaaatttcttccatcacttcattgagccggtattgctgacgcacaccttccgcacggctcggtgtgacagcgtcccttcgttcctgcaaaagtgccagctgcgtccggatgcttcgctccagctcctcttcatcgaccggcttcagtaaaaagtcatgcacactcagcttcaaagcctgctgtgcgtaatcaaagcggtcatatcccgtcaggacaataacccgcatatccgtctcctgctcccgaatctttccgaccagatccaaacctgtcatctccgacatactgatatctgtgatcagaaggtcaatcggatgcgcttttaaaagctccagcgcctcccctgccgagccagccacaaaaacttcatccacctgcaggcttccccacggtatcgcccgctgaataccaagccgtatcatcctctcatcatctaccaccagaaccttatacatcgtttcctccctcttttggaatccggatctctgccgtcagtccgcatttttcaccggcataaaatttcagtccgtagcccgctccgaacagaagctccagccgtttatgcacattgtggatgccatagccacgcgtgcgctcaaatgtaccgatcgtgcggtttaattcccgaattgcctcatcggtcatcccttctccgtcgtcctgaacctgcacaagcagatcatcacccgctgcccttgcccgaatcactaccgttcccttacgcccttccttcacccggataccatggtaaatggaattttccacaagcggctgcagcgtcagcttcggcagctgtacacccaaaaactcctccggcacatccatctgcagctcaatgatattatcataccgcatattctgaataatcagatagctctttacatgtgccagctcggtctccaacgcaataatatccctgccgccgctcaagcagatccggtagtactgtgcgagcgcttttaccattgcagagatattctggctgccatctataactgcctgccagtgaatgcactctaacgtattataaagaaaatgcggctgaatctgtgactgcagtgcatttaattccatctgcataatctgctgctgctcttcttttacctgtcccatcagacgatcaatctcatccatcatctgattgaagccctctgccagcttccggctgtcactgtctgtgtcgatcgtgtgaatgcgcgcgccaagatttccctctgatacgtcattcatctttgaaataaccttataaaacggccgataaagacgaccagacatcttttttgtaactacaagcaccccgactgttactatcagcatcgcccccaacatcagaagcgacatctggatcaccgtctcatacagttcaaatcccggaatctcatgcaccagataataattccagccggtcaccttccggtaagttacgagcgtcccatgattccagaaccgaccgctctcgcccgtaatccgcccttttgtattgagctgctcaccgatccggtcttcctgctttgttgatacaatcagaccacgctgatccgtgagatacatacttgagctcgcaaggctcgtctttttctgaatcctttcaagaatactgtcatttaaattgatgacaagcacaccattgctactcatcatctgtgtcagggaatacactgggaaatataaagtcatcgtatatgtcccatagcggttataacagtcagaaaagctcatacgaatgctgccggaagcattcgccggcaggctttgtgcataatcctttgcaaaactctcttcaaaattacccgcctgtgcggaaatatttccgctgtagacgtaggtttgcaattggtcatttgtcacagctgcaaaattcgagttactctgaatccgaagcacatcaagcaaagaggtatatgccggtcccatcacctgatatacctgtgtcctctccttcgcctcacaatatttctggatactgtcatccaacacaagcgagatcagcagtgctttgtactggttcaggttatccgcacagtcctcggccatcagctccaggtgttcccgtgcatattcattattccgctttgacagggtataaacaaacatcgccgcagacagactgatagcaagaacaatcaggatcaaaatagcagttcccatcacaaaattcagctttttttcaaaattccacttcttttgccacttttctttgaagttcacgcgtcttcctccctgcgcctttctctgtccggcctgttccgtttgacagccctgtatattccgtaatctatcttactcttttcccggcagtccctcaactataattttttccattgtggaagtcagtaaaaaggaacagcccgtttcccttaattaaagatattgttgggtaaaaaagaaaggtcagtcgatt

SEQ ID NO: 1251 - DNA, 8318 bp, Unknown
  16S sequences of unknown bacteria
gttggtttatggcaagctggaaacgcaggcggaaaagttcgtctttaaggtttgcaagctcgttgttgagctcgtcaacgcttttttctctcagttcacttgccttcacagttgctcaccaccgttctctttttttacgaatttgcatttgatgggcagcttgtgggaagcaagtctcagagcctctctggcctgtgcttcgtcgatgccgccgatttcaaacattactctgccgggcttgaccaccgccacccagtattcgggcgaacctttaccggaacccattcgggtttcggccggcttttcggtgatgggcttatccgggaaaattttgatccaaacctgacctgcacgcttggtgtaacgggtcatggcgatacgggcagcctcaatctgattggcggttacccatgcaggctcgagagcctgaagtccgaaatcaccgtaggttacggtgttgccgcgcatggccttaccggtgaggcgaccacgatggactctgcggtattttactcgcttgggcattaacattagcggttgcctccttccttagcgggctttgcgggacggcgattgtcgtggaggacttcgccggaatagatccagacctttacgccgatgcggccgtaggtggtctttgcctcttcgaagccgtagtcgatgtcggcacggagagtctgaagaggaatggttccctcgtgataagattccttacgggcgatttcggcaccgcctacgcggccggaaatctgaattttgataccctttgcgccgaacttcatggcacggccgatagccattttcatggctctgcggaaggaagctctcttttcgagctgtgccgcgatgctggcggcgacgagctgggcgttcaggtcggggttcttgacctcaacaatgttgatgacgaccggacggccgagcttcttctgacaaacttctttgagcttgtcgatttctgcgccgccgcggccgataacgataccgggctttgcgcagtggataaagatgcggacgcgctttgcgtctctttcgatttcgatcttcggaacaccggcaggctcaaggagcttcagaaggtacttacgaagattgtagtcctcaacgagggtatcgccgaaatccttgtccttggcgaaccaacgggagtcccagtttttgatgacgcccacacgcagaccgtggggattaactttctgtcccattctaaattacctccttgtcttattctttctctgccagagccagcgtgatgtggctggttctcttgagtattctgtatgcgcggcccttgtctctcgcctggaaacgcttaagggtggggccggggcagacaaagcactctgccacatacaggtttgcggtattcatttctttaacttcggcattagccattgccgatttcagcagcttttcaaggcattcactcgccgctttgggcgtgtggcggagaatcgccatggccttgtcagcgggctgattgcgaataaggtccagcacgattttcacttttctgggtgaaatacggacgtacttgacggttgcccttgccatattatccatagttttgttctcctttcgccttatttaccggaattggaagtcttggaaccggcgtgacctctgaaggtgcgggtgggagcgaactctccaagcttgtgaccgaccatatcttcggtgacatataccggaacatgcttgcggccgtcgtgaaccgcaaaggtgtgtcctacgaaatccgggaaaatggttgaagcacggctccaggttttgagcactctcttttcaccggcttcgttcattgcctgaactcttttgagcaagacgggctgaacgaaaggcccttttttgatacttctgcccataatattagctcctttcgtccgttacttcgagttgcgacgcttaacaataagcttgtcggaactgttgtgatgcttgcgggtcttgtagccgagggcgggtttaccccaaggggtaagaggtccggaacggccgataggcgccttaccttcaccgccgccgtgggggtggtcgcaggggttcatgaccgagccgcggacggtgggacggaagcccttataacgggtcttaccggctttacctacgtttacgttgacatgatcgacgttgccgacctggccgacggttgccatgcagtttacggggacatatctcatctcgcccgaggggagacggataagggcgtatttgtcgccctctttacccatgagctgagccatgcatccgcctgcgcgggcaagctgagcgcccttgccgggataaagctcgacgttgtggataaaggtaccggtggggatggaggaaaggggaagagcgttgccggtcacgatgtcggcctcggttccgttttcaaccttgtcacccactttaagtccctgaggagcgatgatgtagcgcttttcgccgtcctcatactgaacgagggcgatgtttgcggtacggttggggtcgtactcaagggtgagcacggtggcggttgccgccttgtcacgcttaaagtcgattatacggtattttttgcgatttccgccgccgcgatgacggacggtgatgcggccgtagctgttgcgtccggagtttttcttcatgggctccagcaggctgcgttcgggggctaccttagaaagctcggaataatcaactaccgacattccacggcgacccggtgtggtcggcttgtaatgtttgattgccatttttcttcactctccttcttacatcatgccctcgaagaattcgatattctttgagtcgggtgttaaggtgacaacagcctttttccaggaagaggtgtatccttcgaaacggccgtagcggcgggacttgcctctcatgtggatggtgttgaccttgcttacttcaaccttaaagagctcttcgacggcctttttgatgtcgatcttggtggcgtcgttcgctactttaaaggaaaatttctttgcgtctcttgctgcggccatgctcttttcggtgatgacgggagcaagaatgacttcctgagcggttttactcattatgcgtatacctcctcaagcattttaacggcgtccttaacgatcacgacgctgtcggcgttgacaatgtcataggtcgaaagggtgtttgtgccggcgaccttcacgccctcgatgttgcgggcggatttaacggccttgtcgtcgtttccgtcaagcacgaagagaaccttcttgcctgccttgacattcttaagagtgtcggcaacgaccttggtcttgtaaccctcaagggtgagcgcgtcgagaacgatgaagctctcggttgcaaccttgtcggacagagccgagagaattgcaagacgttttaccttcttgttgatggactggcgataatcgcggggcttgggagcgaaggcgatgccgccgtgggtccactgaacagctctggtcgaaccctgacgggcgcggccggttcctttttgtctccagggctttcttccgccgccggcgacttcggcacgggtgagagctgactgggtgccctgacgctgatttgcgagatatgcaacaacggctctgtgcattgcgtcgacgttgggctcgatgccgaacacggcgtcgttaagctcaagctcgcccacatctttgcctgccatatcaaatacttttaccttaggcatttaaaactctccttcccttatgcttttacgctgtcggtgatcataacgattccgcccttggggccggggatggcgcccttgatggcgatgatgttattctcaacgtcaacttttacgatttcgagattctgaacggttacgcgttcgcagccgagacgtcctgcgcccttggtgcccttaaatacacgggaggggctggagcaagcgccctgggagcctgcgtggcggtgaaccgggccggtaccgtgggattccttaagtctctggaagttccagcgcttgataacgccggcggttcctttacccttgctggtgccggttacgtcgatgctctcgccctcggcgaaaacgtcggccttgatgaggtcgcctacattagcttccacaccgtcgagacggaattcgcggagatactttttgggagcgacgtcattcttcttgaaatgaccggccataggcttgttaacgtggctgaccttgacttcgccgaagccgtactgataagccgcatagccgtcattctctaccgtcttgacctgggtgataacgcagggaccggcctcgacagcagttacgggaacaacattcccgcgttcatcaaaaagctgggtcatgccgagcttttttccgatgattgcttttttcattattttttcctccttgtggttattggtcgatctttcgaccgacatgacctctcgtcaggcgccgtgtgaaatcaattaaagcttaatttcaatctcaacgccggcagggagttcaagactcattaaggattcgaccgttttgttggacgggcggatcacgtcgatcagacgcttgtgggtacgcatctcgaactgctcgcgggagtccttgtatttgtggactgcgcggagaatggtaactacttccttgtgggtgggaaggggaatggggcccgaaacacgggtgccggttctctttgcggtttctacgatcttttcggcggcctgatccaccagctgatgatcgtaacccttaagtctgattctgattttttcttttgctgccattgtaatggtacgcctccttaaattgttcgccccaaagggcattagggtggcgggcgacgctttggcttcgataaatgtaacaccttgccgtgtgttccgtgcccgttcatcgaaaaaccggagcgggccaaaaagcctattccgggattacaaaacgcctttgcaccttgctcaaagctccgccgcacgtatccgccgacggcgctcttgccgccttctcaagtggaaagagagaagactgcggtgccgttaaaaaattaactgtcgcccggttttaaaatcggacatactccgtggaaattccctgcctcaagtgacgagctcgggcagccacctcccacatcaacgcatatctgcacaaatgtgcctaataatactaccacaaagcaagagggattgcaagccctttttttaatttttttcagcttttttgcgggtctgagccgcgtcaaaaaagttttcgacaaattgtggttttcggacgtcgggtatacataatatagtgcccgtccgccgcagtatttttgagagccgcaaattttcgcggttcccttacattataatatatatagccgttcattgcaatgtttttttgccgaaaaaccgacttttttgtcctcttttttaagcttaacgccttcgcccttttccaaagcgggctgtcccgccgccttctcgttttttctcttgtattttcacgaaaaatttagtataatgattttatataaattggcggattgtacatttcggtttccgcaaagccttattcggaggttaatatgggtctcatttccattttatccggcgctttaaccggtaaattcaattatgtaagcgccctcgcttatgttttttcgtcggcggtcatcatttttttggtgctgccctttcacgaattcgcccacgcctttgccgcccacaagcttggcgacgacacggccaaatggcaggggagaatgtcgctcaatcccatgcgacacatcgactggataggcgccgcccttattatggcggtgggcttcggctgggcaaagccggtgccggtcaacgcgagaaactttaaaaatcccaagggcggcatggcggtcgtggctcttgccggccccgtcgcaaaccttattgccgcatttgtttcccttctgctgtgcaattttataattttcctcgcccgctcgggcgtcggaaccggctcgcaggccgcgcttgtcatactcatgtttttgcgctatctctttttgttcacggctcaaatcaacgtctccctcgccgtctttaaccttgttcccattccgccgctcgacggttcccgtctgctcacggcgctgcttcccgaccgaatttactacaaaatcatggcctatgagcagtatataatgctcggccttatccttctgcttgtgaccggcgtgctgacaacgcccctttcctacatcggaaatttcgtgctcagcgggcttaacgccgtggcctcccttcccttcggaggttaaaatggacaagctttcctataaattagagagctttgaggggccgctcgacctgctccttcacctcatagccaaaaacaagctcaacatctatgacataaacatttgcgagcttgtcagccaatacctcgactgtataaacaaaatgaaagagcaggacatggacctttcaagcgactttttggaaatggcgtcgcggcttgtctatataaaatccgtgtcgctgctgccaaaagacaacgagtcggagcagcttaaagacaagctgtcgggcgagctcatcgaataccgcaccgtcaagctgcttgccgccgagcttgcaaaaaataccgacggtttttcgaaattcgtccgccgtcccgatatgcccgaggtggatcaaacctacgtcttgactcacgattcgggagtgctgtcccattggtaccttgcggcggtgggcagagggctgagaaggcttcctccgccgacaacggcctttgagccccttgtcaaaaagccggtcattcccgtgtcggcaaaaatagtctacatcatgcgccgtctttttaacggcgtcaaggtcaaatataaaagcattttcagcgaagtgaaatccaagtccgaggcggtggcgacctttctcgccgtgctcgagcttatcaggggcggaagaatcgccatggacgacgaggataacctgaaaatggcgggaaaggataaataatggagctttcaaaatacattccgaccttagaggcggttctctttgccggcggcgagccggttcccatttcccgtctggcggccgctcttgagctttcggaggaaaaggttgaaaaaacggcggttttgcttgaagaaaagctgagcggaccccaaagcggaatcgagcttctgcggctgggcgacagcctccagcttgccaccaaaaagcagtatgaagagcccgtgcgcacggcctttgagcttcgccgctcaaccccgctttcctcggccgcatttgaggtgcttgccgtcgtggcctataatcagccggttaccaaggcctatatcgagcaggtgagaggcgtcgactgttcgggagtggtttcctccctcgtgctcaaagggcttatcgaggaatgcgggcgactcgaccttcccggccgacccattctttacggaaccaccgatacctttttgcggtgcttcgggcttgaaaatctgtcggctcttccacctcttcccgaggaggagcacccctttgaaaagggaacggccgaaaccgccgagcagccgacccttgaggattttgccgaaaaagccgaaggcggagatttaaatacaacagaaaattctgaaaaaggtgagtaaaatgaaacaggagaaaaccgaaaacagaaaaaacgataacagaacaaatcaatcggccgagcaggcccgctgcggggccgagcgctccaccaaaagcaaggtgggctccattctcgacataaccgtcgacaaaatgcgcgcccttgccgacaccggccttgttgtgggggataaaatcgccgtgaccgacgacatcaccctcattcccgtgtcccgcgtttcctgcggatttgcttcgggaggaagcgaccttcccaccgaaaaatcccccgcaggcgtttccttcggcggagcgggcggcggcggactgaccgtcacgccggtctgctttgtgtgcataaacaagggtgaggtcaaaattttaaaccttgcctcaaccatgcccatgggcgcggccgaacgggcaatcaccatggctcccgagcttatcgaaagcattaaggacgccttttcgaaataatccgcattttaacaaaaggaagatcagacttgaaggttccacagaaaaacatcagaaacttttgcataatcgcccacatcgaccacggcaaatccacccttgccgaccgtatgctcgaaataaccgacacggtggcgctcagggacatggaggatcagctgcttgacagcatggatctcgagcgggagaggggcataaccataaaggctcacgccgtcaccctttactataaggccgacgacggggaaacctatgagctgaatttaatcgacacccccggccacgtggactttaactatgaggtgtcccgttcccttgccgcctgcgaaggggcgcacttt

SEQ ID NO: 1252 - DNA, 10636 bp, Unknown
  16S sequences of unknown bacteria
ttgcgggtcaataagtcatgctttttcatgcaagcatgaaacgcatgaccttttgacccttgtatcatcaatctatattaaaagcaacaggaggcacacacatgttttggggagaaaagccttatcattctctggattatgaaatgaaacagcgttttggtgaaaaagtataccggctctccctaaacggtggcatgacctgtccgaaccgggacggaaccgcaggtaccggcggctgcatcttctgcagcgcaggcggctccggtgattttgcggctccggcggtccttccgatttccgagcagctccgtatgcaaaaagaactgatcgccaaaaagcgtccggtccataaatatatcgcctactttcaggcatacacgaacacctacgctccggtagaatatctggaacgtatctttctggaagccatatccgatccggaagtcgtcgcgctttccattgccacgcgcccggactgccttggcgacgaggtactcgcactgcttcaccgtctgaaccggatcaagccggtctgggtcgagctcggactgcagacgatccacgaagatactgcccgttttatccggcgtggctatccgctctcctgcttttctgctgccgtcacacagctgcgggccatcggcattgaggtcatcgtgcatgtcattctcgggcttccgggagaagaccgtgacgcgatgctgcagacctgcaattatctgaacacctgtgatattcagggcatcaagctgcagctgcttcacattctgaagcatacggatctcgccacctattatactgagaccggcttccctgtcatgacacaggaagcgtacattactcttctgattgactgcatggagcagctctcaccaaagatcgtcatccatcgcctgaccggcgacggaccgggcgcgcttttgattgccccgctctggagtcagtccaaacgtgccgtactaaacagtctgcatgctgagctgaagcgtcgcggcacctggcagggacgcctttttacttctgtcccctatgatacacaaagataaccttattttactcaggaggacttatgtcggaaccaattaccctttataaactgattgttctttatatgctgcataaggtagactttccgcttactacctcgcagatttcttcctttattcttgatcgcgactacacttcatttttcacactgcagtccgtgctctctgagctctctgagaccggcatgatccgtcttgaaaagatccgcaacacttcttattatacgatcacggattccgggcaggatgccctgcactactttcagggacgtatctccgcagacatccgggaagatatcgaccgctatatgcaggaaaataaaattcagctgcgcgacgaagtgtcaatcatctccgactattaccgcaacaccgccaatgaattttctgtacactgtatcgtaaaagaaaaatatgccaacccgatcgacctgaccatcacagttccggatgaggcacaggccaaaacagcctgcaacaactggcgaaaaaaatgtcaggaaatctatgagtttgtcatgaaggagctgctgtaacccagctatacatctgctttgcagggcgccatttgccataaggcgaaaaaaaagcgctgcggcacagaaatctctctgtgctgcagcgcttttctggtattgtctgtaatacgtgtcattaatagaactggtgagctccgatcttgattccctttccagaaccggtattgaagtagagggcacttcctaccggattctctccgttcatagctgcaactgctgcatcatagcaggtgctggggacaccatttgcgagtgcgcttgcaagtacgccgctggacgccggagtaaactgaccgctctgataaataacttcactgatcgaattcgggaaggacgaactgtatacacggttcataacaaccgcaccaacagctaccattccttcgtagctctgattacctgcttcgcagtaaataatcgctgcgagcagagacacatcgtcggagcttgtggaagccgcctctgtctgcggtgcttctgtctgaggagcctcggtctgtggtgcctcggtctgtggtgcctcggtctgtggtgcctcggtctgtggtgcctcagtctctacataagcctccgtctgcggtgcttccgtctcggtgtaagaggaattgtaatcggaaccgcttatatttccgtttgcatcgtaataggtatcggtatctgcatcataatatccgccgtcggtatcatccgcagtagtatcatctgaataatcatagctcggagcttccgtctcggtataatcgtagcttggctccgtctctgtataggtcggctcactgtagtcatagctcggagcctctgtctcactgtaagacggctcgctgtaatcataagacggctccgtctccgtataggtcggctctgcagaagtctcttcgctgtaagaatcatctgccggtactgccgctccttcgtatacatcatccttagatactgccgtatccagaatcagtacacgggaaacatcctcgctcgatacacaggccgtatcatctgcacagttctgaaccgtcagccactttccatcctctgccacgagcggataatatgtaccgctgtcaatcgtagccattgcttctgatgtattgttctccgacgcatagaggtttacatcatcccatgtcgtctttacgccttccagaccataatggtctgccaggccaatcacatcacgtccatataaaagatactcgttctttacgaatccggtcacgcctccggagctgatctccgtccactcatcgcccttattaagaacccaggctgcaccaccctgatacagatatccgataatctcgctgttctcatctgctgtcgcacgaatattgactcccgtgctgactgcatcatcatttgtcattaccagctcgtcccatgcattctcctgcaaatacggaatcgtaatcctgtccgagtcctcagctgccattgctgccgtacctgtcattacagaaaaaccaatgacggaaaatgtacataaaacagcgcgtgcatttctttttttcattactaaatctcctcctcggaaagtctttttaacatttcctttaaaattgttacgtatttgttaagtcatgttacgtgcatattctataatgttttcttaaatttgtcaagaaatatttaaccactccaggcagcgtcttctttgacgcggcaaacctttagatatgccgttgccgactggcctcatacatcagtatcgcagaagccactgctgcgttcagcgattccacccttccgcacatcggaatccggatataacagtccgccagctctgcggtctcatcggaaagtccgcggctctcatttccgatcagaaatccggtcggctgacggtaatcttgccggtcgtagctgtcttctccctttaaatgtgccgcataccagcgaacaccgtgccccttcagctcccggatcgccgcatgaaaatcatccgccacgaaaaacggcatccgataaattgatcccatcgtagaacggattacctttggattatacagatcaacacagccggaggacagcaggattccggtcacacctgccccctctgcggtccgcagcaccgtccctaaattgcccggatcctgcaggttctcaagcgccataatcaacggcaaagtcccatgctccttcttcggcatcagctccgtcagcgtatagtgtgactgccgtaccaggcagagaataccctgtggcgtctttgtatctgacacgctctcaaatacccggtctgagagcagagtcgtcgtcttttctcttccacagaacagctccggctgtctctggaaaaagctctctgaaacgtaactgtgcacaagccgatccatgggcacttcctgatacatcttaatgccttctaccgtaaagacatcctcctctttgcgcagacgcgccttcttctgtagctgaatgagctggcgcacctgtggattcgcggtgcttgtaattttttccatccccatttcgtatcctttcctgtttgtatccctttctgtcaaggcagatattcgcagtccatccctgcggctctgctgacagggcctagcttcgctacttgctcatgaacgcagtcgcttcgcgacctgcgataaagcggacattcgcaatccacttcgttacttgctcatgaacgcagtcgcttcgcgcctgcgttcaaaaaatcaggcaggatgcaaaacctgatcaccctgcctgatattatgctatttcttactgtaaagtaaagcggatattcacaatccacctcgctgcttacttgattcggttaaatcgtcatcgcttttgcgactctcacgacatactccggcaggctcttctgcatcgccagcgcctcatcaatgtcgtagttcacatacttgccgtcgcgatatgcgaccacacggtttgtcttgccctctgcaagcagatctgccgcataggctcccatcacagatgcgtaaacgcggtcccggcacgtcgggcttccgccacgctgcatgtgtccgaggatcgtcgcacgtgtctccactccggttgccgcctcgattctacgcgccatactggtcgaatgtccgataccctctgcattgatgatgatgtggtgctttttcccgcgcttacggttattgatgatgttgttgatcagtacctgctcatcataatcgtacagctccggaagcaggatatcctccgctccattagcaataccgcaccacaaagcgatatatccggcatttcttcccattacctcaatgatactgcagcgctcatgagacgtggaggtatcacgcaccttgtcgatcgcttccatcgccgtattcaccgctgtgtcaaagccgatcgtataatcggtgcaggcaatatccagatcaatcgtacccgggacaccgatcgtattgattccgcgtgcagccagcttctgcgcacctgcataagaaccgtcgccaccgatgacgaccagaccatcaatgccgtgcttccggcagatctctgccgcctggttctgcccttcctctgtgcggaatgccgagcaacgggctgtgtacagaatcgtaccgcccttggcgagcgtatctgatacagatcttgcatccatatcaatgatttcttcatttaacaggcctttatatccctgattaattccttttaccttcagcccctgggacaacgccttacggactacggcacgaatcgccgcattcattccaggtgcatccccaccgcttgtcagcacgccgatggtcttaacttcctttgccatactgtacctcctgccaaatccgtttttttcattctaatcctttttgtgccttttgtaaagaaacagtcctagattttcttttgtgtcagacgtacattatctgccccgaacgcctctgaaagcgcaccaagcagcgattcatccgcgcgcaccgtccagttgtctccgagcctgcgcacggaacgcccgtcacgcacatagatcacaacgtaatccttcccgtcggaattccgcagcaggtcaaacagctgcttctcccttgcacggtagtccgaaatagttgcaaactggatccacagctcctgtggcacctcgtcaaaccggaaaattttttcacagatcagtttgctcgactggtcatcctcgctgctgacacggccacggataaacacacggtcatccacattgagatactgcagatttttctcatagtccttcgggaatacgacgacctcgaccgtcccgaccaagtcctcgaccgtcaggtacgccattgtcttgttcgtcttcgtatattttacacgcttgtctgtgaggattcctccgatcacagcccggttgccatccatcactttggaatgcccggtctcctcatccagcgcaaagtctgacgttacatttgtgatcacatgcttccagagcgcttcgtatttttccagcggatgtccgctgacgtaaatgccaagcacctctttttcaaaagccagaagctgctccttgtcatactctccgaccttcggcagctgaatctcatactcgcgcttatcatcctcgcccatcagatcgaacagtgtcatctgcccggtcatactgctcttcttttcgtgtgcgatgcggtccataatgtctgcatagatcatcataaactgctttcttgtcccacccaggccgtcaaaagctccggatttgatgaaattctctatcgtccgcttattcgtttctttcccggtcagacgctcaataaaatccttcaggctgcggtatgaaccacccagggtgcgctcctccacgaccgcatcgatgaccggacgtccgatgctcttgattgcagacagaccatagcggatattttttccatctacggtaaagcctgcctcaccgacgttaatgtccggcggcaggatccggatgcccatctgtcgacatgtcaggatgtactctgccacctttggcggattgtcgatcacggacgtcatcagcgccgccatgaactctaccggataataatacttcagatacgccgtctgataggccacgagtgcatatgccgccgcatgtgacttattaaacgcatatttggcaaaatccgtcatatcatcataaattttgtttgcggttttttcgtcaattccatttgcgatgcagcccggaacatcctcttctttatttccatatacaaagttctggcgttcctttgccatgactgccgctttcttttttgacatggcgcgtcgcacgagatcgcttcgtcctaaggtatagccgcccagatcccgcacgatctgcatgacctgctcctgatagacgatacacccgtaggtcggctccaaaatcggctgcagctgcgggcagtcgtaggtgatcgtctccggattattttttccgcggatatactgcggaataaagtccatcggacccggacggtacagagaaataccggcgatgatatcctccaggctctgcggcttcagctccttcataaagttcttcatcccgccactttcgagctggaacacaccctccgtctttccggtgccgatcgagtcgagcaccgccctgtcgttgtaatcgattttcagcatgtccagcttccgtccggtatccttcgccacaagccgcaccgcattgtcaatgaccgtcagtgtccgaagccccagaaaatccatcttcaaaaggccaagctcctccagggtcgtcatcgtaaactgtgtcacgatcgtgccatccgccgctctggacagaggaacatattcatccacttccttctggctgatgacaacacccgccgcatgcatcgacgtatggcgcggcaagccctccagacgtctggacatattgatgagctcttttattttctcatctgtatcgtaaagcgttttcagctcatgattcatctcgagtgctttatcgatcgtgatattcagctcctgcgggatcatttttgcgatcgaatcacaaagcgcatacggaagatccatcacacgcccgacatcgcggatgacaccgcgcgccgccatcgtaccgaaggtgacaatctgcgctacacaatccttgccatatttccgcacaacatagtcgatgacctcctgtctgcgctcgaagcaaaaatccacgtcaatatccggcatggatacacgctccggattcagaaaacgctcaaagagcagattgtaccggatcggatccagctgtgtaatgccgagcgtataagaaacgatactgccggcggccgagccccgccccggtcctaccggaataccatgatctctggcataacggataaaatcccacacgatcaggaaataatcgacatagcccatcttctgaatcgtatcgagctcatatttcaggcggggcttcagctcttcggcacggtcgccgtaacgctcatccagtccctcataacagagcttgttcaggtattcccacgaagtatatggcgatggcacatcgaagcgtggcagcttggtcacgccaaattcgatctccacatggcatcgttttgcaatcttatgtgtattttcaagtgcctgaagcgcatatggaaacagctccgccatctgctccggcgattttacaaaatactgtccgccctcatagcgcatacgattttcatctgtcagcttcttgccggtctggatacacagaaggatatcatgtgctgccacatcatcctcgtaagtataatgcacatcgtttgttgcgaccagcggaatatgcagctcctcactcatccgcagaagctgttgattgacgagcctctgatccgggattccgtgatcctgaagctccaaaaaataattgtcctttccaaaaatttcctgatattccaatgcggtctgacgcgcttcctcatataagcctctcgtcagataccgtggcacctcgcctgccagacaggcactcaatgcaatgattccctcatggtactgccgaagcagctctttgtccacacgcggccggtagtaaaagccctctacaaaaccaagcgaaacgatcttcatcagattggcgtagccctgattgttctccgccagcagaaccagatggtaataccgatcctcatcacttccgacctctcggtcaaagcgggaatttggtgctacatagacctcgcagccgaggattggattgatcccggccgcttttgcctcccggtaaaaatcgatcacaccatacatgacgccatgatcggtgattgccgcactgtccataccgagctctctgaccctggccacatactctttaattttattcgaaccgtccagcagactgtactctgtatggacatgcagatgtgtaaaattcaaagcagcagcctcctagtctaccttccggatctttccgtctgcgatggcaatgcgtccctccttgagcaatctcccgaccgcacgcttgaacgcattcttactcagaccaaattcacgctggattgtctccggtctcgccttgtcatcaaacggcagtactccgtcaaattcttcgataatgccaagcacattctccgcatcctcatcgatctgcagatatgccttttcccgaatactaagatccagcttgccatcctcctttactccggaaacgcgggcctgcacccgatccccgacgcgaattccctgtaccccgctctcacgctttggaatcagtgcagaatactggtcatccactgccacaaatgcgccgaaattgctgctgagctcataaactcttccgtgtacctggtcattgacctgatacggggaatttttcttcaaatatggatagacccgcatagtcgcacacaggcggctgctcttatccagatacagcgctacgaggcactcatcccccggatatacttttccggtctgctcgcggaacggaagcagcagatccttttccagtccccagtccagaaatgcgccaatcttcgtcacatccttgaccttgagcacagcggtcctcccaatcgtcaccatcggctcccgccgcgtcgcaatcagacggtcacttgaatccagatatacgaatacttccaccttcgtacccggcttcatcccctcgtccacttcctttttcggcaacagcactttctcgctgctctccttgtgctctgccagatagataccgaatccggtctcttttacaatgattaactcctgtctttctcctgcctgtatcatgcgtcctcccttttttctgcagctttgtcgctgcctgaatctgccgcgcggtgtgacagcaccgcatacggctttcctgcttcatcgcacagcccgaccgttacggtctgcgcatcttgatgcacatacggataaatgacatcgtgtaaatgtgcctgctttttatactctacctgcaaatatccggtctcaaagccctccggaagatattcctccgccatccggatatactgtccgttgttgacatgattgttcgtatccaggtgatagcggcataccgtaaaaggctcccgctttacacagttctgcggcagcttaagtttacgcggcccgtattccatatccagcttttcttccattttataccttgccacatgctcttctgcaacccgcacgggctttccggtctgcaaatcaatcaatgcccatacactgtttgcttttgcgagataattttttccggcatccaccagcgcataattccggtagccgtaaaatgccttaaaaccatacggccacgtctgtgccgtaatcggctccgccagatacggtctgcgcaaaatctcaatctgccacgataaaatcatccacgccagatcctgcttcttcaggaaacgcgtcccgaccccacagtcctcagactgaaacgtcgaagcatcctgaaaataatccaccagtgatacgagtgtcagcttttcttccggatccgtctcgctgtaacgaactctgcttgtaaattcaaatggcatttttctttcctttcgtccctgtatcatattccgctcatttttccacgaaaaatagctgcttttcggaacgtgtcttattatagcatcatttcgaagtttcttccatgattttattgcttcaccccattgatacaggggacttacttgattcgaatcaagcggatattcgcaatccgct

SEQ ID NO: 1253 - DNA, 1884 bp, Unknown
  16S sequences of unknown bacteria
ctcgagcgtctcgtcgttcatgacgtagccgttctcgtcgagcttgccgcagtggccgtggctcgtgtactcgcacatgcacacatcgcagatgatgtacatctcgggcgcgttcttgcggatgatgcggcacgcctcctgcaccacgccgtgctcgtcccacgcgctcgagccgatttcgtccttttctgcggggatgccgaacagcaagacgtagtgcacgccgcagtcgagcagttcctcgatctcgggcatgagcatgtcgagcgacacctggaacacgcccggcatgctgggaatctcgtcgcgcctgcccgtgcccggcttgacgaacagcgggtagatgaagtcttttgccgtgagctcggtctcgcggatcatctggcgggcgagctcgccgtcgcgcatgcggcgcgggcggtactgggggaactttccgtattccattagtcttgcgctcctgtctcttgcttgggctcctcgacgatgcgcttctccgggtcgtcggggtgcttcgcgatttcttcgtcggtgaggtagcacgcggggtcgggtgcccacaggtcgccggtcgccgcctccgcgcgcacgcggaagttgccgccgcacacgtcgagccaacggcagtcgtggcagcgccccttgacccacgggcgcttgtccttcaggcggtacatgagctcgctttgcggcgtcgtgcggctcgtgtcgctccagatctcgctgaagggccggtccttgacgttgccaaagctgaagtggcgccagaactggtcggcgtagacctcgccgtcccagctcacacaggcaatgccgttgcccgagctgttgccctggttccactgcagcagctgcatgacctcggcggcgcgcttcgggtcttccttgagcagctccatgtacacgaacggcgcatcggcgtggttgtcgaccgtcaggatctcgggcgagccgccctcgtcgaaccactgcctcgtgcggtccatgatcaggcggacggccttgcgggtctcctcgtgcgtgaggtcctcgtccatcatctcgctgccgcgcccggagtacacgaggtggtagaagcacgcgcggttgatgccctcgcgcttcatgaggtcgaacatgtcgtcgatctcgcgccagttgtgcttgttgatggtgaagcgcagaccgaccttgatgccggcatcctgcgcgttgtgcatgccttcgagcgccttggcgtacgcaccttccacgccgcggaagcggtcgtgcgtgggctggtcgccgtcaaaggagacgccgacgtaggaaagccccacggcagcgaacttcttggcgagctcgggggtgatgagcgtgccgttcgtggagatgacgacgcgcatgcccgcgtccttggcgtactgcatgagctcgagcaggtcctcgcggatgcacggctcgccgcccgagaacagcagcacggggcaaccgaaggctgccaggtcgtcgatcatcgccttggcctcggcggtggacagctggtcgtacttttgcgcgtcggaaagcgcatagcaatgctcgcacttgaggttgcaggtgcgcgtgcagttccacacgaccacgggcttcttgtccttcgagaactgcagaaggccgctcggcagctccttgctgcggcgcctgtagcgcaggacatcggacggctcgacggtgccgcagtacagcttcgaaatgccaatcatctagttgttcctctctcgcgtgaacatctcgcacagggcctgcacgaggccggggatggtgtaggtctgggcctgggcggcaacttgcagccccgccttctcgagtgtctgggtggtgatggggccgatggagacgaggcccgtgcgcgcgagcgcctcttcagcgtcttctcccagcagg

SEQ ID NO: 1254 - DNA, 24163 bp, Unknown
  16S sequences of unknown bacteria
gacttgcaattatcggatgaatgtagtatgattctgtatgtggttttgaaggcacatgcctttagttggcctagtggctcagttggttagagcgccgccctgtcacggcggaggtcacgggttcgagtcccgtctgggtcgttggtagcaccaataagcattcgctcattcggtgcttctgttttcaaaatttggggtcttagctcagctgggagagcatctgccttacaagcagagggtcataggttcgagccctataggccccatttcctttatttacattattatttatatgtgccgtagtggcggaactggcagacgcccgggacttaaaatcccgtgggtagaaatacccgtaccggttcgatcccggtctacggcagaacgaaaaacccttgattttcaagggtttttttcatgtccggaacttcctgtacacttccagaacctctcgaaatcatctccatatccgttcaaaaccgattttgacagcagatttccagccatttccaattttattttatccgattgagatggattatgttgagcagggggtggaatttacgcagagtaaacagaaataaaaggatgttgcaaaagaatagcgaagggcgtatacttgatgcagtaacgcatttggattcaggagacgcgcctgaccagaagctccgttttgcagttattgcgggttgcgatttacggaaagtatgataaaaagaaaaacggaaagaggatgaagagtatgagcgtaaatacagcgggtacattgggattggtagcttccattgtgcttattatattgctttatgtgaaagttttaccgagaaaaatggatgggaagattgagaataaatttttaaactggttacacaattatttctactttaaaagattctatatagaagatattctcaggtttgtatttatcgtcacaagtgtgttgtccttttgtatcggattcttcatgctgttttcagtaacagagtggtggaccggaacaagaagtaatttcgcaatgggtctggcgataatggttggcggtccgattcttatgcgtctgctttttgaagtgcagatgatggcgattacggcaataagaaacattattgagattaacagtaaaatggatcggcttgcggcaggcgagaagaaggcagagaaaccgatgggatcggtaaagccggaagaagcagggaagccgatgggatcggtaaagccggaagaagcaggaaaaacgtctgagccgacgatggttaggcacagtgtggaaagcggcgcaaaaagagtctgcagaaactgtggtaaagtcgtaggaagtaaggcaaagttttgcccggactgcggtgaaaaaatagaactgtaataagcaagggcagaaacagaggtacctgacagagcgtgcataaaagaaagtatacgacagagtatgggagaaaacagatgaatacggctgcattggagaggcatattattgatacagtaaaggaatggcagatgaagatcgggtatcgcagtgaggagatgaagctgtattatccggatgtgtctctggcgggactgctggagcttgctgagggatggacagaggcatcgctaaaggaagcgctgcaggaattttcgaaggagacaaaggggcggcttggcggcgtgcagatttcgaatgtgaaagaccgctactgtgttgcggttccggcagcgggctgcacgtacattcatgagaatgagccggattctgcatttctgagaagctttctggatgtgatcaccggactggagccgtcgatgcagggcgtggaacagtgtttcgcggatgcggcggcgatgaatggtgagcattacgtaaaagaagaccgggagtcagaagggctcggaatggtattttatttctgcccggtgcaagaagaagtgcagactccggaacggtcggtcatcgacacgtatgtgtactgtgtggaggaggatgattttggcattacgtatcatcgtttttcatggtcagattttcagaaactggtcagtgagaatacacaggtaaagcatcaggcagagacgtgtatcatgtgtcagtagtactgaaaaaaggtttgaaaacactaggaaagattagcgcctgaatcgtgaaaaatggtttgacatctgactttttgtgtactaagataggggcaaccaataatttgcactgcaataatctacagtacaaactgatcaggtgtaggatttctatcaccgggttgcatttgcgacagcaggtaacataacatctgcgggacagtagtaagtactttttactatcgtttcggggtgttatttttttaccctgaaaggaagaacagcagagcgctcttgaaggaaaggaaggttacctgatatggaacaaagtgaaagtaagacgattatatctgcgcagagtaaaacgaataaaacagtctctgaggcggaagaaaagaaaattgtggcacagatgtccacggtaggtatcgcgggaaatgtactgttgtcagcatttaagctgattgcaggtctggcaggaagctccggagcaatgatttcagatgcggttcattccctgtcggatgtactggcgacatttattgcgatgatcggtgtcaggatttcaaagcgtggtgcggatgcggatcatcagtatggacacgagaagtttgaatgcatctcgtcagagattctggcgggtattttgtttgtgacaggacttggtatcggatcggtaggtgtagagaaaatcataggcggtcattatgaggatctgacggtgccggggatgctcccgctgatcgcggcaattgtttcgattgtatcgaaagaggcaatgttctggtatacgcgggcctgtgcgaaaaagattcagtcatcggcttttatggcagatgcatggcaccatcgctcagatgcattttcttccatcggttcactgattggtattgtcggtgcgcgggctggttttccggtactcgatccgatcgcgagcgtggtcatctgtctctttattttgaaggtggcagttgacattttccgggatgcgattaagaagctgacagacagcgcctgtgacgatgcatacaccgagaaggtgcgggactacatcaaaggccaggagggtgtttgcgggatcgacctgctgcgaaccagaatctttggagaaaaggtctatgttgatgtggagatttctgttgatgccgatttgagtttgagggaggcgcatgcgattgccgagcgtgtgcatgatggactggagcataatttttcaaatattaagcatgtgatggtgcatgtgaatccgtacgagaaggcagcgtgagcagaagtgcaaagcgagctaagaaagtgttaagaatcgggcagaacacttgtaggtacgaggatgcgatgctacaatcagaaaaaagtgaaattccggtaaaagggagtagcgccatagagatatggatctttggtcgtcagtacggcagatatgcccggcaaagattgaaacagcgagacttttatcacagattatttctgtgatagaggtctcttttttattttctttctcagtaacagcgcaacggcctgtaccggaaggagggaggaacagatggaatttttactggatggaatcagtatgcttagctggaagcagatcgtgatgtacggagtaggtattttgctgatctggctggcaattaaaaaggattatgagccttcactgctgctaccgatgggatttggagctattttggtaaatttgccgcaaagcggtgtgatcgaccagctgatcagcggtgtaggtgagagcaagggcattattcaatggctgtttgagaccggaattgatgtctcggaagcaatgccgattttattgtttatcggaatcggtgcaatgattgattttgggccgcttctggcaaatccgagtctgttcttgtttggtgcaggtgcacagtttggcatttttgcggcgctgctgctggcggtattgcttggctttgatctgaaaaacgcggcatcgattgccgtgattggggcagcagacggccctacctcaatcatggtttcacagattttgaaatccgattatattggtgcgattgcagtggcggcgtattcctatatggcgctggtaccgctgattcagccgatggcaatccggctggtgacgacgaaaaaggaacggcagattcatatgaattatgaaccgcaaaatgtaagtaagaccatgcgcattgcatttccgattatcgtgacaatgatagtaggactggttgcaccgacttctgtggcgcttgtcggatttttgatgtttggaaatctgatcagggaatgtggtgtgttgaatacgatgtcagagacggcgcagacgacgcttgcgaatctgatcacgctgctgcttggtattacgatttctttccgtatgcaggcggaagcctttgttacctgggatacacttatgattatggcgatcgggctgtttgcatttgtgatggattccataggcggagtatttcttgcaaagtttttgaatctgttccgaaaagaaaaaatcaatccgatgattggggcagccgggatttctgcgttcccgatgtcatcacgggtcattcagaagatggcgcagcaggaggatccgacgaatattctgctgatgcatgcagcaggggcgaacgtgtccggacaggtggcatcggtcatcgcaggcggtcttgtgataaagctggtgacggcattcctgtaatgcgtatgggtgtataaaggttcgggaaaatatgagtcaaagaagtgaaaaagcaagagatgcgcgaagcatcggaagggagaagcgatgagtgatattcagattgcactgattattatggtaaagggaatggcaggaatttttgcagtcacgctggtgattttactgcttgtatggctgctgggaaggattggaacgcgaaatagctcagaaaatccaaagcaatgaaatgaatcaggcagttgcgaaacggtcggaatgtggtaaaataaaattatgtgactgtgcagggggcagcgtagaatcacatctatgctgccgttttgctgtttgtttttacacgggaaagcttttgcaagggctgtaaatgataggagagaatatgatttatactgtaccggaatattataatcagtttcaatgtctggcatctgcctgtccggcgacatgctgtgcaggatggcagatcgtgattgatgagaagacacaggaaaagtaccgcaattataaaggaagctttggcaaccgactgaaaaattcaatcgactggaaggatggtacctttcagcagtaccatggccggtgtgcatttttaaatgaggagaatttgtgcgacatccatatagaggcgggacatgatgcgctgtgccgtacatgcagacggtatccaaagcatgtcgaagtctatgagaatgagagggaggtttcactttccctgtcgtgcccggcggctgcgagactgataatgggacaaaaacagccgtgcagatttcgaagtatcgagaagagcggcgaggagtcggagaaggattttgacgagtttttgtattcggcactgcaggactgcaggaaggtcatgctgacactggcgcaggatcggagcgtgtccttgcagctgcgcatggcgaggattcttgcattggcgcacgatgtgcagaatcggatcgaacggaatcgtgtctttgaggtggagacggtgctggagcgttaccagcgtccgcaggcaagagagctgctggatgcaaagctgtgccggtttgcagagcattcaaagcagcagcggggggcaagagcatggctggaggactggattacggtgcgctggagaatgctggatctgtttcgggaatttgaggtgctcgatccgctttggacagaggatctccagatgtatcgcaggtgtctgtatgaaaaaggctgtgccacttatttggatcaggaactgcagtggacagagaggtcagaggaatgggaaacagagtatgagcagattctggtctatttcctgtttacttatttttgtggtgccgtctacgatggagatgtgatgcgcaaggtgcagatggcggtggagagcgtgctgattttatcggagcttggaatggccgcgtggatgcaggaggggacgctgccgacgtttgaggatcggatgagactggcatggagatattcacgcgagctggagcattcggatccgaatcttgccgcgatggagcgggtattgggtgaatggccggagtatggatttgagccgctgctgctgcagctgctcgcacatgaacacagataagtattcccctgcttcaagtgcgagtagcgactgcgttcatgagcaggtaacgaagcggattgcgatagatacagaaaacagatacagaaaagcgaggatataatatgatacaggcaatactatgggatgtggacggtacgcttctggattttaaaaaatcagaggagtacgggatccgtgcctgcatgaaggaaattggttttgatgacgtggatgaggaaatgctgacacgatatgaaaaaattaaccgaagctactgggaagcgctggagcgtggcgagatcacgaagcaggaggtgctgatcgggcggttcaaaactttttttgcacaggaggggatctgctgtccggatgttgcggctttcaatgattcctatcagagaaaactcggtgaaatcttttttgaaaaggaaaattcgctggagatcatcagaaatctccatggaagagtaaagcagtatgtcgtgaccaatggaacggttgtggcacagcgggcaaagctggaaaaatctggccttggcgcatatatggacggagtgttcatctctgatgagattgggacggaaaagcccgggatcggatttttcacaccggtatttgcagcactgcagggcattgagaagaaggatgtcctgattgtcggagactctctgacaagtgacatgcgcggaggcaacaacgccggattttgctgctgctggtacaatccaaacaggctgaaaaatgagacagatgtgcgggtggattgtgagatacacagcctgaatgagattgaggcggtgctgcgtgggttctcgttatgtgagagtgacagccaagtcagattcgtgaatgctgtataatattcagaagtttacagggatcattcaatgcaaatacaataaaattttacacactttttacgacccctttacaaactttacattggtatgttatgctatatattgatgaaatttgcgattttgtaaaccagattcttgcctgaggcgctgtgggagcagacgtgcggcagacagagaatcgcatactcatgtaaggaggaaagggaagagatttcccgaaaaaacagcatatggggattaatagtattattgcattgctgggcggattaggcgcattcctgtttggtatgaagtacatgggagaaggccttgagctcgcagcaggtccgaaaatgaaggagctgctcgaaaagctgacgcgcaaccggatcatgggctttttgctcggtgcacttgttactgtcgttattcagtcttcctcggctacgacagtcatggtaatgggctttatcaatgctgagatcatggacctcgcgcaggcgaccggcgttatcttcggagcgaacatcggtacgaccatcacaagtatcctgatcgcgctggacgtatccggcatcgcaccgatctgtatctgtatcggtgcagtgatgcttttgtatgccaagaaaaagcgtaaccgttatatcggacaggttgttcttggttttggtattctgtttcagggacttcatacgatgagccaggcgatgtcaccgctgaaggactcaccgggatttcaggaattcattctgaatgcgaagaacccgttgcttggctttgtagtcggagtcatcctctgtgctgtgattcagagctcttcggctgctgtcggtgtcttgcaggctctggccatgcagggactgatgcccttgtattttgcggcgtttgtagtctgtggtatcaatgtcggatcttcgacaccgccgctgctctccgcactgaatgcaaagaacaatgcgaagcgtgccgcctgcatttatctgattttcaacattgtgggtgcaattttatttattccgcttacgatcctgttcccgatcacacagatgattgagcgggtgattccggatccggtatttcagatcgcggtctaccatatcatctttaaggtcgtaactggtgtgatcctgcttccgcttgtaaacgttgttgtaaagtggacataccggattattccgaagcaggcgcacgagagtgcatttcgttttgaatatatcgacccgaatatggtcggatctccggcagtgctttctctgcaggtcggacgtgaggtggagcgaatgtgcgacatggtccgtaaaaatgtatccgatgcggcggaaggcctgattcaaaatgacatcatgtcagcaaatgtcattcgcgagcgggagcaggttatcgactatttggcttccgagattaccgattatctgacgaaggtaaatgccctgcagctgccgcagagtgtttccaactacatgggatgtgtatttcatgtcatcaatgatctggaacagatcggcgatcatgcgatcaagattcttgtacagacggagaaatgcgtggagatggggcaggcctattcacaggccgcgcaggatgagctgcgccagatttatcagatggatatggatctgctcgataagacgatgaagctgttccgcggacagcgcccgacgccggagggctggctggatatgaagctgcaggagcgtacgatcatgaagctggctgttaaggcgcagagcaatcatatggagcgtctgcaggagaagacctgtacatttgagcagggactgacatttattgagtcgctgaacagtttgatgcgaattgtcaaccatgtgatgaatatcgcagaggcgagcggaagtgagcttttgctgaacacagcgagagaataatgaaaatacgaaacaccccctgcgggatatcccacagggggtgttttgctgcacacacggaggtgcagtcatttctttttcttcatgagcatccgaatgctctttagtctcggaagaaaataccaaagtgcaatcggcgcggcgatcagtgcgaagatgcaacgcctccggaaagagaaccagaaggaagccatcgttgcgatgcatatgatgaagtaggcacaggagatgcaaagcgttgtggagagcgggatgatctgtgtgccggtcaggcgcttttccatgaaggcctgcatgatcatcagtaccaggtaggagaaggccgtcgtgtaggcggcagcctggtagccaaaggcgcggatgccgacatagttcaggaacacattcaggaacatgacggatacggtcgagatcgccacgaatttcgtctttttgtggaaattctggatcgcggtatagctgtagctgtagaagcggaataatgtgccggtcaccatcggggcgatgagccagatggcatcggcatattttttcccgccaaggatcaggatgatctccggtgcgaaaagtacgagcacccaggagatgacgccgaagccgtgcatcagggtcgaccaggagccgcggatttcgcccgcttcgttgcgggcaattttttcgtacatccatggcagccaggcattccagacggaatcctccagaatccagataatgtaggagactgtcgtggcgaccgcgaagatggatcccggaatatcaccggttatccgcgtaaccataagtttgtccgcctgattcatgatctggatcgagagcacttccggaatcaacggaaggctgaagcggagcgcatacttccaataagagcggtcgatgagctttttgccctgtaccgccattaaaatggcgacggtaaagccaccgatagtcatcgggatataatagcctgcgatgcgcagatacatcagatccgcttcgtgcccggcgcgcttgccgagcacgacaagcaacacagagagcagggtcgccgggatgacggtggcggcagtcagggtcgtgctcgccttatagcgcatcatttgcttttcgcggcgctgcatgtagaaaatgcttgtgtgtgcataagtatacaggaaagcaataaggagcatgaaatcattcatgccgcacagcgcctctgcctgtttccggaagatcagaaaaatcacaaagaagatcgagatggacagatatgagagggtctggacactcgaaacgtattcattgaacttttcctttacatcatacttggcacattcgacgcttcgccacaggcagagcgacatgaccggtgcgaagatcagaagccaggactcgaaaattttgtactgattgtactgctcctgtgagagcagccgggtgaacacaggtgtcatcaggaaggtgataccgcgcacaaaaagctgacaggcaatgtagaaaataccggccttgaaggcacggcggtttaaggaagcgtcctttgtggcgtcggccatattactttcctccctttaccggaagctggcagacgaagcagcgcagcttgccgttcggatccggcggaatcacgtcaagccagtcgatgcgcaggcggaactcatcgccgtagatatcgtgcagcttattccggaaaaatgcttcgatctcttccttcgtgtaagcagtgtccatcggatcgcgcacgagctccacgcgcatgtcgtggtagctttcctgggtaaagcggaactgtgcgatgccggtgatgccgttcgtgatcttccggagctcgagcacggaggtctcctcgccgttttcatggcgcaccatgtcgtttaagcgtccatggatctttgtgacatagcggacgccgtcttttacataggaggaggcgatgtccccgatatcataattgatcagtggaaaatcagtcttgaacagcggcgtgatgatgacgcggccattgttggcaagctcatttttgtcatcataaatgttgacaacgtgtgtgtcattgcaaatgtcatagtaatccttgcccggccgtttgatgatgcagctgccggtctcatcgctgccgtatgcgtcgaccagacccggcccgaatgtcttttccagcgtcatgcgtgtcatttcatcgaccatctcactgaccgggatgtaccatttcggctggcggattgtcagattgtgctcctgagcatagagggcgatgcgcacgatacagttcttacgcagacaaatcagatccggatgatactcgtttagctcccggatcacatccggcattccttcagccgtgcagcgcgtctcagagagcttgcgccgctgcaggatgccgaatttctgtaaaaaggagtcctgctgttttttttctttgcggtagcttgactcaaacgagagcattttgccgaaaaccgggttgtagccgaagctcatcaggatacggatccagtttgcattggtgcaggcatgctcacgctgagactgatacagaacgagcgggacaccggtcgagccgctcgtgctcgtggcatcccaggtatcgcgggtatccgggtgtgtgtcgtagagctctttcatccacgcgcgcagctctgccttggtgagcaccgggaatttctgcaggtcctcgctgcagtgaaaatcgtccggggtcagatggcaggcgtcaaagcgtttccggtagaatgggatctcataggcgcgtttcatcagcttatgtacatttttattctgtttttgtttgattttcttgcggtcatccggaaaatgcttttccaggacgaacagataatataaggtagacacattggtcagcttttttgcaatagagcttctcatgataaataaaatctccttttaagttctcattgcagtatagcagaaaacaatttgagtgacaagaaattagaattatttaagaaaatttcagaatttgcggggttaaaaaagaaatagaggtatggtagaatggagccacatggaacaaaaagaacaatatccggagaaacaggagccggaaatacacaatgagggtggatacagtggaaaaaaaggacgaaacattacaggagacagagcaaagagaactgctgctgccggctgtgattgaggaaaaaaagaaccgtgatctgtggacgaccttgaagacgatccgacagaaatttgtgcggcaaaagcccatttctgaggagtaccagatcccggaatttacttctccgctggtgcgggtggaggcatcacccgagcagggactgacgaaggagcaggtcgaagaccgaattgcgcgcggagcggtgaatcatgcagtggaatcagcgtcgaggtcgaaaaaggagatcatctgcagcaatatttttacttattttaatctgatctttttcattattgcggtgctgctgattgtggtaggttcgttccgggatttgacctttttgccggtcatcattgcgaacacggcgataggtatttttcaggagctgcgctcgaagaaggtactcgatgagctgacgatcctgaatgcgccgaagaatacggtgctgcgggatggcaaggaagagacggtaccggctgaggagctcgtgctggatgatatcctgcttttgaaggcaggcagtcagattccggcagatgcgacggtcgtatccggagaggtgctcgtcaacgaggcactgatcaccggtgaggcagaccagatccagaagaaaaacggcgatactttgctgtcgggcagctttgtcgcatccggtgaatgccgcgcaaggatcgagaaggtaggaaaggattcctatgtttctcagctgaccttagaggcaaaggcaatgaacgatacggaactttccgagatgatccggtcgctggaccgcctcgtaaaaatcgtcggatttatcattctcccgatcggcattgtgctgttcagccagcagcattttatcaacggtgcgtcgatccgcgacagtgtgacttcgacggtcgcggcagtcatcggaatgattccggaaggactgtatctgcttgcaagcgtggcattggcagtcagtgtcatgcgtctggctacgcagaaggtgctcgtacacaatatgaaatgcatcgagacactggcgcgtgtcgatgtgctctgtgtggataagaccggaacgatcacggacaatacgatgagtgtgaagaaggtcatcccgtttagggcaaaagagatgccggaagcagaagagatgccggatgcaaaagagatgccggatgcgggaggagatgccgcagcagacgcagaacagacggctgtgtcagaggaaggtgaggaagctgagccggagaccaccgaagccgaacaggaagcgctggagcttgcaatcggcgatttcgcagcggcgatggcgacggacaacatcacaatgaaggcgatcaaggattatttccagaagcgcagcggaaagcgcccggagaaggtatattccttctcatcggcgacaaaatacagcggcgcggtatttgaggatgcgagctatgtgctcggcgcgccggaatttattctgcgcgaccagtatgccgcttacagcgagcggatcgagtactggggcagacaggggtatcgtgtccttgtatttgcaacgtatgagggtgtcttggacggggagaagctcaccgctgatgttcggccgatgggtatgattctgctggcaaatccgatccgggaaaatgcgaaggaaacatttgcctattttgcagagcagggcgtaaagatcaaagttatctccggagacaatccggtcacggtatcagaggtggcaaaggaggccggtatcgaagatgcagaagactatgtggatgcaagtacgctgacagatgaaaaggcactgtttgcagccgcagagcggtatacggtattcggacgcgtgacaccggatcagaagcgtcagcttgtcagcgccatgaaaggtcgtggacatacggtagcgatgacaggagacggcgtcaatgacgtgcttgcattgaaggatgcggactgcagcattgcgatggcatccggaagtgatgcggcttcccaggtcgcacagcttgtgcttctggagtcagatttttccaagatgccgtcagtggtagcggaaggacgccgggtggtcaacaacatcgagcgcaccgcaagccttttccttgtgaaaaatattttctccctgtttttgtcgattttctcgattattttgatggtaaattatccgctggagccgtcgcagatttctctgatcagtatgtttacgatcggcattccggcctttgtgatgtccctggagcgcaatacggatcagattaaaggacatttccttagcaacgttctgttcaaggcgctgccgggtggactgactgattttctcgttgtcagctccctctacatgttctgtatggagttccgggtcagtgagacagatgtgtcgacgtcctgtacgatcatccttgcgattgtcggtttgatgattctgtaccagattgcatcgccgatgacaaagtaccactggattctctggtttggtatggcggcaggccttctgtactgcatgatctttgtgagccgtatttttgcgatcacgagtgtatcgaagcagagtatgatgctgctgatcgtgtttgcgatcgtcacggagccgaccttccgttatttaagtatcctgatcaggaagctgtctgaatggtatacacagcatcgcctgcgtcaggcagaaaaagtgcaaagaagtcagaatctataaagtccacagtgaaatttttgtggattttgtgataagatactggtataatgaaagacgaaacacttatgaaagataaggagatcagatatgaagcgagttcttttaaagctgagtggcgaggcgctggccggggaaaagaagaccggctttgatgagccgacggttatgaaggtggcagagcaggtaaagacattggtagatcaggggattgaagtagggattgtcatcggtggaggcaacttctggcgtggacgttccagtgagaatatcgaccggacgaaggcagaccagatcggaatgctggcgaccgtgatgaactgcatttatgtgtcggaaattttccgcgcagcagggatgaagacagcagtgatgactccgtttgcatgtggcgcatttacagagcttttctcaaaggatcgcgtaaagcagtgctttgcagagcataccgttacattctttgcgggtggtaccggacatccgtacttctccacggataccgcgacggttttgcgtgcgattgagattgaggcagatgtgattctgctcgcaaagtcgattgatggcgtatatgacagtgatccgaaggacaatccggcggcgaagaagtatgatgagatttccattcaggaggtcatcgacaagaagcttggcgttgtggatatgactgcgtcgattctgtgcatggagcagaagatgccgatgctcgtattcggactgaacggagagaacagcatcgtcaatactgtaagcggaacatttaacgggacgagagtgaacgtataaaggcaaatcaaggaggacaataaaatggatgagagaatcaaagtatatgacgagaagatgacgaagacgttcaacaatcttctcagtgagtttgcgacaattcgtgcaggacgtgcgaatccgagtatactcagtaagatccgtgttgattattacggcacaccgactccgctgcagcagatcggtaacatcacggttccggagccgagaatcctgcagattcagccgtgggaggcattcatggtaaaagcaatcgaaaaggcaattctgacctctgatattggaatcaacccgtcgaatgacggacggattattcgtctcgtattcccggagctgaccgaggagcgcagaaaagatctcgtaaaagaggtaaagaaaaaaggtgaggcaggcaaggtagcgatccgcaacatccgcagagatgcgaacgattacctgaagaagctcggcaagacagaggtatctgaggatgagatcagtgatcttgaggatgcaatccagaagatgacggataagtacatcaaggatatcgataaagcgaccgaagaaaagtcaaaagaaatccttacggtataatcgtttcgcgggatagcatacaggggtattacagatggagtgcagctgtgatacccctgtttttacgggaggaaaaaggatgaatattccaaatcatgtggccatcattctggatggaaatggcagatgggcaaagagcaagggaatgccgcgcaattacggacatgtaaagggagcgcagaacctggaggttatttgccgggatgcctataatatgggaatcaaatacctgacggtgtacctgttctccacggagaactggaagcgctcgccggatgaggtcgatgcgctgatgaagctgtttcgcagatatacaaagacctgtatcaggaccgcgcgcgacaataacatgaaagtacgcgtgctcggtgatccaacggcgctggcggacgatctgcaggaaagcctgaaaaagctggtggagagctcgaaagacaataccgggctgaattttcagatcgcgatcaactatggcagccgggatgagatcgtgcgggccatccgaaaggtggcggcagattgtgtggatgggcagctgaagccggaggagatcacggaggagcgcttctcgggctatctggatactgcggaggtgccggatccggaccttctgatccgtacaagcggcgagcagcgtctttcaaactatctgctctggcagctggcttatacggagttttattttaccgaggtaccgtggccggcatttacgaaagaggagctggcgaaggcgatcgaaaaatacaacaaaagagaccgcagatatggcggtgtaaaggaggaataaacgatgtttcggacgagactgatcagcggaatcgtgctggtgctgatcgcgctcgtggtcatcattaccggagggccggtgctggctgcgacgctttttatcatatcggagatcggagtgtttgaactctaccgtgtactgaaggtgcaggatgcaggattttcgccgctggctgcagtcggatatcttgggacagccgcctactatgcaatcgtattttttgccggttctgcatatactatgacagtgcttctcgcgacgctgattctgtgtatgggggtttacgtgttcacttatcctagctatcggtcagatcaggtgaccggtgcatttttcggtgtggtttatgtggcagtcatgctctcctgcatttatgagctgcggattctggataagggtgtctatctcgtatggcttgtatttctcgcttcctggggctgcgatacctgtgcctactgtgtcggcaagctgatcggcaagcataagatgacgccgaagctcagtccgaaaaagtcggtggaaggtgggatcggaggcgtagcgggagctgcgattctcggggcagtgtatggcctggcgattgccggaaagatgggagatggcagccatatcgcatcttttgcggtgatctgtgcggcgggcggactgatctcaatggtcggtgaccttgcggcatctgcgatcaagcggaatcatgatatcaaagattacggtcatctgattccgggacacggcggcatcctggatcggtttgacagtgtgattctcattgcgccggttatctattatctggcgctggcacttctgtaaaagcgcagaaaggattggaaacaaatgaaaacaatagcaattttaggttcgacggggtcgattggtacacagacgcttgatgtcgtgcgggcaaacggagatattcaggtggcagcgcttgcggccggaaaaaatataaagcttctggagcagcagatccgggaattccatccgcggctggcagcagttgcagatgaatcagatgcaaaggctttaaagacagcagtagcagatatagaggtagagattctttatggagaagagggccgggaagcggtggctatctgtgaggaagcagagattctggtgactgcgatcgtggggatgatcggaattctgccaacgatccgtgcgattgaggcgggaaaggatattgcactcgcgaacaaggagacgctcgtgacagcgggccatatcattatgccgctggctgcacgctgcggagtaaaaatccttccagtagacagcgagcacagtgccatctttcaggcgcttcagggcgaggaacgccgcaagatcgataagattctgctgacggcctccggcggaccatttcgtggaagaaaggatctgaaggggcttcaggtcgaggatgctttaaagcacccgaactggtctatgggacagaagatcacgatcgattccgcttcgatggtaaataagggacttgaggtaatggaggcgaagtggctgttcgggacggatcttgaccagattcaggtcgtgatccagccacagagtgtcatccattccatggtacagtttgttgatggggcagtgatcgcgcagcttggcacgccggatatgaagctcccgattcagtatgcgctgtattatccggaacggagatatctgggcggggaacgcttggattttgcaaagcttgggaagatcacctttgaagatccggatccggagaccttcctcggcctgaagtatgcattttatgcggcacgcatcggaggctccatgccgactgtgttcaatgcggcaaacgagcgggctgtcagcaagttcctgaaccggaagatcggctttacggatatttatgagatcatccgctactgcatggatgcacatcagacgattgcggatccggatatccgacagatcctggatactgagcagagcgtatatgagttgattgagagcaggtggtagattgaaaattatcattgcattgctggtattcagcgtgattatcatttttcatgagcttggacatttcctgctggcaaaacgggcaggggtgaccgtcacggagttttcacttggcatggggccacgtcttctgagttttcaggcgggaggtacgcgatactcatggaagctgcttccttttggaggatcgtgcatgatgctcggcgaggatgagggcgacgagggagagggtaccttcgggagtaagtctgtgtgggcaaggatgtcgatcattgtggcagggccgctgtttaatttcctgcttgcttttctgatggcactttttattgtcggaagtatcggctatgatgcgccgatcctgaccggcgtcgcagaagggacgccggccgcggatgccggactgcaggcaggagaccgaatcataaaaatgaacggcagacatatccggctgtggcgacaggtacagaactattccatgtttcattccggagagaccgtcgtgtttgagtatgagcgggatggaaaacgggcggaggtcacggtgtcgccggtgcttatcaatggaagctaccggtatgggatcagtggcaatgtcaatgcgacgcgtcagaaaacgaatgcgctgcagacattggaatacagtgcctatgaggttggctactggatcgagacaacggtatcgagtctgaagctgctcgtacagggtggcgtatcgatcaatgatatgtctgggccggtcggcgtcgtggatgcgatcggagagacctacgaggagagccggtcggacggagccttttatgtatggctgaatctgctgaatgttgcaattcttctgtcggcaaacctgggtgttatgaatcttctgccaattccggcactggacggaggaagacttgtatttctgattgtggaggcgattcggaaaaagcgcatcgagccggagctggaggcaaagattcactttacagggctgatgctccttctgcttctgatggtttttgtgatgtttaatgatgtgaggaaaatcttcttttaaccgaatcaagcaagtcccctgcttcaattgtgcagagcaataagcataagcaatatgttgcggcatgcgcgaaaacagtaaggcgaaaatgaatgctctgaggaaattcagacactgagatttctgaaaggaaagacagtgcgggatttcttcggagctgtttttttacctatttatctggtctggaggatgcgcacacggatattttatttccgcgggcaacaggccaggcagccatgcctgcagatgatctttggtttttattgttttagtaatagatatgatgttggggtcaaaaggtattttgccccctatgatacacggattgcttcgcatttcatgctctcgcaatcctaaaacacctcaaattcgctcatttttctacgaaaaatggctacttttcggtgttttgcgggtcaataagtcatgctttttcatgcaagcatgaaatgcatgaccttttgacccttgtatcatagatattataaaataacatatagattgacattaacaaaaagagatgatatgataaaacaaacgcttgacaaccggaggaagctatattattatgaaaacagatgcgaacgtaagttcgaaaggagaaaagacatggcacaggaagataagttaaaagcattggatgctgcgcttgcgcagattgaaaagcagtttggaaagggctctgtgatgaagcttggcgattccggggcgaatatgaatattgagacagtaccgaccggctccttaagtttggacattgcacttggattaggcggtatcccgaagggacgtgtgattgagatctacggaccggagtccagtggtaagacgactgtggcactgcacatggtggcagaagtacagaagcgcggcggtattgcaggctttatcgatgcagagcatgcacttgacccggtatacgcgaagaatatcggtgtggatattgataatctgtacatctctcagccggacaatggcgagcaggccctcgagattacagagacgatggtacgctccggggcagtggatatcattatcgtggactctgtagcggcattggttccgaaggcggagatcgacggcgatatgggagacagccacgtcggacttcaggcacgtctgatgtcgcaggcactccggaagctgaccggtatcatcagcaagtccaattgcaccgtcgtatttattaatcagctccgtgagaaagtaggtgtcatgttcggcaatcctgagacgacgaccggaggtcgtgcgttgaagttttattcctctatccgtatggatgtgcgtcggatcgagtccttaaagcagagcggagaggtcatcggtaaccgcacccgtgtgcgtgtcgtgaagaataagattgcgccgccatttaaagaggcagagttcgatattatgttcggaaaggggatttcccgggaaggggatattctggatctggctgcgaacatcaatatcattaataagagcggagcatggtatgcgtacgagggcaacaagatcggtcagggccgtgagaatgcgaagctgtacctgagggagcatccggagattatgcaggaagtagaccgcaaagtgcgggaacattacgggctcattcagggagaggtgactgcagatgtcgaggagtctgtagaggatgaggcagcaggaaaggcaaagactgcgaagggacttcgtatggtagagggtaatcgtgcagcagagccggatgtgacagaggaaaatgatgcatcagatatctgagattgagaagctctcctccggacgctattacatcacactggatgacggactgcagtttcctctttatgggaaagagatgggaaagtatggcatcgaggtcaatgaagtgctgtcagaggaggcatatctggagatcatgctggagctgctgcctgcacgtgcgaagaagaaggcattgcatctgctcgaacgcatggaccgtacagagcagcagctgcggacgaagctgacggaaggcggatatccgtcggagatcgtggaacagacactggagtatgtcaaaggatttcattatatcgatgatgtgcgttacgcgcggacttatatggagtatcgcaagaccggcaggagcctgcggcagatggagcgggagctgtatcagaaagggatttccagagcggatttccagaaagcgtcagaggagatggaagctccggatgaagagcagcaggttcgtcagtggatcatgaagaagcgctttgatgcagagacagctgaccggcaggagcgggatcgcctgatccgttttttactgcgaagaggatatgggatggcagtgattcagagggttctgcgtggcagtgaagagatagaatgacgagggtgcaagctggcgatatacagacggaaaagcagactgtaaggattcactgtacctgatggaatacaatacagaacagttgcacaaaaatcgaaaacagggtcactattacttgacacttttaacaaaacagtataaaattgatatgttgtttacgaacaatgaaaactaaataaggaggtgctcctgtgcctggtgcagtaacgattattattgctgttgtgattacgctggttatcgcaattccggtgacgagtatggttgccatcagctaccgccagaaagtagtagaagcgaagcttggcagtgcagatgagaaggcaagacagattatcgatgatgcgctcaaggttgcagagacgaagaagcgtgaggctcttctggaggcgaaggaagaatctctgaagacgaagaatgagttggaaagagagaccagagaacgtcgtacagaactgcagcgctatgagaagcgagtattatcaaaggaagaaagtgttgataagaaagcggacgctctggagcggagagaatcaggaatcacggcaaaagaagaagagttaaagaaaaagagcgcggaagtagaaaagcttcgtggtcaaagactccaggaacttgaaagaatctcaggacttacctctgaacaagcaaaagaatatcttttaaaaactgttgaagacgaagtaaaaattgacactgcaaagctttacaaagagctggaaagcagggcgaaagaagaagcaggcaaaaaagcaaaggagtacgtggttacggcaattcagaaatgtgctgctgaccatgtagcagagactacaatctctgtcgtacagcttccgaacgatgagatgaagggaagaatcatcggaagggaaggaagaaatatccggacacttgagacactcaccggtgtagatctgattattgacgatacgccggaggcagttatattgtccgcttttgatccgatcagacgagaggtagcgcgtatcgccctcgagaagctgattgtcgatggccgaatccatccggccaggatcgaggaaatggtggaaaaggcacaaaaggaagtagagacaatcattcgtgaggaaggtgaggcggcgacacttgaagtcggcgtacatggcattcatccggagctggtacgtctgcttggacggatgaagttccgtacaagctatggacagaacgcattgaagcattccattgaagtagcacagctctcagggctgcttgccggtgagattggtgtggatgttcgtatggccaagcgtgccggattgttgcatgacatcggtaaatccatcgaccatgagattgagggctcgcatatccagatcggtgcggatctttgtagaaaatacaaggagtctccggttattatcaatgcagtagaggctcatcatggcgatgtcgaagcagagtctctgattgcatgtatcgtacaggccgcggatacaatttccgcagcacgtcctggtgcgagaagggaaactctcgaaacatatacaaacagattaaaacagttggaagatattacaaacaccttcaagggtgtcgaaaagtcatttgctattcaggcgggtagagagattcgggtaatggtagttccggatcaggtgaacgatgcagatatggtacttctggcaagggatattgcgaagcagatcgaagcggagctggaatatccgggtcagatcaaggtcagcgtcattcgcgagagcagagctgtcgactacgcgaaatagaaagaagagagggatcttgcagagaaatctgcaggatccttttttgaacgcagatcgcgaagcgactgcgttcatgagcaagtagcaaagcggattgcgaatgtccgctttaccgcagataagcattcccccgcttcaagtgcgcggagcactaagcgactgcgttca

SEQ ID NO: 1255 - DNA, 3831 bp, Unknown
  16S sequences of unknown bacteria
ttcgcgacaatggcagtatcacggagcgggaatatctgcgagcgaagaagtattacctgaagctcaccggcgcggatattgtgctggctggataatgccgatgtactgaatccatcgtcaatgataacatttccttaaatcttccgattctctctggagtattggcaagagtcaatgtataatagtgtgtaacgaaaggagcgcgcgaaattgcctaaagtaacccgtatcgagttcgcgaacgaacccgaaaaacagaaaaagcgcgtcgccgtatattgccgtgtgtcgtccggttcggctgaccagcttaactcccttgcgaatcaggaaaaatactacaccctgtatttaaaacggcatccggactggacattggtggacgttttcgctgacgaggcgatcacggggacacgcgcggatatacgccctgagtttcagcggatgatcagaatgtgcgaacttaagcagattgacatgatcataaccaagtcaatggcgagattcgcgcggaacacaaaggactctctcgaatacaccaaaaagctgaaacttctcggcgtcgccgtcatcttcgaaaaggaaggcatcaacaccctgtcggttggcgacgagatgctcataaacaccttcgccgcgatagccgaggaggagtcgatgtcaatatcccagaatctccggctcgccaataaaaagcgcatggaaaacggtgagtatgtctgctcaaacgctccgtatggttatcgccttataaataaacagcttgtcattgagccaaacgaagccggagttgtgagagaaatctatgatctttaccttggcggactgtccgccgacgacatagcggataagctgaccggagacaataaaaagcccgcgatcggaaaaagctggtcgcggacaagtgtcgcgtatatcctgtcaaacgagaaatacatcggcgacagcctgtatcagaagaaatacggacttccgacagttccattcaccaagaaatacaacaaaggcgaggtcgatcagtactacgccgagggaacgcatgaagggataattgctccagatatgttcacgagagttcaggaactcatgagttcacgcggcggctcacacaataaaggaggcgacagagccgcgtacactctgaccggaaagataaaatgcgctgaatgcggctcgacttataagagaaagctgtgcaaaggcggcgtaagctgggtctgcgcgctccacgccaaaggtaaggaactctgcgactcaaactatgtcgacgaagattatatctataaggctttcatgaatatggtcaacaaactcagattcggcagcgtaccggttctaaagaacgccgaacgcctgcttgattccgccgccatgaaaggcaagcgcgggaatcagtcggcgtccatactgagtgaggatatatcagctctgaactcgaagctcctgatgctcgaacagctcagaacgaaaggctacctacagcccgaggtctatcagacacaggctaacgcgataagagccgccattcaaaagaaaaaggatgagcgtgtcagagcgatggactcggcttatggcacggcgatagaagcgatcaggaatacaatccaccagcttgaaaagctcgatgagccgatcgaaaactttgacgccgaactctttgaaaatatagtcgacacggtgacgattgacaagtcagataatgtgaccttcacgctgaaacgcgggctgaggttcacggaaaggaagtaagccatgaagaagatacggaatatcccatacgggtactcatatgaaaacggcaggatagtcataaacaatgccgaagcggaaattgtgagggatattttcgagcgatacacatccggcgattcgcttggaaacatagcggattatctgacagaacaacgtgttccatacaccgaaaaaagtcttgtctgggacaaggcgaagatacgccggatgattgaggatcagcggtactccggagacaagctctatgagccgatcattgactctgtcgcgcgggaatccgcgctcggaatcaagcgcgacaggctcggacgaagcgagcgtgatctctgtgatgaaatagcgtttctcaaaggcagaatcaaatgcggaatatgcggctcgacaatgtgccgcagagtctcgcggcaaaagaaaatagaaagctggacctgctacaacgatgactgccggcttcatatgagaatcagtgatcgggaactgattgaacgtgtatcacagctcacgcggcagattgtcgacgacgcggatttatactttccggctgaaaacgtcaatgatattgactcgcccgaaatgatgaagcttaaaaatgattacctcgaagaaaccgaccgattacgaccggacgaggataaaataatcggtatcatctgcgcgatagcttctcttgaatacgacgcgctgagcaccgacaggataattgaattccggcgattcaaaaataagctcgctgagtacgctggcatatccggattttcaaaggaaatgataaacgatataatcgaccgcttcacggtaggcagcgactttacgctcaccgcgcacacaaaatatggcatagaggtcacggaaaggagagaaaatggctgaggtcaggaaaattccgcggaagacggtaacagttctcgaaccgagatcttcgcttacagtcgacagagcgagacaccgtcagaagcgcgtcgcggcttactgtcgtgtatcaaccgacaacgaagaacagctcacaagctatgtgaatcagaaaaaggtttacactgagatgatcgccgcgaatcccgagtggtgctttgccgggcttttcgctgatgagggcatatccgggactcaggtgcgattcagacccgagttcaagaagatgatagatgagtgttacgccggtaagatcgactacataatcacgaagtcggtatcgagattcgcccggaacacagtcgaatgccttgactatgtgcggatactgaaatcccgtggaatcggtatcatatttgaggagtagaatattgacacgctcaagaccgacagtgaactctatctggtaatctacgccgggttcgcgcagtccgagtccgagagcatcagcaagaacgtaacatggacgatccgcaagaagtttgaggagggacaggtgccgttcaggtactctcagatgctcggatacagaaaaggaacggatggcaatcccgagattgtcccggaagaagcggttataatcgaggacatattcgaactgtatctgtccgggaagacgatacgcgaggttgccgacattgtcaaaaacaaatatccagttattcccaatggaaagaagataaacttctcgctcggatcgatacaggcgatactgacaaacgagaaatactgcggtgacgcgatactccagaagaccgtgacaatcgactgtataactaagacaagaagaaaaaacaccggcgaggctccgatgtactatgtgcgggacaatcatcccgcgataatcgaccgggacaaattcaaccgcgttcagaccgagatggtgtcgcgcaccacaaaaagacctcaatcgaacaaaaccacgctgacggctcaggggaaatactcaaaatacgcgctgaccgatgtaatgatctgcggcgaatgcggctcgcgctacaaacgatgcacatgggcgagaaacgggaaaaagaagatcgtctagagatgtgtgaaccggcttgattacggtacgaaatactgcaagaactcgccgacaattgaagacagcgatataaagtcggcgattgtcagggctataaacagattcaatgaggaagacgccaatac

SEQ ID NO: 1256 - DNA, 2067 bp, Unknown
  16S sequences of unknown bacteria
gctgtaaacatctcctcatgctcggtggaggggctgtcggtgcgtccgctctcatggagatcccaggtcacataggtcaccgggaagccccactgggtaaagtactccaggctgtcccggaacagatcatcatcatcggtcttgaagtggatctccgcaccgtcccgcagaaagctggcatacagcaccagctgcttgggatgggtcagccgcttcttccggtgtccggtatgaggccatggattgcagaaattgatgcagatccggtccactgtatcctccggcgccagcagcgtatggataatgccgatctcataggcggtcaggcgcaggttatccaccggacgccctgcctctgcatagacagcctggatattccgccgggccactgccagaatatcgctcttgatgtcaatggcaaggagattgatctccgggtgatccgctgccacccgggctgcataggttcccttgccgcagcccagttccagccagaatggctgctccggacgctcaaactgctctgcccaatgtccccggttcttgctcgggtccttcatgaaatacgggcagaccgacagttccggacgtgcccattttttccgccgcattcgcacgatgtaccgctccttctcttaccagtcgctgatatgcgcccgccgcatggcaccgaatatctgcgatttgatgtcccgcttctggtgctccatctcccgcacccactgcttggcccattcccgttcggtatgtccgtccaccggacagctcgacttgataatcgggaaattctcccgccgtactgcctgcttgacttccttttcctccgccagaatcaaaggacggatcacagtcagatccttccggctcagataggataccggcgaaaaacatccgatccgtccctgatcaaacaggttcatgataaaggtctcaaccgcatcgtccttgtgatggcccagagccagtttattgcagcccagctccttggctgtatcatgcaaagcgccccggcgcatcttggcacacagactgcagggatttgtctcctcccggacatcaaataccacccgtccgatattggtgcgcttgatgacatactcaatgccttcccgttcaaacagctccgccagaggggaataatcacattccaccccgccaaagcacgggtccagtgtgatggcaactacctcatagtcaatgccgatgaaccgccgcagccagtgcagcgccatggtcagtgccaccgaatccttgccgccgctgacacccactgccacacggtcgccattttggatcatatcatattctgtaatggccttccgggccatacccataattctctgcataaatggttctctttcgctccagacttgttagtgtaaaatcgcgctccgaccgctccggcacttattttatcatatccccatgaaatagggaagcccctgcggggagcagttctctggcgttcccgggaagtggggtggggaatgccggggtgcggtgtgccgccggacggggcgagtggaaagagaatagtgaatagggaagagtgaatagttgcggtgtgccttgcggcacggattcagaacaaacttatgcccggcaggcggggctatgcgggggaaagagtgctctgcattccgcattactgccgagggtcgccagggaactgattcccccgcccctgcggggagcagttccttggcaatcccggggagtagggtgggtttgccggggcgtgagattcctccttggcgagaccagtgaatagtgaatagagaagagtgaatagctgcggtgtgccttgcggcacggatttggagaaactttcgtccggtgggcgaaactgatccccccgcaggggggcggcaggccggatggcatctgccgcccttcctctaagggggtgacagctgttttttgtgagccggaggcggagaaaaacagcgtcaagagggggataatccccctatgaaaaaacgcggccgcacaaactgagccaatcacaaacccctgcaccgcgttttgggagggggcgtttgtgggggaaccgtaggttcctgccac

SEQ ID NO: 1257 - DNA, 3291 bp, Unknown
  16S sequences of unknown bacteria
agatttcattggtgtaaactattatgcaagctgtacagtcatgcgatggaaagcccgagccccgagccgtcgtatttcgtgcgggcgttgtttcgcccctcttgggaaaagggctcgaacattcgctcctgaaattcctcgctcatgcctatccccgtgtcagagcagataaattcaatggtcacgctgtccccgtcgcattcaagctcgcggcaacagacggttatgctgccgttttcgcggttgtatttcacggcgtttgcggcgatgttcataagaatttgtttgatgtgtgtgggacttcccacaagacggcggtgtactatttggcgattgtcgtctttgacggtaaagcgtatgccgtgttcgacggcctgcatctcggcgacggcgtttatctcgtccaaaagctcgataaggtcgaagggctcgtttgcaagctcggtaatgcccgattcaagcttgttcatgtccagcacgttgtttacaagcgaaagcagatagcccgacgcctcccacatcttttgacgacattctctcagtttaacgatgtctccgtcatagtggtttgcaatttctatcatgcctcggattccgtttatgggcgtccttatgtcgtggctcatgcggcgaagaaaatcgcttttcgaaatgttgtcccgctgagcctcctcggtgattccggcaagatttcgctcgtattcaaattcccgtttcttctgcttgttgattatctggagggtgagtatgaccttgtcgactttgccggtcgaatctcttttttgaacgataaatcttatctgattccagtttcccatgaccgatttgaaatcgtgggaaatgtcggtctggtttttaagacggtcgggaagggttgaaaggtcgagaaatttcgtcaccccgtcgacaaattcgggcatgacggttcgctcggtcattgttttaaaggcctcggcggtgtttccgcttgcaccctcggaaatttggcgttcccctcccacaatgacctcgcggtaggtgtttgatttaaggtcaagggaaaagacaagctgataaattcttccgatggcgagaatgatctcgttgttaagctcggagcgggaaagcgttgcttcgagctccgattttcgtctttcgagctcggcattggccttttcaaactcggctctgtgggcaagctcctcctgctttttgttgtttgtgattcggctgacctgcagttccttttgataaagcgcgtccatatcgcaaaccgaggcaagccaaattctcattccgcttttgagcacggcgtcatgtttgacgattcttgtccagacgttgttgtttttgcccttgaggcggagtatgtattcgccgtccgacgcggcaaacatttcgtcgggaatttcgccgaaaacaagccccgtcatgcagcagccggtattttgctcaaactcgccgtcgccgccgtagccgagcattcgaagggtcagttcgctgaccatgcaaaggggaaaatcctttttgtaatatcccccgataatgcccacgccgtggttttcgtcgagcaaagagcgtatgctgtctccgaggtcggcggaatatccgtcgaaatcctctcgatagaacataccctctttatagctgtctttaatcatactttcacccccgaaagtttacaaatcattgcaagtttatcacaagccgcaaaaatttgcaaccgaaaaatcaaactccgctgccgggcgcaagccctcggcgtataagccttctcaccctgtttatgtgccgctcgaagtctccgcttgatatgagccctgcgagaacaagctgttcaaaggtgggaacggtggaggaataaaaccccaatttgtcataaaaggggtcgacaagccttttcggcagaaccatatatcccacccttaaggattttgaaatggttttggaaaaggtgttgagataaatcacgttgtcaccgtcggacatggaaaacagggtctcggccggttttgaactcaccgaaaattccgagccgtagtcggattcgatgataaatcgattgccgaagtcggcccagcggatatattcatatctctttgaggccgatgcggtgactcccgtaggaaagcttcggtagggggtggtgtgaagaatgtcggccgacgagcgggcgagggcggagctgtctattccgtcctttgacaggggcagcagctcgaattttacctcggccgcgcggtatatgcgttcaagcttgtcataggacgggtgctcgatggcataagttttgtcccgccccataagctcgattatcaggcggtagagatattcggcgcccgaaccgattattatgcgctcgggctccacgtccattccgcggttgagggcgagataccgcttaatggcggatttaagctcctctctgcccgaaccgggggatttttccaaaattccgtcgccgtattcggtcagcacacgccgcatggtctttgccagcaccgaggccgaaaattccccgaaggagggggaaaaagcggttggagcttcattcttttctggcggattcgacagggcaaaaccgtcggtctttttgaaaatgacaaaatatccgctgcgctgttttgcctcggcatagccctcgtcgcaaagcagctcgaaggcgtgctccgccgtcaccgtgctcacccccgtttcctcggcgataagacgcttggagggcagctttgatttatagggatatgtgccctttaaaatatcgtccctgagaaaggagtatatctgaagatagtaggggcgctttttgctgtcgattatgtatttcatctggttatattattttctctctttctgactattgtatatcaccaaaatttattatacactttgtcacgagatttggcaaggaggaaaataaaatgaccgaaaaaaccaatgtcagcaacacaaaaaagaccaccctctggatctgcaccacggcgcttttcatggcgatgaacgtggcgctcagctccttcggcgtgcccgttcccggcggacatctttatcttaacgacataatcatctgcacggcggcgatacttctcgacccgcttgcggcctttatggtgggcggcgtgggagccttcctcggagacttcttcttttatccgacccccatgtttgtgtctcttgtgacccacggacttcaggccgtcgtgatttcgctttttgcccatcatgtgatgaaaaaacgtcccgtcgccgcctcggcaataggcgtggcaatccttgaaggtggtctgcaggatgcctgcacggcctgcgccgatg

SEQ ID NO: 1258 - DNA, 5060 bp, Unknown
  16S sequences of unknown bacteria
cggagtcccccaatggcgtgcgctactgcatcaacagtgcggccctgcgctttgtgccttacgcaaagatgaaagcagagggttacggatatcttctgtatctgttcgaggaatgagttcgcaaaatacaatgatataataagcagcgtcccaatcattatgaaccgggacgctgtcgtttatgctcatgtcggtttattcaaacaggacgttcagcttgctgttatgaagtgacctcttgtcaagagcaaaaataagatcacaaaatattttttcaggcgtgagggcagagcctgaaacagaaccaatcgagccgattcagtattcagagaatacgaccattttgcctgaacttgccgaactatatcaacagaacaatgatttagtcggttggattcgtgtggaagatacgaatattaactaccccgttatgcagacggtggataacccaaatttctatctcaaacgtggatttgataaagaatataccgactatggctgtccctatgtgcaggaggattgtgatgtgcaagcgccctcggacaatgtggtgatttacggtcatcatatggtttcatacattcaaagcgaatagagtacatttatcatttttcccgcacgaaccgctgtcctaaacagatataggaaaatctccaaaatgaaataattttgcaatataaagcaagagaagtgtgccaaagaggagaatgtgccgcagaaatactgtaggtagaaacgctttcaaaaggaaatgacacaaaagtgctaacgaaaaattaggcctttcctctatgataaacagccattgatgagagctgaggaagcagaaaaataggggattcctgaacccaagcctgtaaaatgaagcaaaagcccaatggtgggggaaaacacagaaatatttgattctctcctgttaacagaagggattaagagtctactgtggcgaaacaaaaagaaaggaatgtattggtgatcctttaatataaatatattttaggctgttttctgctgtgcttttcgaaaatattctctttatggcttgacggaggtgcaaagtcttctttatactaagcttgtagtctccaaagttcatagttgtgctttttggtgcatgccagggcaatgataaaacaaatgaaagggaagtgcattatatgtacgaagcgaaagcgtggaaagaaacggatggccccagcttgcggggatttaacgaaaaggaagcgattgacagcgttaacggagcgttggcgcttcgcccgcagattgaaaagattgtcgaccagatctgggaggaaggatttgacggcatttatttcatggggatcggcggtacctatgcttctagtatgcaggttgaagtctatatgcgcggcaaatcgcggctgccggtttatgtggaaaacgcagcggaatttctgactaccgggaacaaacgatttaccgaccggtcggtggtaatctactcttccgtttccggcaacaccaaggagatggtggagctggtggatcatgtccataagcttggcgccagagtaattgcttttattgacacacctggttcagctttaacgcagccgggaaaatcggagcatttgattgtctatccggttaatgagcagctgaagttctttatgttggcaaattatttgatgtataaaaacggcgagtttcccgaatatgaccgttacaatcaggaaatggaagcgcacctggcgaaagcccttgcagaggtggaaatttccgcagacgcctgggcctatcattatgcgaaagagcaggttgctttcaaacaggcgcatccggatctgccgcattattttattggttccggtacccagtatggtgcgacctattcctatgcgatgtgttattgggaggaacagatgtgggttcgtacaaaatccatcagctgcccggagtttttccacggcatgcaggagatcatcgaagccgataccccggtaaccctgtttatgggcgaagatgaacagcgccctctggcggaacgggttgcgcggttcctgccgaaggtttgtgctaattatacgattatcgatacgaaggaatttgcgttgaaagggattagccctgaataccgggggactatttcccatttggtcatgcacggtgtcaacaatcgcgtggatgcttacatggaacttttcctgcgccacccgctgaccattcggcgctattaccggcagttcgaatactaatcgtttagcagagaaagaaaagttggcctgagaggcggcgcgaaagtgcagttgtatatgttgggccgtttcaatgagaattgggtaaaattcagtccaaaaagagaatgcttaagcattctctttttgtatgatgggctgaaaatgagatttctttttttacaaaatatgctataataacctcgtgtgcttacaaaatttttggacggttaaaggaacagaaaatatagggtgttttcggtctgaagagctgattggaaagaggaaaagatatgaaaaaattaaaaagcggtccccttttgatttttctttctgctgtttgttttagtaccggcggattattcacaaaactgctttcgtggcaagcgctgtccattggttccgggagatgtattctctccacaattttgatcggctgctttatggtgagccaaaaccacaaactagtttttaataaaacagtatttttcggcggcctatgtctttgcggtacagtgactttttacgtgatggccaacaagatgacaacagcggccaatgctattgtactgcaatattcggctccgatttttattatcctttttatgtggctcttttttcacaatcgtcccggcaaactggatttgattgcctgtgccactgttatggggggcattgtgctgttctttgtagatggtctgggtggcggcgggatagatggcaacctgatagcgctgttttccggcgtctgctatgcgctggtgtgtatgctcaataccttccccggcggcgatcctatgtcttctgtttttctgggccatttgatgagcgcggtaattggcctgcccagcttgatgggggaaacggatttttctgcatcggccatcggctgcattctggtgcttggcgtttttcagctggggttaggttatatcctgtttaccaaaggtctagagcagacccagcctgtttctgccagtttgatttcaacgatcgagccaatccttaatccgattttggtcgctgttttttatggcgaaaaaattaccccgctggcgattctaggagcggtgattgtcatatgcgcggtggtggtttataacgtggtgaaaacaaatctggcgcaaaaaaaacctgccgtttaaaaagaaaaaaggcaggccgaagagattagagtgagaaattttgcagagaaaaagaatttggttatcggcggtattgctgattttgatatgttttttgattggccttatttggcatcaggagcttacaaaaattttcgtgtcccgccagatcgaagtcaatcgggaagaggccgctgaaactgccgggcgtctgatctcccatcggggcgcctgcactttggcgccggagaacagcctccctgcgtttcgccaggcaggtgagctgggatattggggtgtggaatgtgatgtttccgttacaaaagatggaaattttgttctgatgcacgacagtaccgtaaaccgcactaccaacggccgtggatttgtcagtcattttacattggaagaaattcgaaaattgaggatcgatgtcggagcaaacgtacgttattatatggatttacaggtgccgacgttggaagagtttttgcagatctgcgaaggatatgatatgacgccggttatcgagttgaaagttctattggaagatgcggattacgatacgctggtatcaattttacagcaggcgggtatggaggacaatgcactggtcatttcctttgattatgaaaaattgaaaaggctgcgggaaaagagtccagttcataccatgctgctatcgaaaagtccttccaaagacacggtcgatttggctctgacattggaaaattgtgatttgggaatggactatcgttcctgtaaccgttctcttgtccgttatgctcaggaaaatggaattttgctgaatatgtatacggtaaatgacgaattgatccgccgtgatttgacccgatgggggattcattttatcacgactgacctgctgaaaccggaatgaaaagagcagtaggacggtagagaaaggcgaataatggatttattgtgataaaggcttttagtagttttcccgacaaggcggaaattgcccgccggatgctgccgctttatttgccttaataggggaggaagaaaccgcaaaaggatgctcacctgctgaacggacaagtttaaatgaaaaagccatccgccccttcagcggatggctttttgaatgtcaatagagtcccgccctgccgatcctgcagtcgcttaaacccatcaaatgatagggtgggtaagaccgcctcgcgctttcaagctcccttcgtccggaaaatccgggaggtctgccgtccggcgcgagagaaggaatcccgtaacaagcgtgttggatttatattgtctgcaggtaaggtcgcacagggcaggatgccactattttatgaaagacggctaggattattcggtaaactcgtaataatcctccaagttcttcataaagatcgccgcaacgtcattaaactcctcttcgctttcaatgccgacgagaaattcttcgtcatcttccacctcgttgcgcaaaataatcagttcgccaggctgccccagagaatcgtcatcataagccgggatcatagcgacatacttatgcccgtctttttccagttcatctaacttttcaaaagtatgggcaatgccttcatcgtcagtaagggtcagcaagtccggcccaaattcattttgttctgccattgttttgcctccagattccagatccgtcaatacggacctcgccaaaattgcggctatgccgcgattactgattatcatattatatgattcctgttcagaagtc

SEQ ID NO: 1259 - DNA, 6042 bp, Unknown
  16S sequences of unknown bacteria
acgaaaacacaaatttcgttccctacggctttacctatgacagcttcatgtccgaggctttctgcgatcaggtggaaaaggaacagcgctccaacgccatgatgaaggccatacttcttgacgacgagcaaatcgaaaaatacagcgacattttgtccgacatttccgaaaccgccgacatcgaggaattcaaaaacagcctgacctatgacgaatatgtcgaggattgtaaggcacgcgccgccgccagctgctcctccttcgaaaagcgagttcacggcaaaaataacccttgataaggacaaccttgtgtttttcagcgtgccctttgaggagggctggtcggccgaggtggacggaaagccggtcgacatcgaaaaggtcaatgtgggctttatggcggtcaaggtgtcgggcgacggcaccgagcacaccattcacttcacctaccgcaccccgggctttaagccgggaattgtgatttcctgcgcggcggtgctgctctttgccgcatattttgtcatttataaaaagaagttttctcccggtttcaaggattgcgtcggctcatctcttgacgagcaaaaggagcttgacgtcatgtccttttcaagagaaacgggggagggagccgccgacgcgccgccggccgaaaatgacgggcaaaacgcccccgaaatcggcggaccgagaccccttttcggtgatagtcccatgcctaaagccgatgaaaacggcggtgaaacaaaggaaatttctcccgccgaaagcgatgaacccaaaaatatatttataaaaaagaatgaaaggaacgattgatatgcccattctttatgttgtgcttccctgctataacgaggaggccgtgcttcccgaaaccaccaggagactgaccgaaaagctgagttccatgataagctcgggtgtgtgcgacgaaaaaagccgtatcctttatgtggacgacggcagtaaggacaaaacatgggagcttatcgagaaattccacggagaaaatcatctcgtttgcggggtcaagcttgcccacaaccgcggccaccaaaacgccctcctttcggggcttatgaccgccaaggagcattgcgactgcgccgcctccatggacgccgaccttcaggacgacataaacgtgctcgacggatttatggaaaaattcgccgagggctgcgacgtggtatacggtgttcgcagcaagcgcaccaccgacaccgcctttaagcgctcgacggctcagggctactataaattcatgaaaaagctgggcgtcgaccttgtttacaatcacgccgactgccgccttatgtctaaaagagcccttgaggcgctgtccgattataaagaggtcaatctctttctgcgcggaatcgtgccccacatcggctttaaaagcgatattgtctatttcgagcgtgccgagcgctttgccggcgagtccaaatatcctctcaaaaaaatgctggcctttgcctttgacggcataacctccttcagcgtcaagcccttaaagctcataacctctctcggcattttctttaccgtgctgtcggctctcgggctgattgccgagctaattgtttcgctgtgcggcgttgcggtggcatcctggctgcttgccgtcagctttgtgtggctgcttggcggaattcagcttatttgtctcggcgttgccggtcagtatgtgggcaagatctattccgaggtcaaggcccgcccgagatttttggtggaaaaattcctcggcgactgattttaaaaataacaaagcctgccctcggttttgccgaaggcaggctttttgatttgtctgatgttcagttgtcgaaatcctcaaagaaatttttgaccacccgttcataacccgcgcggtcggtaacatagctcatggcgtggtcggcgccgggcacaaggaacagccgtttctgacttttgcaggcggcatagtttttgaatgtcatgtccacaggaacaaagtgatcgtccatgccgtgaatgaaaagaatgggaacggtggcgtttttcatggcgtcgatggtggaatattcgtcggccgacatatcaattttcattttgcatatgagatttgccatttttcccttaaggccgaagggcagatgaagattgcgctcggtaacgtgccgccaaatctcataaggcgaggtaaatccgcagtcggcaattatgccgtgaacctcctttggcaggtcaaagcccgccgtcatgagcacggtggccgctcccatggaaactcccgcaagataaatcggcagcgttcccgaagttgcttttcttacaaaatctatccaggacaggcagtcaaaccgctccacaagtccgaaacccatgctgtcgccgccgctggaattttgtcctctctgctcggcaaaaagaacgctgcaatcgttttcaaggaaaaactcggcgcaggtcccgaaatcctttttccaggaggaacgccatccgtgcatggcgataacgactctcttgtcgccctccttgtgataccaatgtcctttgagctttataccgtcggcggcggttatttccacgtcctcgtggggcatcgcctcaagctcatccccctttttgagggcgctttcgattttctcgggatcggttcccgagccggaaatgagattgtcggaatttttcatgaccctcggcatgtcgcggtcgagagccgtgtcaacgagtatttttgttacggtgaatgccgctgcccccgcaactgccgccgttcctgcgagaaaacccgctgctttaagtgcttttttgctcatattatcgctcctttaatttttcgtcgcttttattgtttccgttttccacccgtttataaatgctttccatgcgcgcgtcgagtcttgcgctgcggcttgcacagtcgagaagatcggcctccatttggcttgtcatttcataatcctttttatatctgattttatgctcgagagaagcccaccaatccatggatattgtgcggaactgaacctccaccttcatgggttttttctgattgtgaagaaaaatcgggatttccacaataaggtgcaggctgcgatagccgtttttcttgggattttttatatagtccttcttttgaataagggtaatgtcgtcctgccgcaaaaaggcctcggcgagctcgtatatgtcggaagggaaggagcatattacccgaacgcccgcaatgtcgttgatgttttgctcgattgcctccaccgtgaagggcaaatttttgcgctccattttttccataatgctttcgggggatttaaggcggcttttgaccgtttcgatgggattgcggtcatattcgagagaaagttcttcattgagcacgttgaattttgtcgtgacctccattatggcgcatttgtaataggccataagctcttgataggggcgggctctcgttttggcataggtctgaacctcttttgaggacagacgggataaaataagctgttcaagcttgtcctttttattgtgaaccatcgtacatacctcgttacgttatgaccttattatacattttcagccgcttttttacaatggacagattaagtcggttgtacaaaatacatacaaaaacgctcctttgcgcaaaggaataaaacataaatttataaacttttaaaatttcctgttgacataagaccgaaataatgggataatatagagagttgtaagaaggatgtttttttatgcgagtcattaccggcagcgcccggggaagaaatctcaaaacccttgacggtcttgaaacccgtcccacgacccaaaagacaaaggaagcgcttttcagcgttattcagtttgacatcgagggtcgaagcgtgctcgaccttttcgccggaagcggccagctcggtatcgaggccttgagccgcggcgggaaaaatgccgtttttgtcgacagctccaaaagggccgtttcggtaataaaggaaaatatcgctcttgcggggttcgagcaaaattcggcggttttttgccgcgaatggagactttttgtagcctcctgccgtgaaaaattcggcatcatatttctcgacccgccctataaaaaaggcattttaaaggacgcccttcccgctgtttgtccgcttctcgaaacgggcggaatagtgctttgcgaacacgacgcgtctgacgaaatgccgcctcttcccgaatatatgtcccttttcagacagaaaaaatacggaagaattgccttgagtttttacagaaaggaaattgaaaaggcttgaaggaaataaccgctgtttgtcccggaagttttgacccaatgaccatgggacactacgatataattgcccgcgccgccaagatgttcacaagggtcattgtgcttgtggtgccgaatgtggcaaaatctcccaccttttcccttgaggagcgtgtggagctcataaaaaagtccataggcggtctcgaaaacgtcgaggtcgactgttttgacggtctgcttgccgactatattaaaaaggtcggagcgggcgccattgtcaagggtctgcgcgctgtatctgatttcgaatatgaatttcagatggcgcttaccaataaaaagctctgccccgaggcggaaaccgttttcctcaccgccaaggccgagaatatgtatctgagttcatccattgtcaagcaaatcggcagcatgaacggagatataagggaatttgttcccgctgaaatttacgacgatattattttaaggctgaaaggaagataaaaatgaacgttgaagaattgctggatcagttagacgatattatggaaaagggctggagctttccgggcggccgccgcgttatcgaggtggaaaagcttcgcgagctgattgacgacatccgtctcaatatgcccaacgaaatcaagcaggccaagagcattgtctccgaccgtgccgacatcatcaccaccgccaaaaaagaggccgagggcattgtccgcagcgccgaggagcgcgcccgcgccattgtggctcaggaggaaatcaccaaaatggctcaggccaaggctcacgaaatagtgtcccaggctcagaccaagagccgcgacatgagaaaggcggctcaggacttcgtggacgacattatgcgccgttccgacgaggagctgacccaaaatctttccgagcttcgcaagaccagagcctcgctcaagcagaacattccctcggtcaaagccgaggagcagaaataatttttctcaaaaatcaaggccgtgaaacattaaagtctcacggcctttttttgttgcctttcgctccggaaatcagtcatttttaatggcggtgtaaattttttcgcaaattttttcgtcggcctttatgtcaaactttcttgcgaacatacatccgcagctcataagctcgtcaaaatctcccgatttgaaaacataggggtttcctcttttccagtccacatagcgcatgtttgaaatacattcgtcggaaaaacagggcctgtaaaggttgtttttaaagtcggaggccatgagaaccgtctgcaaaaagagctcgtcggcgcaaaagcttttggaaaaatattttttgataaaatcctttttcgacagcaaatatttcgcaaagccgtcggttattgaaaaccaatttgcgccgcagtaggggacgatacccgcctttttaaagcggtttacccccagcctccgctgaagagcaagcaaaaggtcgtccgcctttttataaaaattgttttgccttcccgccttttcgtgaaaggggtggtaaaggcttgcccgctcggcggtggagggacgcaggttaaactcctcggtgcagaaatggacaaattcctttccgccgctttgctcgaaaaattcgtatatttcctttgcgggcttaaggggcatgtcggctcccgaaataagatggaagtaggaataatcgccctttgcggccttttcaagaagcgccagctcggtttcgattccgctgtatccgccccaaaccgtgtcgcggcttaagaaaaataaagttataaatataataactga

SEQ ID NO: 1260 - DNA, 32759 bp, Unknown
  16S sequences of unknown bacteria
cggcgggagcggccacaggggcggcggcaacgggggcagccacaggagcgaacgcagcgcccacttcttccacggccacggaatactgaacaccattgacggtaatgttgaactgacgcatggggtttatcctccttcaaaaaacaatgaatgattagtagcggctgtaggtctgctcgtcgcgtccggcgcgcttccacgcgggcgcgttggagatgcgcttcacatggcgcaccacaaacccgttggggctttcccaaacggcggcaatggcggcggtaatggcggcgatcacttccgcgggaacgccgtccacagcgggagcggcctccaccggaggagcagccacaacttcggggcctgcctgcttcacgggcgcggccttgggctttttcgagcgggaaacaaggcccagaatcgtgatgaatccaatcaggagcaacagacccacgaataccacgatcatgcccagacctgccacgcccaaaccaaaggtaactttttccacggtaaacccttcctttcggcgttacatgggcaggttgccatgcttcttggggggattggaatcccgcttgctcatgagcatttccagcgcggagatcagcatagcgcgggtcttggcgggctcgatcacatcgtccaccatgccctgcttggcggcgttcaggcatccggccaccttctccacatattcggaggcgtacttggcgcgggcttcctccacgctcagttccttgtcggccttgacctcgtcctgatagagtactgccacggcggcctcaggggtcagggcggagatcacggcagagggccaggcataggtcacatcggccatcgccttgccgcccatggccacataagcctgaccaacggcgtcgccggtcacgacggccaccttgggcacggtcgcttcggcataggcgtaaagcagctggctctgcgccttgaacagccagccctgctccttcacgccgttcacttccacaccggaggtgttcagcaggctgaccacggggatgccgtagcagtccatgaagcgcacgaaacgggcggccttctgcagcgcaccggcggtcagcttgccattcgcggccaccagacccacgctgtagccgcccagacgggccagcgccaccttcacggagggctcgtaagccgcgtacagctccagcagcgtaccctgatcggccacggcgttcagcagagcgtccgcgtcagcaggatcgatggcgggcagcagacgattcaggtcgtccgcgtccacgatctccgcgtcttccagattgctggagggcagcagcgccagcacctgacgggccttcagcagggcctcgtcctcgctggcggcggtcagagcgcaagcgcccatttcagcagcgaccttcgcgccgccaaacttctccgcatccacctgctcaccgttcatggcggccatgacctgcggtccgaagaccatcagctggcctaccttttcagccacgatggacacgtcggccagctgagacagcagcgccgcgccgccgatacagggccccagcaccagcgccaccatggggcacacgccgctcatccgggccatcttctggtaaatttcagaatacgcgctcagtgcctgagcgccctcgtcgatgcgcacgccagcgctgtccatcagcgccagcacgggagcgccggtcttctgcgccagttccagcagcttgacgatctttgctgcctgcagctggcccatcgcgccgccacgcacggtgaagtcctgagcaaaaaggtacaccgggcgttcttcgatggtggcatagccggtgaccacacccgcgccctcatcgttccggctcaccagcgcaaacagctccacaaagctgcccgcgtcggcgatcttggcaatgcgctcgcgcgcggtcagttttccggcatcccgctgctccttcaggcgcttctcgtcccctgccagaatttcctggcgaagactgagcaccttttccagtccttgagagttatgcatttccgttctccttccacgccgttgagaaatataacatatggttggacaaaaccggaataatccagcttcatcctgatttgtgctattctacttctcccacctgtttccctgcctgatcgtgatttttttgacaaaatttttcgtttttttattttggccccttttcttcccccaaaaaggaaaagacgcggatctcattttggagacccgcgccgcgccggtcaggcgttatgctctttctgatgcttcatcgccgcgccgatcagctcccggaagagcggatggggccggttgggacggctcttgaactcggggtgatactgcaccgctacgaagaaaggatgatcgggcagctccacgatctccaccagatcccgctcgggattgcgtccagccacgaccatgccggccttttcaaagcgctcccggtaatcgttgttgaactcatagcggtgacggtgacgctcccagatttccgtctcgccgtaagccttggcgctgatggtaccgggggtcagttcgcagcggtacttgcccagccgcatggtgtgacccaaattttcaaggttctgatcctccatcaggccgatgatgggatcgggcgtatcggggtccatttctgtggtattggccatgggcagacccagtttatgccgggcaaattcgatcacggccatctgcattccaaggcacaggcccaggaagggcagaccattctcccgcgcgtagcggatcgcggccattttaccttccagtccgcgggaaccgaagccgccgggcaccaccagtccatccgcgtccttcagcagctcggcggcgttttcgtccgtcaccgtttccgcggcgatccagaggatgtgcgccttcacaccatggaaaatgccgccgtgctccagcgcctccaccacgctcaggtacgcgtcgggcagctccacatatttgcccaccagcgcgatattcaccttttccttgcagcccagctggcgttccaccatggcgcgccactcggccagatccgcttccggcgcatcgatgcgcagaagctccagcaccttgtcatccaaatgttccgcgtgcagaagcagcggcacctcatacaggctgcgggcgttctgattttcaaatacgcagtccttgggcatattgcagaacataccgatctttgcgcgcatttcttcgggaatggagcgttcggcccggcaaaccagaatatccggtgcgatgcccaacccggacagttccttcacgctgtgctgggtaggcttggttttcagttcattggccgcgttcaggtacggtaccagcgtcacgtggatatacaggcagttgtcccgtcccacctcggcgcgcatctggcggatggcctccagaaaaggctggctttcaatatcgcccacggtgccgccgatttcggtgataacaatgtcgggagggttctccgtgcgggaaacggagaggatgcgatccttgatttcgttggtaatgtggggaatgatctgcaccgtcgcgcccagatactcgccccggcgttcccggtcgatgacggtcttgtagacacggccgctggtcacgttgctgcgctgactcaggctttcgtcgatgaagcgctcgtagtggccaaggtcaaggtccgtctccgcaccgtcgtcggtcacgaacacctcgccgtgctggtacggattcatggtaccagggtctacgttaatgtagggatccagcttctgcatggagacgcgcagcccccgcagtttcagcagccgtcccagtgacgccgctgtgatgccttttcccagggaagaaaccacaccacccgtgacaaagataaatttcgtttgcatcccgaacactccccccgcatttgatccacgttaccaatctaaaaataaaaaacctttcatattctaggcaccgtcgagccgttcgtcaaggatttatgcaaaggaaaaacaaaaaaaatgaccgcgattcttccactcctttgggaggagggaaaagacgcggcccatcgttgtttttttcaagcattcacgccgttttcatgcttctgctgaatctctttcatcgtcacgtccagttcccggtaaaaatcgccgatctgccgtccgtccaccagtccgtggtggcacagtaccgtgaccggcatggtcacgcggccgccctccgcctgatactttccccaaacgaaacggggattgctgtccgccgggatgggcgtaggttgagtcacggaagtgtaatgcacccacggcacggtggacacatagaaatatggcagcaggtccgaggtatcctcctcgatggtgccgtgacgggccgcttcctcctgcacagggcgggccgcctgcaggaacggcacgaagtcgtcccggcagtccagctggcaataggcgtaggttccatcctcccgcgccacggtgtgggaagtgggacaccacggatattccagaatctccccatctttgatccgctgacggagggcaggcacccggttggccgctcgggctgcacaccacaaaaacgccaggaagaacggcacgccgctttccttctgccaatgataaaactccgtaatatccacctgaaccgtcatgcccacatagggatagcccatggtcagaaaatagtgaaagtgcttcgcccggggataggtgctcaggtcgatatgagtcggaacgggtgtctgaatggccatgatggttcctccgtcttttgggattggttgttatccgatttcatcatacctccctctctttcgccttgtcaacgacattttccaacctgtgtccataagtccctgttcgaattgacacgctccgcaaaaaaggctatgataagatgtatttttccacccggaaggactgataccgtgcgcaaagcggaaaaccgcttgagaaatcgttttttcattcccgcctactggctgctggcggcagtgctggcctgcattgtcaccctgagcctcagtttttggcaatacggtacggcggaagggtttgcgggcgccccatggcgctctcttatgcagatcgcatggcgaacggcggcctatgcgctgctgggtacgctgctggatcgtatgctgaacctgtctgccgcagcaaagtccctctcccccttcgcactgggcggcgggcttttgttgtgctggcttccttatttatattggatctttcccggcacggtttccaatgacagcgttacgcaggtgctggagatcatcggcgtggaaaagctgggcaatgccaatcccattttccagacagcgctgatctacttcttccgtggcgtcggcaaggtgctgggcagcgcggacgcgggcgtatttctgtactgcatggtgcaggcgctgctgatggcttggctgctgggggcgctcctttccgagcagcgaaagagtggcgcgccccgctggctgacggtgacttccttcctattttatgggctatgtcccgtgtttcccttgttcgcattctgcgtgggcaaagacaccaacttctccatggcggtgctgtggctgtccctgttgatcgcccggcggctcctttcccagtcagacggcgaaaagccctcccgctgggaaacgccctgcctgtgcgcggcggcggtgctttgcacacttttacggaacccgggcttttatctggctctcctgacccttctgattttactgatcttttcccttcacggaaagcgccgtgtagagggacaatggaaatcccccgtttgggcgctgggctgcatactggcggtttacggagcgctgcatctgcttctgatcccggcgctgggcatcgaacccatgccagctacggagaactggtccctgccgctgcagcaggtggcgcgggtcgccgcgacccatccgttgaccgacgaggaagccgccgccatcgacggcgtactggaactggacaagctggcggaaagctacaatggcgagctcagcgacccggtgaaggatctttggtgcaaggactcaacgaaggagcagaccgacgcatttttccgcacatggcgcagtctcctgcgaaaatatccgcttacctgcctgagcgccacgtttcataatacctatggctatctgtgtcccggctttttgagccggatcaagccgaccctgctcattggtcggcaaaagaccatgactcctgcgctggaagccgccttcccctattcggtcaacgtccgggcggacgacctgaaagccctgatgaaccggctaagcgatttcgccccctttcgggtatggatcgccccggggctgtacgcgtgggcctgtctgttcagccttacgcaacttctgcgaagccgaaaaaagcggctgttgattgccgccgtgcccgctctgttttcgctggcaggctgcctgatgagcgccgtcaacggctacttccgctacgccatgccgctgtacctgtgtgcgccgctgcttttgtggctgtgcgcctgttccaaccctcatacaaaggagtgaaaaagtcatgaagctattggttgctctgccctgttacaatgaagccgaaaaaatccagaaagtcattcaggagattccctcttcttttgaggggatcgacgaaaggcggattcttgtggtggacgacggcagcgccgacgaaaccgcccgtctggctcacgaggctggagctgttgtcattcgccacaaggtcaacaaggggctgggtcagactttccgggacgcggtggaatacgccgtggttcacggttttgacatcatggtcaacatggacggcgacggacagttcaacagccagaacattgccgacctgatcgcgcccatccttcacaacgaggcggatttcgtcaccggctcccgcttcatgaccggccgggaaattcctcacatgccgcccatcaagcgctggggcaacgaccgcatgacgaacctgatcagccgcctgtgccgccgcaagttcaccgacgtcagctgtggcttccgcgcctacagccgggagaccctgctgaagatcaattttcacggccgctacacctacacgcaggaaagcttcatttctttctgcttcgacggtcttgccatccgggaagtgcccattgacgttacctattttcccgagcggaaaagccgggtggcgggaagcatccccaagtatctcaaaaagacctccggtattatcgtagggctgatgcgcgattattaccccatgcgcttctttggttcgatcggaggcgttttcctgatccccgcgctggtcttcggccttatgttcctgatccattatctgaaggtaggctacttcagcggttatctgtttgcagggctgatctcagctttctgtctgctgatctccgtgctgatgttctgcttcggcgtggccatggagagcatggtgcgcgtcaaccgcaatgaaaaccgtatcctgtacgagctgcgcaaaaatgcgcccattcagcctgaacatcccgaagaggtgctgtacaaatgaagatcatgatttccatcgatcaccccgcgtggatccaccagttccgctacatcatccagaaggaaaaggaaaaaggaaacgaagtgacggtgctggcgctggataaggacggcgatctggaactgctgcggagctttggcattccctacattctctgcgcgcattccaccggcaagaacattgtagagaagggctttctctttctggccacctgcctgaaccacacctattacggtctgaaatacaagccggatattttcatcggccgcggctcccccatgctggccatcgctgcgtgggtctgccgtaagccccatcttctgtatgaagacacggaggtcagcaagttcagtctgaatatctgcaagcatatctccaccaagatccttaccccccgcacctttctgaccgatttgggcccccggcaggaacgggtggatacctacaaggaactgttctacctgcatccttccgtgttcacgccggatgctcaaaagctgcgggaggtggggtttgacccggacgaaccctacatccttgtgcgcttcgtggccttcaacgccagccatgacattggtatcaaggtcatgtccgacgaggaaaaaatcgcgttggtggatcgcctgtcgaaatacggccgggtatatatttcctccgagggccccgtgccagacgaattgaaggacaagctgctgaaaacgccctaccatctgatccaccacgtgctggccttcgcccagctggtattcagcgaaggagccaccattgccagcgaggcggctgtgctgggcgttcatgccctgtacgtcaacaccattcagagcggctccacccgggagcagagcgagcgttacggcctgttgtactgcttccacgacccggacgagcgtttccgtcaggcggcggacaaggccgtggagctgctggaaacgccccatctggtggaaatgggtcaggccaagcgacgcaagctgctggaagaaaaagtggacatcaacggctacttcatgcaggaaatggaccggctggccaaagtggggaggaaaggcaaatgacgtggctggatctgggcaacggctggcggaatctattcctgttgtcggcctttctgcaggccgtttcgctggggacgctgtttgcagcccgccgctggttttccacagggagccgtctggcctgttttctgaccggcgctgcggcaacgcccctgctggaatacctgtggatgctggcgttggcttttctctggccccatgcacccaagctggtctatatcggcgtaccgccgctggctgccggtattttgctggcggtgatgctgctgcgccgcattcgccgaatcccggctcttttccggcggggactggcgtttgtccgccgtctttgccattttgacaaacccgcgctgatcgcgctgtgtttcgccctgtgtatggtcattttgctggccccgatgtgcgtccgcttcctgtccagcatgaactgcgcggaagccagcgacgcgggcgaataccttgcgctggcgcagcgctactgcactgaccgaaacgtgggcgaactgctggaaaaaaacgagaccgaagggcatttccgcggcaacagccattttccctcgctggagctgtacatgagctacggactgttccatacgggcggcgacagcttcggctacccttacgataaacccgcctttaccgctatcggactgcttttattctatgtggtcgctgcttacggcgcgctgcttttgaccttctgccgggaaaaaaagggctgcgcgctgctgggcgttcttttgttcaatctggtgccgaatctttactattccgttgcatccgctccccgggatatgtggcgcattctggcggtcttactcagtgtattggcctttgcgggacttcagccccgcagccgcagcgtaaaagcctatctcggcaagcttctgttcgcctttgccctgtgctttacggtgatgagcacccatgtggtatgcttcgtagtgctgccctttgtggtggtggcgtgggtcacctggcgctggatggagtctctgatgctgcgccggggcggagcaggacggacacttctttcctccatcggcgtggcgctggccggggcggcgggcaccattaccgcctatctgggcaatctgtggtgcttccgccagtggggcgaaatgtctccgtggcggctgatgaccagcttcacggatgctccgtggtatgacctgtacatgaagatcgaatacaagctggaggagaccaccactcatctggatttttggtcggcccgaaatgacattctgctcagttatgccactcccgtgggcatctggggcttccggctggcgctgctgggccttctggccgggctgatcttcgtgatctggcggcgtgtcgcccttcgccggcaatcccaaaccctgctgatgaacgccggtcaggacggccccactgccgtcgttctttccttccgggaggacgactccttccgcacggtatcgccgcttttgttctgttcgctgtgtacgctgctgaccgccgcgtccatgctgggctttctggacacgcccctgtatagcttttccggctcgttcctgaaactgccccggtatacgctgcaatggttcctgctggcctgcgtcataatctgtgtctccctgtccgctctttcggatgtgtggcccaagctgtgcgaacaaggtaagcactggctgcgccgccggcaatggcgcattcctgccgggctggtcggcacgatccggcgacttcccgcatggttctgcgccctgctgtgtgtgcttggcatggtgcagggcacccggcagacgggctacgccgccagtttctaccgcaacagccgcaatatgatggaaaacgaaagtctcctcatggacaacggcttccgggaacattacggtctgctgatgacgctggcggacgcgctcccggctgacgaaaccatccttatcacccaatccgggtatcagtatcccctgaaaggcaaaggatacctgttgcagagcaatcccatcgtcccgattctgaacatgacggaggcggaaattcccggcgaactggagcggctccatgtgggaatgatcgtcaccaatccctcgttctgggacgatcgatatctgatcaagtccaccctgaacgattacctgaccacgctgccctcggagcaaatcgtcgaaacgggatttcttcgcttttacctgcttgatcccgctttggttcccgtggcgcaggctgcactggaaacgacgaattgacgcttgcagccaagccccctttcccctattctgccgattcaatggaggtctctatgaactgtcccaaatgcggaacgccggtcatgcccggcgcagccttttgccccatctgcaacgagcccctgcagcagtcgccaaccatcccgccccagggctttcccaacgaccccaacgccgtttacggtcaacagccgggctattcccagcagccgccggtcaacggaatgccgggcggctatcagcaaccctatcccaatggctatcaggcggggcagcagtccggttatcagccgggctatccgccctaccagcagacctaccccaccggctatcagcaaccttaccagtatggggaaacgcgccagaatcctttttccagcgccatgagcgagctgccccacgtattttccctcagcttcaaaaaccccggcgaggctttccacagtctgttggagcgcagcgacaccatcaccggccccattctgtgcggcgtggtgttgctgctcagtttcttcgccggaatgaccgtagcccgcggagtggtcagcattttcttttccgccgtctcgtccctgaccggagtcagtctggccggaagcgccagttccatgaatcagggcatcaactatgtggccgggcgcatcgccccttctgtcggcggcgtgacggtgctctgccagttgatctccatgctggtgccggtgctggtcagcggcatttacctgctgggcatctgcaaggtgcctttctcgtggcctgtgattttcgggctggtcagcatccccagcattccttcggcggtagccgcgctggccgggatgctgctgagcctgctttcgccgtggctgacgatcgtctgcgtcctgtgcggcatggcgttcagctacctgcagcttggagccctgctgcaatatgtcaccgggcgctctgaacagcagctctttctgcccaaaaccgcctgcatcctgctctctctgctgctgaccctgctgctgcacctgctgatcggcggcgggctgatgggcaacgtgatgaattacatgattcagctgctgtccaacgtggggtctctgctgtgaagcggcccggcaagcgttggctctggctgatcccctgtgtgctggcattggcggtcggtcttttcctgctgctgcgctcacgcgccgcttcactgtccgctcccgctccgtctgcggcgcttttgcaggcgtcggacggtctggacgagatcgaactgcaggcggagtttctgccggagagccgctctctccgggtcacccagcgcatggcgctgacttcccgggttgatgacgcccgggacacgttggtactgcgcacctggcccaacgcctaccagagtatggagacctctccgctgaccctgacggagctgtacgatgcggcttacccggagggcttttccacgggtgcgctggtcatggaggaggctaccgtcgcccatggagacggcgcggcggagaaagtcttctaccgctataccgacacggccaagaccgtgctgtctctgccccttgcccaaagctggggctgcggtgaaacgctgaccgttacccttcgttacacgctgatgctgcccaaggcggcttcccgctacggggtaatggatggcgtatatgccgttggcaacgcctttcccttgcctgccctatatgaaaacggcgcttaccgtaccgatgatcattcccccatcggcgatcctttcgtcagcgaatgcgccaatttctcattggagctgaccctgccggacggctaccaatgcgccgcaacgtcgttcccctccgaaacccgtcaggacggtgaaaggcaggtcatgaccttttccgctcctgccgtccgggactttgccttggtactgtcccagcagtttcaagcggtgcaggccatggagggcaatgtgctggtcagcgtatatgctcccgacggaaattgggcccgtcaggcgcttgcctttgcgcgggcggcgctgcgctgttacaacgagctttacggcgattatccctaccccagtctgacgctgaccgggtcgaccctgccctatgacggggcggaatatccggggctgtgtctgctttcttcttccctgaccggggacgaactggaaaaggccgcggcccatgaagtggcgcaccagtggtggtacgcgattgtcggcagcgacagtgtgaacaacgcctggcaggacgaggctttgagtcagttcagtgcgctttcctactgggaacgcgcccacggagccgccgcacgggccgaatggtacgaacaggagatcgctccctccctgcgcatcacgctgaatgtcacggctggcgcgcccctcagttggttttccagtctgggagaatacaaaagtctggtttacgaccggggaacggcgctgctttgcgcggcggacgagctgctgggcggacggatgaacgattttcttcgcttgtaccgggaacgatgtgcatttggcatggcctcccggcaggattttctatcccttctcaccgaatattccggtgaggattttacgccccttttcgaggactatctggacacgctgatcacgccctgactgggcgaacctgcaatacgaaaggatgattccatggacgcatccctgatgcggcaaagtgcgctgctgattcccgcctatcagcccgacgaccgtctgcccccctacgtggaggcgctgaaatcggccggggtgggcaagatcattgtggtggacgatggcagcggcgataaattccagcccttgttcggttccattccgcaggatgaggtcactcacgtcatttcctacacgcccaacggcggcaagggacacgccatgcgggagggaatgcgctatctgctggatcactgcccggagcagcgcttcatcatcacggcggacagcgacggacagcacaccgttcgagacgtgctgcggatgatcgaaagtctaagcgaaaaccacgaaggtcttctgctgggcagccgggatttttctcaggagaacgtgcccttcaagagccgcaacggcaatcgcatcacatctgcggtattcaagctgctttacggcgtttgggtcagcgacacccagacgggtctgcggggctttgagcgttcgctgctgcccctgatgatcgacgtaaagggcgaacgttacgaatacgaaatgaacgtgctcatcgaatgcgcccagaaacacattcccatgcgcgcccttcctatcgagacggtttacgaaaacaataacgaaggctcgcacttccgggccttccgggacagtgcccgtatctacggcgtgattctgggcggctttttccgcttcatcagttcgtcggtcatcagctttctggtggactatctgctctacctgctgctgaacaatctgttcaagcgcttctgtccggggttggagcaccagttccgcttcctgttcatttccgttctcagccgcatcgggctggccacggtgatcgcccgcatctgctccggcgtggtgaactatctgatcaaccagaagatggttttccactaccacggttccggtagccgcagctttgtgcgctatctctgcgttttcgttctcaacatgctgctttccgccggtctgaccagcaccctgcacctctggctgggttggagcgacaacatctccaagattcccgtcgatctccttcttttcttcctcagctactatctccaacgcaaatgggtcttccagcagcagggctaaagccctgcaccccacaccgcgccctttgggcgcggggctgctcgaacgacatgcggcttggccgtgaagctaccgccgctcgacaacaggtctcgcggctcgcgagtctggtgcggctccctgtttggtggccgattcagaccgccattcggcgacaggcctcatctcgctgaaaaggccagcgtgcaaaagaacacacgctggcctttgttgccacgataatattccgccccgcaatgggtaagcctgcccgccgtccactgtggggaagcacaagcctcccttttttgcgtggcaaaacagccaagtcgcaagaaccctttcaagccgcaagaggtaagtatgccccacgccaactgcgggggagcagagcggcgataggcagcggagggaaaaaggcccgcccattttgacggcggaaaaaggcgagctccgagcgcgcacgactgtaggcgtaagctggccaactccgctgcgcgcgacatagcgagccccgccgccaaaatgggcagtagaagcctttttcccggagtcgccgtgccgctggctttcttttgcacacttttctttcgccaccgaaagaaaagtgtgagcgccccttgggacggccagtccctatccgcgccggagtcggcgcgtcaggccccgccaaggggaatttcttgcggcaaagttgtctcctattgatgcaatgcagggtggctttcctcggggcaaacaatcggcgcggttcgcactgccgtgcgtcccgcttgttgtttgcctgaacgaccggtcgctaaccgccttcggcggttgtatccactggatgacggtgaacttttcaaatttaatttgaaaagttcagtctgccaaaggcagaccgggttgcccaagggcaacccgccttgcgtcttcccttcgttcccctttggaaaccttcggatcgccatccgaagcaatcgagtgccccatagggctgcaagcccttctcccgcgccagaatcggcgcgtcaagccctacccacttatctcaacgccttcggcacgcactcctccgaaggatgatcgcacttctcgcactgcccgccgcagtgactcagctgtaccttctccccgagaatgctcatctccacgccctgctcccgccgctcgtcagcctgaaagccgtatttggcaaagaaagcttccgtttcgggtggggtgaaaagcgtgattttcaaagcattgtgggtcagcgccttgaaaaggagcagccgaaccagcagatcaccaaagcctctgccccgttcttccggcagaaccgccacgtcccccatgcggaacgcaccgtcctgccaccaaagccgggcggagccgactgcgcgatcttcccggaaaacgattacctgctgggcctgatcgtccagcgcgtcccgaccgcggcccaaaaccgcccgccggatgctcagcggcagctcgatgttgctgcccaccgggtaccatctgccctgtaccatctcaaaaacccccttcatcatttggaaaggaaatggattaccatggaacatgaaaagatccttcgcatcaatgaactggccaaaatcaaaaaggaacgcagcctgactgccgacgaagaggaagaacgcaaggcccttcatcaggaatatatcgcgggttttcgccagaacatggaagccgtgcttcaaaatgtgcgcgtcaagcagccggacggcagcctgacgccgctgaaaaagaaagcggacaagcttcactgacgcttgccccaacagttctattataacccggaagcgccggaaactcaaggattttatttgtgaaaaagcccttgtatctttcgggcacttcgggtataataaaggcgaaccaaggggtaagaagtaagagacgagatcaaaacagaaagtaggcgattccgttggacagcaaggatcagattttgggcgggaatcccgccgaggaagaagaagcccgcgatctcatcgaaggtgtcgatgaagacggtaacaatgttctgctggaagtggttcgctatttcttctacaacggcgaagaatacgttgtattgggcgatgctcacgatggctgctgcgactgtggatgcgaacattgtgaccacgatcatgacgaggacgaagaagaggaagccgtcaacctgtatatcatgaaggttgtggaatccgaagaggacggcgaggaaatggaatccttcgttcccgtggaggatgacgacctgctcgaaaagctcattgaggtcgttcaggctgactttgaagccgacgacgaactggacgattaacggtttttgtttcccccataccagttttctttcccctgttttttccatccaaccggctgctgccgtaacgatagatttttggagaagaaagcgggcaggtcacaaaactgaataatcccggaaaaaatcccgcgcggtatcgtccgcgcgggttctctttctctgaaaaagcccattgcaacgaaagaaggcccatccatgcagtgtgaacttttcccgttccatacccgccagccttaccgtttcgtggtcattttgtccttctgcggcgaacagttggtgctgagccgccataaacaacgcacgacctatgaaacgcagggcggtcacatagaacccggtgaaacgccggagcaggccgcccgccgggaactctgggaggaatctggcgcggcagaatacgatctggttcccctgtgcgactactgggccggagacgaacacggctgggctaccgggcaggtattcgtggccgatgtgcggcgctttgaagccctcccggaaagcgaaatggcggaaatttgtttttttgacacgttgccggagaacctcacctatcctgatcttactcccaaattctatgaatttgccctgaaaaagcgctgcaatgctaccccaaagccatagaaaaacgcccgatttgccaacgcaaatcgggcgttctatgaaccatacataaatccttatccgcgggcagcctcggcaaacgtcgcgaacaaccggcgggatgcttcgtctcccgcctgcgtcatcttttccgggtgccattgaacgcccagcacaaacggcgcgtccggcagctcaatggcctctaccacgccgtcggcagcccatgcgctcaaattggcgcagctggccacctcccccaccgcctgatgatggaaggagttgacccagatttcccgctgacccacgatctgctccagcaaactgccctccgccacttccacgcggtggcttggatactgacccagcgccgtctgtcggtgcgacatggcgggcagtccttcctcccggcggtgctggctgggcagatcctgaatcaacgttccgcccagcgccacattcagcatttgaacgccccggcagatgcccagaatgggcttttctttttccagaaaaagcttgaccagccgcagttcactctgatcccgcaggggattgacctcgcccaagccctgcaccggctcctgaccaaagcagcggggcgaaacgtcattgccccccgacagtagcaggccgtccagttcttcggcgcactggcgcgcctgttcatccgtcatgtccggggccaacaacagcggaatggcccccgcctccgtcagagaacgcacatagtcccgattgataaaatactgactttcctccgtattcatgctgcccgaaatgccaatcaacggctgacgatgcatgaaaaccccgcccttccttttcttttgttccgaatttagcttatgctgccccattcgatcttttcaaaatacgcggcgttttgccgcccattttcttatttttcgcagttgttcacgccgttctgaacggcttcttcttccacttcccgttccgcgtcccggagatcgtcctccgccagctgcccgccctcggctgcccgaagatcgtccgccgtcagggtcatcagcatttcccgggtaacgtccggcagtgccgccagccggttggcctgtgccgccacggtacgctcaaacagattgcgcacgccgcgggcattgccgaagcccttcacgtccagactcaacagtgccagcagactgcgtaaaagtccgcgagcgtcctctgccagctcgtagccgctcttacggcagcgcatatcgaaaatatccatcatttcctgcaccgtatagtccgggaaatttaggaaacgattgaaacggctttccagaccgggattggaatgaacaaattcctccatcagctccgtatagcccgccacgatcacgatcaggtcgtcccggtgatcctccatggccttcagcagggtgtccaccgcctcctgcccatagtcattgccgccccggttggtcagagcgtaagcctcgtcgataaacaaaacgccgcccatggccttctgaatggcctcaccggtcttgatggcggtctgacccacatagcccgctaccagcccgcttcggtccacctccaccagatgccccttgctgagaatacccaagctcttgtaaatgcgggccatcagccgggccaccatggtcttgcccgtgccgggattgcccgaaaacaccatatgcagggacagatcattcaccggcaggccgttttccttgcgcattttctgcaccgtcaccagattgatgaggctttccacctcttttttgacggtatcaaggccgatgtactcgttcagttcttttttcagatcctcgatgttctccggcggtttctcctcaacctgttccgttgctgcaggagtctgctgcgttttcttttcttcctcggctttcccggcgggagacgcgggaacgtccggcgtttccgcagagggcgagagcacttgcggcgcagacggtacgccccacagatcgtccgcgatccggttcagattgttccgggtcatctgattgataacgtccatttgcagacggatgatttcgtctctgcgatccatggtatttattcctccatcagcgccgtccgggggatgaacgcacggcacggctgattttctatcgtagtttccacataggcccattcgctgttcaggaaggccagcagcgtcacgctgtcccccgtccgcagggcggcaagggcttcccggcccagcaggggatcgtctgtcaacgagcaatccctcgtcagcgtcatgggcatgacgatcaggtacagtggctccaccgtagccgtatccagattttccgcgctgatatagccgatgcggccctgctggccgtttccgatggaatagctgaccagtgcccagccgtcctccgttacgccgtaaacctccagattttcatccgtgtccgtttgggcgttgcctactcgataggcgttttccgagggagccgtgtagaccgcctcggtctggcggcggcggaaggaagcctccggctggagggacagaaggggcgcggcggcctgcgcctgcatatagggtgaaagcgtcggcgtaggcgcggcggtaggcaccggcgtgaccggcacgggcgtatccgtggggacgggggtgtcggtcggcgcaggggtatccgtgggcgcaggggtgggggtaggaaccggcgtgggactgggcgtaacaaactctgccggggccaccgcgtcgcccatgcggttcagcacatagcccttgggcgcttcgccgtccgtccgcagagtaaaggcactgtcgctgccgatatccaccgttccgttcagcgcgccgctggcgagctggccgtcctgcagggtgtagtcagacacctgaatcgtcagcaatttgccgtcctcggtgaactgataataggtggttccatccgacccaagctgcttccacaggccgtgagtcagcacctcggcaatgatccgatcattcgcctgcagcggcatgggggtcggcgtgaccaccggcggcagggagaagttgggatccagtgtggcggcaggctggggagtaagctccggcacagccgtaggcgcaagggtttccacaggagcgggcgttacggtcggaacttccgtttccactgccgtgggggcaggcgtttccgcgctctgtgccgtctgctgcatcaccggggcgaagttcaggccaagcagttcccacggcagttgaatagacagggatttctcgtacagccgccccgccgcatagatcacattcagcgagtttttcgtcaccagataggaatcccccaatgggacgctggcggcctcgctgacattgaccagactggacgcattctggaaaatgacccgtttcagagcctgttccacggcggcgcgatcctctacgaacaaatcttccagcgccaacgaacggcggctgttcaggtcgacgatccgccagaaaaacagcgtttcctcgtcggacgctccggctgcgctgagggtgactgtggcttccacggacaggatgccgtcaaaatccatggacgcggtatagccgccccggatggtgtccgtcgcgccgccgacgtaggcgctgtcgtcggccaactgttcctgccggaacagggtcaaaatggggtcggtgatttcttccttcaaatactgctgcagcgcagggtcggtgcattcaaaggtaggataatccactgccaggcgctgacggcttcgattttcctcctgatggctgcgataaacgctgacgtcgttccgggtcagttccggggcgctttcctccgccagtacaggcaaagccgccagcaaaaggcagagggtcatcccaagggccaaaattcgtttcatgaatgggttcctccgtatttcagttcagctccaccgggcaggcggatgcggtggacagggccacatactgttcctccccgtccttttccagccggaaatagtgagaaagcggctggggataagcagcgccgctgacgtagcgcagagcggcggttcctcccgtgccctgataagcgtccgtgcgccactgcagatcgctttccgcaggggcgattgaatcatacagaaaatcatactgccgctggccatggacgtacaggccgtatttgccgctttccgggtcacggaccaccatggcgtcgcagtcggggtacagggccacgtcgtcgctgaccagcagcgcttcgtccggctgactgagctgcacgacctccccatcgtccagataggccagaccgcaggcgctgatcaccacgccgtcgggtgtagcttcgctgcgccaacgcacgctgctgccatcgctgcccagaatgtagagcgtgtagcgggtctccgtgtcgttcagattgccggtgtccaccagccccagcgtatagtcgccggtcatgggccatgctttttccagccacaggggactgagcagcgttccgtccgcgttgatgaaattccactcgtcgccgctttccgcttccagcagcgcccacccgttcatcatgggatgaggcgttaccttttcgcccagcgcggcctccacatcagtcagtcgcagcatggcggaaccgtcgtcctgaatcagccacggggactgacgcacatagtagccgccccccgccatggggaacgtgtcatccgggcccagatcctcaaaatagcacagaagccttccgtccgccgcgctgaaaagataataatcgtaccggccgtcctgacgggcgcagcgggacaggatactggtatcccgaaccaccacgttttccagttccagtccgccgcacagcgcctcaatggcctcccttgtgcggctggtgacgctgaccggcacagccgcgtcatagctgcgtaccggcgcgggcgtagccactgccgctgcgggggcgctgacctccggcgtatggccggtcaggctgccgatccactctgacagctgctgccgaaaggcatatcctgccccggccagaaccagcacggcgcagccgatgacgactcctttgcggagcttcttccgccgtgcccggtcggaaagttccttttcttcctccgcttcaacgcggtagcccttgtgtttttccttttccgatacaggctcgttccacgagacctgtcggggatggtacaccgtcgcgcccggctgcgcagcgtccgcctcttccccatcgtctgcatcttccagcggaaggagctgcggctcctcgccgctttgtccctttccgtagccgaaatggcgcagccgtaccggcggcgcgtaggcgtattccggttcgcctgaagtttcgttttccgtttcttctgacgggcggcggtaataagccgaccagtctggctcctccatctggggcgcgtcctgcgaaaaatcggacgcatcctccggcggattttcattttcagcctgataggtttccattccggcctgttcttccggacggaacatatcgcccgcccgttccgcccggcgggaacgcctgcgggggccgggggtaaaggtactcatcggtgggattcacctctccgtttcttccacgcctgttgcccagcgcagaaccgttctgatccttcttcaggttccaatactccgagaataaagataacacttccgccccattccgtcaaggtaagcgtcctttcgacagacttctgcgagcaaaagggaagcccgcgcagcgcgacgccggcgggcttccgttctcttggattatcaggcgttggcgaacttgtcgcgcaccttgtcgatctgctgctgcggggcctgttccatgggataccagccctgctgggacatttgattgtaaatttcgttttgcatacacaggctctcttccagcgcgtcgtcaaaggcggcgtgcacgttctgggtcgaggactcgatggtgccgtgcatatacaggtcgcatacgccctttaccgtgttgagcaggttttccatgatctccttgtccgcgttcattgcttttcctcccttacatcaggccgtagagcttctgaaacagctgggcgtgtttttcctcccattgggccacgcactgcttcagctgcggattctgcaaggcctgcgcagcctgctggcactgggtcttcagaaatttttcatggcccagcgcatcttcgagatacaacagttccttgggactcatgatttcatcacctccgcaggtgattcttccccgtttttgccaaattatcctgaccgtctttcagcggcctacgcttgacaaatcgaaagaagggctgatataacaaaagcgtatttctttccttttccctcaattctcttaaaaaggagccgcggcatatgctttttctgacccattacgcttcccccttgggccccattctgctggcggcagatgaaaccggcctgacaggtctctggttcgaggcacaaaaatattttccgtctttttcgggcgttgaatatcaggaaaaagaaacgcccgttctgaccgaaactgtccggtggctggacgtttatttcagtggaaaagacccgggctttctgccgcctctgcatccgcagggttctcccttccggcagacggtatgggacattcttttgaccattcctcgcggccaaaccatgacctacggcgaaattgcccgacggctgggcgttcgcagcgcgcaggccgtaggcggcgcggtggggcacaatcccatctccatcctcatcccctgccaccgggtggtgggaagcgacggcagtctgaccggctacgcaggcggcgtggagcgcaaggcccggctgcttcagctggaaggcgcccgataaaaagcacaaaggagaaaaatcgtgagctacatccgtatcatagacggtttcagcggcgtggagcaggaaaacataccctgtgcggacggtcagggaaccatgcgggtctatccgctgttcgacggcgtaacggtcatgctgacgcagctggaaacccatgggttccccgaagaccgaccccaacgggaccggctggagatcaacttctgcgttaacggccgcttcgaaagccacttttcttcccgggatctggcggtgctcaagccgggcgatatggcggtcagcacctttgacggcgttcacggactgcactctcattccgattttccgctgggctattatgagggcgtgtgcatcacggtggactgcgcccccgccgaagcgtggatgcgccgcaacgttgccccgctggcctgtaacttttctgccctcaaggagaacctgctggcctcccaatggtatgccgtggccggggcaggcccccggtgcgaacacgttttccgggaactgtttgaaaatctgccctattttgaccgcagaacgctgacgctgaaggcgctggaactgttcagcctgttggagaccatcccccgggccgagctttcccgggaatactgctcggcggagcagctccgactggcccgccatctgcgggatcatctgctgacgaatcgaaacaattatgtttctctggcccggctggcagaggagcaccagatttccgtttcccatttgcagcggcttttccgtcaggtctacgggatgccggtgtaccattacatccgggaataccggctggaacaggcggccgtggagcttttaagcagccggaaacacatcgtggagatcgccatggacgcgggctacgacagcgccagcaaattttccgccgctttcaaggcccgctacggcgttacccccagcgcctaccgctgtgccgcaggcaacgaaacaaaatgggctattcagaccaaaacggaatagttttttcacgtcaaatatggtatgctcccatgcggttaaattaaactaaccttgttaaaggagggttttccatcatgaaaaaatggctttctctgctgctttctctggtatgcctgttcagcttcagcgcggttgcgacggctgaagacgctgattttctcagccagattcagggcaccttcgtggagctgttccccgttctgtccgaagaacagtatcacgacgcgtggctgaacaacgtcaccccgctggtgggcgaagaagccgccgaggacaccgtttcctatctgctgtatatgtgcaccggcgacctgtatggtcaggaagccatcgacgcttacgaagctgatcccgacagtatgcggtttgactgctactatctgggcggcgtggcgaagatgactgtcgagggcaacacgatctccggcgtggacgcggacggcaacgaaatcttccgtcatgagtacaccgccatggacgtggaaaacgaaaacggcttcctgttctatcagacggcggacgctgacgcgggtcagttcacctactttgccttctcccccgacaccatggaggacacctggcatctggagttccgctatgcggaggatctgaacgatctgcagagctggttcgagggcaactacgcctactggaacgtgggcgctatcgccgaggacgcgaccgaggagcaggtgctggccgccatcaacctgttcgtcacggagaacctttccgaggaagagtaagtgacttttttcaaaaagctgctccgctgaaacggagcagctttttgtttgcctatttttccagttgttcccgctcccattggctcatccgggtctcttcttccggcgtatggaaccagtgggccgcgccctccgccaccgtcaatgaacaggcaaatttccggcagtatgcgtcgatggtgctgcgtgggctcatttcatccttcacaccgtacagaagcgccgttttcgagctgatggaagaaaccgagtgctctctggcccagcagagatagcgccatgaaagagtctgccctccgggaaccgggatctccccttctgcccgcagccgttcttcactgacgccagtctgcgccatcatgccgtgaatcattttctccatgtccagcagtggagaggataacaggcagcgttccaccctttccccggcaaaggcctgcaacgccagccatgcgcccagactgacggccctcacgccgagtgtctgccagcgttccttcatataatttcggacgttttgcagttccgggacggcctcccacggcaccagccgaacgccgtcctgcctcccgttatgctcgggcaggtctacggccaatacctgccagcccaacgggttgaccaccgccgcaaagcgctgcgcttcctccttgtttccgcaaaggccatgaacgaataaaaaggcccgctccgccggctccccgtaaagcacgacgggagcctgaccgatttttgtgtattccggcatattttcctcttttccaacggcaataccgttttcagatgattttgtttccttgagaaaggagccgccactccggccgcagtgccaccaccgcgggcctgttttttatttgcgccttttgttgcgcatcatatgttattatagtagataaaaccaacctgtcaaacaaaaagaagcgcccttcgctttgaaggacgctttcctttgtttttccttatttcgtcggttcctcggtcgccgccggggtgcggggcgtggcgcggtacagatcggtctgcacactgacccaatcccactggtcctgcggcacgttataggtataatagagcgtaccgtcgctgccgtaatagcccgtatccgtggtaaagccggtaatggctatggacaggttttccagatggcggaaatccgccggctgataccacgtgaagccttcactggacgtgtactcatccggggccagctccgcaagatactcggcgtacagggtattgccggtgcggtagctcatggtgataggcgtgtcgtattcgtccgtgcctgtcacggcaaagctgatgccggtcaggttcaggttgctcacgtttttcagccgcagatagggctgatggttgcgcagctccagcttgacgatcttaacggcgtgacgcagagaacccacgttgatgttcaggctgcaggtatatccgccgtcctccgtcgtcccggtgacgacgcagcgtccccagcgcttgcccaccacccggggcttgttggtggtaccggtgatggtggcaatgctttcatcagaggaagtccaagtcatgttgtggttggtcgcgtccttgggttccagcacggcgttcagcgtccgatagtagtccacgcccactcgcgcgtccgtctggtcaaagtgtacgcccgtcacgggaacgatcacacgaaccaccgtcgtggcctgacggcgggagccgtccgccgtggtggccgtaatagtggccttgcccgcagccagcgccgtgaccatgccgttttcgtccacagaaaccttcttcggattgttggacttgtacgtcaccgacttatcggtggtatcctccgggccgaccgtaacggccagctgcgccgtctgccccaggatcacgtcgtattccttttgctcaaaggccacggacttggccagccgaaccacctgcacgtcgatggagcccgttacctccggcacctcggcgctggcggcggtgatggtgaccgttccgggctgaatgcccttcacgcggccctcccggttcaccgtggcaacgctctcgtccgaagagctccacgtcagtttcttgttgttggtgtccttggggagcacagtggcctttacggtcgccgttttgccttcgggcagcgtggccttggccagttccagctgaatttcttccgcaggctgacgcacctgtacggtcacgcgggtctgggcatagccgtcctcggacttcactcggatggtggcgctgccccggctcacgcccgtgaccacgccattttcatccaccgtggccacctcgggcttgcggctttcgtaggtcacgccctgcagggtcgcgtcttccgggcttaccgaagcggtgatctgcgccgtctgccccacggagagggtctcctgatccagctgggccttcacacttttggccggctgcaccacgatcacgtccaataccttggtggccgtgggatcgaccttgctgccgatggtcagggtgcaggttccctgcttgcgtcccttcacccgtccatcccgcagcacctccgccacggtctcgtcgctgatggtaaaggtatagccttttttggcgctccgtggcgaaatggacagctcgtagtccacaatgcggcccaccgctaccgtcagggtatccacgctggtggtgatgaccaccggctcttcttccgccagcgcgaaggcggtcaggcagcagcacagcgccagcagcagcgcgttccaacgaagaaatttcttcatcatgcatcctccctttccagttcccgaatccagtcgtccagtttttgagccaactgcggatagtgatactgttctacagccgcttcgttcttttcctgcatcagcggctgcttttcctgccaacggcgaaccagctccgccgtataggcttccagcgcctgttgatcggctgccccggctgcctgctcgcagcagaaaccgatgcccgtttccgtcatcacccgtttcagctcgctgcccgccagttcgccgcctacgcagcataccacggggcggttcatcatcatgtactcaaacattttcccggtcagaatgccctgacggcccgctgtattccacgaggccagcagcagcacatccgcctcccgctgcaagcggagggattcctcccgggagacggggccgtggttctccacgcagtccttcaggccgcactgccgggcgtagtccgtaaacagcgcaccctcccggcccgcatacaccagccgaagctgttcgtgcttcaacattccctgatcgatcacgccccgcagcgcacgaaaaaagggggtgagatcccggggtggaatacccttgcggcccatttcgatggtgccgcagtagacgacccgaaagcagccgtcctcctgccgtggcgtttcggcctccggcaagtcctcccggtcaaagccgttggacagcattcgtccccgatctctgatcccgatcgcatccagcattccttgggaaaccgtggtcagcaggtcggcgtttttccgcagcatccgcatataccgccgctgaaaaggttccagccaacggaagggcatgcctacctcgtcacggaaatcggcgatccaccgccgggccagcccggactttttcgcctggtatgccgcctgatggacgctcaacggcgcataggtggaaaacaccacgtcgaaggagccgtccagctttttcagttcccggacagccaagtgctgaaagcttcgatccgtccagagccgcaggtaaatatacacgccgtccgccagacggtgcagcagccctccgcgcccagcgggagcggcggcactgacaggcacagcagcattggcagccggggcggcgcttttcttccgcgccttcaccgcctgaagcgggttccattccttcagcacccgcacgtcgtgcagctcctgggcgtctttttccagaatgtcgtcccgcttgccctccatgcccgtgccgcaaatcaccgtcacttcgtaccccagccttgtcaggtatttggccagcttggtgggacgaaccgcgccgatggtgttctgaggagcaaagtaatagctgatgatcagcgcacgtctgttcactggccttttcctccttttttcgccgcttccgggaaaagggcgggcagcagagccgaactgcagcagcagtgtttccagtgttcccacgcactgcggcgcatccgctccgtttcctcctccgtcagggaggccagttcttccagccgtttcagcacgccgtaagccccttcttccggctggtacagaaagccgatatccttcgtcaccagttccgggatgccgcccaccgccggagcaatcaccggcacgccccagcgcatggcctccatgatggagaccggcacgccttccttttgactggtgttcagaaacacatcgaaagcccgcttttcgtaaaatttttctacttctttcgcgtccagatcgcccagcagctcatagaggatattatccttgccgtccagcttttccgctgccagccgccgcagctccgtttccccctcgccgccgccgatatgcgtccagtggatgggcattcccgtccactgggacagcgcctccaccaccaagggcacctgcttgatgggcaccagccgggcgcaggtgataatacggaaaatgccctgggcgaaccggggcgcgcgtttccaccgctccacgggatggccgccagagccgatggacaaaacatgcatccgcttttcatccaccttgccccgcagatattccatcatctgcttgcgggctacccggctgatggggtacagcccgtcggcctgtgcggcgataaagcccttcatcagataggggttcagggggttgcgttccgtgtcgatgtcgtaggcgtggccccgggccacgaagcgcagccgggggtgtttccgcttggacagagccgcggcataagcgtcgtagctcatccagaaggaatacagcgtggtctgcgaggccacgcagctgcgcagcagcttttccgtccagtagtgcattttcagcccccgcacccggaacagatagagcttgagaaagttcttcagcgtcagcttgccatccttgcacaggtggttcgcctcctgccacaattcccggcaaaagggcgcgccgagccatgcccgcagcttgtccagcccggttcgggccagcggaagctccacgccgtcccggttcagattgctgaacccggtatggctgaccacgaacgtccgctcaaaatgctcggtcagccatcgggcctcctgcatcaggaaggaattgttcttgccattgggcaggacggcgcagttattcagatagatgaggtttcgttccatgggatccccagcctttctagtacgggtttgaactgctgttcccaccccagatgttcccgggcataggcccgcatccgggcgggaagttccgcgtcaaggcggctttctttggcgaagcgcagaatttccgcgccgtcgggaatggtctcgtcatccggcagatggcggcacatccgctcgtcctccggcatatccgggtcgttgacggcgtagaagaagggcagcccccgggccatgtattcccgctgcttcaagggccggctgacggtctgtcccagccggtggatacccagcccgcccatgccgatgtcgcaccggccggtcagctcgtccagcgccgcgccctgtaccgagccgaggaactgcgctttttcgcccatgttcagttcctgcgccagcctttgccattcttccagcgagccgtcgctgctgccgcccgcgaaatagatcacatagtcctcctgcaccggggccatggcccgcagcagccgatcgtagccctgcccccgggtcatactggccagcgccagaatagcgggcgggcccgcctcgccccggctcctatgcaggggcaggctgtccgcgtccacgccgttggtgatgttcatggcggggcggccgttcagcgtcccgccggcttcttcgccgatcagcgtgtacaggtcgatcagcggctccacctgccgaaaaacatgatcggcgtaacgaaacaccggctcccgcagcaggttcgtctttttgccgttttcgaagggataggtgggatgctccatcaccagcttggccccgctttccttcacagcctgaaaggcggcgggcgccttggaaaacgccatcatatagcgcatatagaccagcgcgaagggcatttgccggacggcgtttttcatgccctccatcagatcgtcgaacagaaacgtatggctgtaccccggcagccgggaaaaccggctgcggtgcatcagcttcttttcctccccccggcacagccagattcccgcctcatcccagcccagataccacgcccggtggcccagccgctccatggccgccatctgtccctgaaacttggggatcagcgtttcctgaccgttcagggggtatttcatcacaaacagaatatccgccatcagccttttgcctccagctcttcccggtacagcgccgccatctgctcaagcaccgcgttcagactatagtcccgaatcacgcggcggttgcgctcccccatctcccgccgcacctccgggtgctccagcagaaagtgaagatcctgtgcgaagccctccgcgtccatgggcgcgcgcagcattcccccgtccatggggccgatgagatcggcattgccgcgcacgttggataccagacagggcaagcctgccgccatggcctccatctgggccatgggaagcccttcctgcagggacgggaacagaaacacgtccgaggcctgcaaaagagcgggcacatccggccggaagcccagaaaatgagcgcgctcggccatgcccagcgccgcggccagcgccttgagggattcctcccgttcgcctacgccgccgaaaagcacctgcacgtccttttccccggcgcaggcccgcagcacggtctcgtgattcttg

SEQ ID NO: 1261 - DNA, 3884 bp, Unknown
  16S sequences of unknown bacteria
gcagaaaaatttaaaaatacctctctattagtcgtgacatttttaagggtgtttttataggtgttttcgcaaaaaaaataccaccatggccgtttcaagccatgatggcattcctcagatttcaaatttatagccgacgcggcagataataaaactggaagaaataaagactttacgccagcttccaattctggctctccgtctgtagcttcaccattcgggcatataagccgttttgcttcaacaatgtttccggtgcgccttcttcggccacagttccttcagaaagcaccacgattttgtctgctccggctacggtgcgcatccggtgggcaatcaccagcaccgtcttatctgcgatcaggcgggaaagggcggtttgaatcagggtttcattctctacatccagcgaagcggtagcctcatccaaaagaatgatcggcgcgtttttcagaaaggcccgcgcgatggaaatccgctgccgttcaccgccggaaagctcgcagccgttttccccgatgttggtatgccagccgtccggcagcttttcggcaaattcatctacattagcaagccgtgctgccgctaacacctgctcatcagtagcgtctttattcccaattcgtatattctccagaatggtattgtcaaacagggtaacgtcctgaaatacaatggagaacagggaaagcagcgtctccgggtcaattttggaaatatccatgcctcccacggtgatctttccccggctcacatcccaaaatcttgcagccaaccgggaaaccgttgttttgccgccaccagaaggccctaccaaggccgtgacttcgccctgttttgcggtaaaggaaacatctttcaatacggtttctcctgtgttataggcaaagcctacatggtcgaaggtaatgtcatagcctttgttggaaagtctgttttctccctgctgaatcggatgatcgaggatttcattcatgcgggcgatattagtgcgggtgctgataaccgccgccagattttgcaacgccccttgcagcggatcgtagagccgtgaaacaaccagcaggaacaggaagaaggtcagcacatcgagactgcctgctatcagcagaaccgagcctgccagcgcaacggtggcaattcccagctttaatatgagtgacgcggacaccacaaaggccgccaacccaaactcattgagaatggaacgatgttccacggcgcggattttcttttccaagcctttcaggtattctgcttcggcgttgttggcttttaagtcgcgcacagtttcaatgcactcttgaatcccgtcggcgcaggccatctttacatccatcgctttctgattgagccgttcctgcacctttgcggagaagcctacaatagcaaaggcaaccggcaatacccacagcgccgctaatgccatgcgccaatcgaatacaaaaaggctaatggaaattaagaccgtagaaataatggagcctgccagttcgggaatgaagtgggaaaaactctgctccaaaaaggtgcagtcggccatgatggtgctggtgagatccgccaaatccttttttccaaagaaggacaagggaattttccgcagccgttcggccagcgtaatcctccgcactccgctttccgtataggtggcaaaatacgtggcgttgtactgaaagtaagtggtaagcaggatcagaccgatacacaccgcgcagccgatgatataaaagataattttttcaccgggtacgccgccgttcatcagatcggccactaaaaaatataaaagcccaacgggaaacataaaggaaagattctggaggacgcaggcaaggcagccttttaccagatccttcgccccctgctcggaaagggcataccgtttttgcagccgttttatcatgttattgtacctcctttgcaaccttccattgaacagaagtttgatagtcctgccacatgcggctgaatacgccgccttttttcaacagctcacggcttttgccgctctctgtgatctgcccgtcctcaatgacatagatttggtctacgccagccacggtagaaagccgatgggcgatcataatcaccgttttcccctgtgacagcttggaaaaggctgcctgtacgcgggattgattatccgggtcggcaaaggcggtggcctcgtctaagattacgataggcgcatttttcagcatcacgcgggcgatggcaatccgctgctgttcgccgccggaaaggtacacaccttttgtccctatcacggtgtccgcacccctcggcagcttttccagaatatcgtcgcactgtgcgttatggagcgcggccataatttcttcgcgggtcgcgttaggctttcccatgcgcacattttccaaaatcgaggctttgattaggcgactgttctggaatacaaaagaaacggtattcataagttcctctttggcgatgttcttcacattcacgccgccaattttcacctgcccgccttgcgggtcaaagaaccggcagatcagattggcaagcgtggtcttgccaccgccggaaggtcccacaaaggccaccgtctgccctgcgggaatggaaagggaaatatccttgatgacctcgttttttccatcataactgaaatgaacatggttaagctgtaccgaagcgtcctctgggtgttccggctgttttggttctgcaagcggcttaagattcaatacgctgtcgattctctgcaaggcatcgtctacaatcatggcgttttcgctctggaacatgatgcgggtgagggtaacggagataatgggcgtaatgatgatatagaacatgagatccagcaggaaatccttggtaacgccgccttgggtaaaaatcagcgcaccggcaatcagcgcggcaaagacgccgttgatggctgccgtatagaacatcatgggtgctcgaagctgcttggtataggcaatcacccacaccttatacctatcaatggaatccttgaattttttgaaggagaatatggtctgcccgaaggtttttacaacgggaatcccccgtacatactctaccgcttcattggacatatcatcgagagcgttttggtattctttcattttttcctgcattttctttccggtcatcgtcatcataatcagaaagcccagcactaccggcacaaggctcaaaagtcccagccgccagtcgaacaccagtagcagaaccaaaaggccgcatggcgtcgcaatggcattggcacggtcgggaagctgatgcgccagataggtttcggtggcggcgctggattcattgacgatcttgcgcagcctgccgctgccgaattgctctgcaaaccccagcggcagctttacaatatgctccatcgtttgtaggcgcaggttggtggcaatgcggaacgcccctttgtgggaacacatcagagcgcctatgtagaccaacaccgcgatcactgcgaacagcaccgccatccagccgttacgggtcaggttttgcgcatggctgaaatccggcgcaactgccaacacttcctgcatgaccttccagatatagtagaaaggcactaacgctatgagggcgctgatggccgaaagcacccaggaagcgtaagtcaggtatttgtggttgcctgcaatctgtagcaggcgtgacagattggattgttttttcaaagaagattcctccttttctttatttcatctatgataaagagaacacaagcgcgtccttcttatatccgtataagttagttatcgctaacctatgagcaaaaattacagggcattactgccccataattttcatccatccggctgtatagaaagcccgcatttccttcacataattttctgcgttttgaagcggcatctcgtgaa

SEQ ID NO: 1262 - DNA, 25860 bp, Unknown
  16S sequences of unknown bacteria
ctgcgcgccttcggcgcgcagtccggggttaaggggcactgccccttaagagaggcggagagggacggggacgttttcgacgacggcgatcaggatgcgttcggcggaaatgcccttcatcttcgcgtccgggtttggcatgatgcggtgggtcagaacgggcagcaccatgcgctgcacgtcctcgggcagcacgtagtcccggtcattgagcagggcgcaggcctgcgcgccgcggatcagtgcgatcgcaccgcgggtgctgacgcccagctgcagactgggatgattgcgtgtcatggcagcgatggacgcaatgtagtgccgcacttccttggagcagtagaccgtgcccaccagcccctgcatgtcaatgatgtcctgcgcggagcagacgggcaccagcttggactggggcttttccgtgccggagaagcgctccagcaccgccatttcttcctcaagggtgggataccccatggaaacgcggatgaagaaacggtccatctgcgcttcgggcaggggataggtgcccacgaactccgtggggttctgggtggccagcaccataaagggcttgggcaagggatgggtcacgccgtccaccgtgacctgatattcctccatgacctccagaagggcgctctgtgtcttgggggaagtacggttgatctcgtcggccagcgcaatctgacacatgatggccccgggatgatactccatctccccggacttgaaattcaccatggtgaagcccgtcacatcagagggcaccacgtccggcgtaaactggatgcggttgaagctgcaatccagcgacttggccagcgcgctgaccatggtggtcttgccggtgccgggcacgtcctccagaagcacgtgacccttgcacatcagcgcgatcaacagcagttcgatcacctcgtccttgccgacgatgaccttgccgatattctgtttcagtgcggatataacctgacgcggattgagcataacaacgctcctttgttttggctgatttcgggtagcttgtccgttcttcggaaagcaccatcgtttattatatcggaagttcccgtatttaacaagtgtatgacaaaagttttacgtctttagggcgaaagtggcgaatatctttgttttttcattgtatttcaagggcttgagcaggattcagcatggcagcgcggcaaattaaaaacgttgaatttgattccgatatttcacaggggagagggatttcatgctggcactgattaaaagcgtcaacaatgcggtcaataactttatctggggcgttcccgccatgatcctgctgatgggcgtgggcttgtacctgagcgtcggcacccgttttgtgcagctgcgcaagttcggcccggccatgaaggcgacgcttggccgtattttcaagcacgataaggcgggcaagggcgcgctgaccccttttcaggcggtgtgtacggcgctggcggccacggtgggcaccggcaatatcgccggtgtggcgggggcgatcgccatcggcggccccggcgcggtgttctggatgtgggtatccgcgctgctgggcatgtgcaccaagtttgccgaggtcacgctggccgtgcatttccgggagcggaaccggcacggcgactacgtaggcgggcccatgtactatattcagaacggtctgggccggaaatggcgttggctggcctacgcctatgccctgctgggcgtgctggcctgcttcggcatcggcaacaccacccagatcaacaccatcaccgtggcggttggctccgtgctgaccagcttccatctggtcggcgaggcggcgctgtccaccttccggtggatcttcggcgggatgatggccctgcttctgctgatcgtgctgctgggcggcgtgaagcgcatcggcaacgtggcggaaaagctggtgcccttcatggcggtgttctatatcgtgctggcgctgggcgtggtgttcagccatctggaccggattccgctggtgttcgaacagatcttcgcaggtgctttcaatccgtcggcctttaccggcggcgtggtgggcagcttcttcctaagcatgaagaaaggcgtttcccggggcatcttctccaacgaggccgggctgggcacgggctccatcgcccacgcatgcgccgagaccgaccacccgatccatcagggttattttggcatcttcgaggtgttcgccgacaccatcgtcatctgcaccctgacggcgctggtcattctggcaagcggtgtgcccattcagtacggcgaggcggcgggcgcggagctgaccatcagcggctttgtggccacctatggcagctgggtgaccatcttcaccgccatcgccctgtgcagcttcgccttttccacagtgctgggctgggggctgtacggcgcgcgcttcgtggaatacctttgctcctcccataaggcggtcaagccctttatggtggtgttttccctggcggccattctaggcgccacgatggatctggggctgatctgggatctgagcgacaccttcaacggcctgatgtccctgcccaatctggtaggtctgttcctgctgagcggcacgctgttcaagctgctgcgggaacgggccaaagcggacgagacctcgccgctggccgctcgggattaaaacccaaaagcgcctgccgcagttatgagcggcaggcgcttttttatacctgattcatttgttccagtatgcgtcggcgcgtctgctgaagccggtccatcacctgcatcagctgctcgtcggcgcgttccacccgctccttggcatcgctgatcttgctcagtaccgtccaatcgctgatgaacccgtcccacaccagatcggccacacgccagaagccggacagctccgccgaggcgctgcactggacgcgcacgtccttcaactcccggttgaaccgttccaaagcccggccgagatccgccaactgctgctgggccctgtccatgcgggagtgcttcatcagcccggacagcatcccgccgcccagcaggtcgtagattccccagcctctggcgctgcgcaggctgtccagcacctgctgggcctgccggtgggcttcctgcccggccccgatggcctcctcggtctcccgaagaagagaagcatagtcgctcatagccttgcccttattcctccgcgccctccaggattttcagcgtggagctggtgcccaaacggctggctcccgcatccaccatggccagcgcctcctgccaggagtgcatgccgcctgcggccttcaccttcatggtttccggaatggccgccttcatcagcgccacatccgccacggtggccccgccggtgccgaagccggtgctggtcttgacatagtccgcgccagccttgacacaggcttcgcaggccagtttcttttcctcgtcggtcagatagcagcactcgatgatgaccttcaccagtgtgccgttcgcggcttccaccacgccccggatgtccttttccagcagttccagattgccgcttttcagcgcgccgatgttgatgaccatgtctacctcgtccgcgccgttggcgatagcgtctctggtttcaaaagccttgacggcggtggtgttggctcccagagggaagccgatcacggtgcagaccttcacggggctgcccttcaattcttcggcggccagcgccacatagcaggggttcacgcatacgctggccgtgcccagttcccgggccgtggcgcacagctcccgaatctgttcgggcgtagccgtggctttgagcaaagtgtggtcaatcatagaggcgatctgttgtttcgtcatatgttttccttcctttctgtgtccgtatgggtgttggatttttgtttttccttgcatggtagttatgatgggaaattttggcatctggcggcatttttttcgcgctaaaacaaactgcaacgaagcctgccagacccgcgagccgcgaggcctgtcgccgagcggcggtaaaacccggccaagccgcatgtctcccgagtaccctgcgcgcctatggcgcgcagtccggggtgcagggggtcaccccctgcgaagcctgccagacccgcgagccgcgaggcctgtcgccgagcggcggtaaaaccccggccaagccgcatgtctcccgagtaccctgcgcgcctatggcgtgcagtccggggtgcagggggtcaccccctgccctgcgcgctacgcgcgcagtccggggtcaaggtgctcagccccttgctcagccgcagggaggggcggaagctcgcggatatcgctgaggccgaaatgctccagaaaacgatccgtggtggcgtaaagaatgggacggcctaaggcttccttgcggcccacttccttgataagccccttgttcagcagcgattgaatggaatagtcgcactttacgccgcgaatctgctccacctcgcccttggtggcgggctgacggtaggcgatcaccgccagcgtctccatggccgtctgagtcagactttgccgctgaaccggctgcaggagccgttctacgtaaggcgcgtattcctgccgggtctccatgcgcagatggtcgccgtagcggcgcagggtcacgccccggcgctccagatcgtactggcgctgcatctcctccaccgtctggatggtctccagctcggtcagccccagcgcggcggccacgtccccgatgcccaccggctccccggccacaaagagaatggcctcgatgatgtgggccgcttcattcctctccaagatcgctttctctccttccgggcagcagagtcatgtccccaaaggtgcccgtctgcatcacatgggctttacccagcttcaataattccagcagcgccatgaacagcgtgaccacttcctcccggtcgggcgcgccggaaaacagctgagtaaagcgcaccgttcccacgctgagacggctttcgatggcttccatgcagccctccaccgtaaaattgtcccggtgaatgttgcgcagctggaagaccgcttcttccgcctccttgggagcgcgctcctgtacccgttttagggcctcccacagggcttcgatggtcagaccgtcgatctcgatctctggcggtgggagcggatactcctccggcagtttgccgaagacctcccgggcgtttttctcaaactccgccatgcgctgagccgtttccttgaactgcttgtaggcgatcagtcgttggagcagctgctgctccgggtcctcctcgtcctccttggggggcttgggcagcagactgcggctcttgatctccaacagaagcgccgccatggcgacaaactcgctggcctcgtccatgtcgaaatccggcgcggaatgcactgcttcgatgtactgttccgtgatctcgctgacaaaaacgtccttcaggtcgatcttggccttgccgatcaggtgcagcagaagatccagcggcccgtcgaactgctttaaccgaatgtgaacggccatatcacgcctgccccgcgatcagaaggaacaggttgagcacgccgccctccaccgcatcaaacaccacgttaatgacgttgttcaggaggccggaaaagcaggctagcaacagcacgacctgagcgatctgaaacacctgctggttcaggcggaaacggcccttgaacagaaggtcgttgaacaggtggtagccgtccagcggcgggatgggcagcagattgaacaggcccacgcccagattcatggaatagaacatgagcagaaaacgctgcacatacatcagccacgggtgcagcatcagctgagaataatctttgccgtagcccgccaccagcacactgtagccaatgccgctggtggaaaggaactccctggccccgccgttggccgcgatgacctccggcttccacagaaggccgttcagcgccacggccagcgccatagacaggataaacagcgtcagattaacggtgatacccgccacgctgaccagaaaatcatcccggcgatagtttcccttaaaattgcggggattgaccggcacgggcttggcccagccgaagcccaagaacaccagacagagcgtgccgatgggatccagatgcttccgggggtccagcgacagccgccccagcatcttggcggtggggtcgccgcagcgataggccacgtagccgtgggcgatctcgtgcaggatcagcgtcagaagcacggaaacggcgaaatacagcagatacagcgcaaagcccagcggatcggtggtcagccaattccaccacagctgcagccggttcaggatccccatgcgcgtcccctccttgtgaaacgatcattcatcgcttctttcctcttaatcagaataaaaattatagcatccgggccgaaaatcgtcaagaaagaagacttccgcttgcctgtccgcgtccgaaaagtgactttcagtctatcttttgtgtcttgacgttcataatctgactctttataataaaaacacgatacgaaagaagaaagggtgactctatgggccgcgaggttctggcgagtattcggacgcagtatccctcctttacgccggtggaaaggacgatcgccgattatgtgctgaatcacggagcgaaagtcgtccgtctgcccattcgtcagcttgcttatgaatgcgcggtaggagaaagcagcattgtccgtttctgcaaacgggtcggccagaagggctacccggacttccgtctttcgctgtcggcggcgctggaaatggaaaacgttccggcggaaaaggccgaaaatacttctttgatcggcgtggcggatgaaatttaccagcagcatcagcaaagtctgttcaacgcccggaacatgctgaacgcggagacgctccaaaatatcgccgcccatatgctggccgctcagcaaatttatttctttgcccctgccggcttccactctcaggccattcagctgggtctcatgaccatgcaggccaccggcaaaggcatcgggcttgcggctccctatccgcaggctctctgccagcgggaaatcggggccgaggacatggtcatttttctggtgaccagcgctcaaaccggcatgatggccgacacggcccgccaactgcgcggccggggcgcttacctgatctccatctcctgctgcggccaatcggccattcaaaacgactgtcaggaaaatctgttttacggcggcattgccggaagtccgctgcccgattccgccgcacttttcttcatcgtggagaccctgtgcgccgtgtaccggcggcagatggaagaacgggaagcggcgaaggcggacggataagttccattgatatgacaatccccggcgtgacgaaactcacgccggggcattttcattcagccgatcttcggctgtttttcgttttcccggatataaaggacccagtcttcctttcttggcttgggtgcggggtgccggtcgccctcgcggagatagcccagaacgagctgcatcacggcgtagtgatccgtaggaatacgccattttttcaacacttcctgcccgtaggggtcggcaaacgcaggccagccctgcccgatatagcaggagccgatccccaaagcgtccgccgccagcatcatgttctccgctgcgaccgcgcagtcgtccaccgaaaataaaaactgcttcggcgcaaagaacgtaatgacggtcggcgcgtcgtagaaagcgttcgtcagcttcgggtcgtccgcgatgctgggctgttcccgggaaacatagctggccgctgtcgccatgcggggatgggaattggcccgcttgatcctgccaaggcgctcgttgatctccctgtcctgacagacggcgaagatcacgtcctgccttccgccggcgctgggcgcatacagcccggcctgcaaaatttcctgtaaggcgctttcttcgatctgccgggagtcaaaccgccgaatcgaccggcggtgcagaatggtgttcatcacttcgttcatggttccttctccttatccgatggccttttgggcatagccttcgatttgtttccagcattgcgggtccgccgcatagaagtctccgtttcttccgctggccacagcggggcagccgcggcagaaggccagcagttcgcatttgctgcacttctcaaaccgcgtataatcccggtaacgctccatctggcacacccacacatccgccagccggtcggaaaatacgttggcgaccttgctgttccgcacccggcggcaggcgtacacgtcgccggtaggcaggatggtcaggtgacagttgccgcagttgcagccgccgtagatcatgccttcctccacggtttcggggagccggaatgtcccgatttcgtactcgtacagcgtccacaggtgatcctttttattgaaataggtctgacacccagcggcctcatactcccgaaattttcgatcgcagtcggccagaagctgccggtaatgtgccattgaaaagaaaaatattgtttcatcttgtcctccctgctcccatgggacgcacttccgaaagcacactgtccgctgttctctcggaaatacgccccaagtttttcttggggtgtatcccgtttcttactgcttgtcgccagcgccgcaagccgaaccgcaagcagcgggcttttcagcgggcttgtcccccgcgccgcaggcagaaccgcaggcggcgggtttctcagcgggcttgtctcccgcgccgcaggctgtggcgggttccctctctgccgcagggttccatccaaacaaattcgaaagtgccatttttgttttcctccattgatttttgtcaagcagctttctcgcttgcagtttgattgtagcccgcccgcgtctcaaaaaaagtacgcacaaaatgattacccagtcacgaaaaagtaaccctttgaaaaacaaaggcttttgcattataatcaatctatactcattccttggaggtgccgccacgctgacgaaaaaggaaatgcccgcctgcccggtagcgactaccgtttccctgatcggaagcaaatggaagctgctcattatccgaaacctgctggcgcgtccctggcgattcaacgagctgaaaaaagatctggacggaatcagccagaaagtattgacggacagtctgcgctctttggaaaacgacgggctgattacccgaactgtctaccccgaagtgccgccgagagtggaatatgccctttccgagctgggtttgtccatgaagccgatcatcgcttccatggaggcatggggaaccgaatatcaaaagcagcgtatataaacagcaagggaaccgcctgtcagacggttcccttcgttttttagaaaataaaaatttttcgttcagctgatccaaagcagcgatgcaaatgattttcccatctgcaccgccggctttgttggaaaatgaactttttcagcccactgtgcccttgaaggcgtaattttcatcaaagcggctgaagatcgcgggcgcgcccagctcgatctcgcccagctcctcgttgccgatggacagggccggggtcttggtggtcatcagcgccgcctcctcgggggtcgcgccgaaacgtatcaggttttggaaagcgcggatcatggtcagggtgctgcccgccagcgtgccgtccttcagacgggccgcgccttcgtggacaaagacctcctgaccgcccagctgatactgaccgtcgggcattccggcggcctccatggcgtcggtgatagccaccagcttttccttgcccttcgtccgaatgatgagctttacaatgtccgggtgcaggtggatgccgtcggaaatgacctcgcactggagccggtcgtccaccagcgccgcgccgggcacgccgggggcccggtgattcaggggcgtctgggcgttgaaggtgtgggtcacgtgagttgcgcccgcctccgccgccgcgtgggtggtttccgcatcggcggtggtatggccgatactgacggtaatgcccttcttcgtcagggcggagataaacgccagtgcgcccgcccgctccggggccatggtgatgagccgcacgacgctttccagcccgccggtatagcgctgccagttttcctcgttggggtcaacaaaatactgcttcagctgggcccccgccttggcctccgccagaaacggcgcttccatgtgcgcgcccagtacgatggctccatcaggctcgggtcgctccatgacggccttcacgcccgtgagggcccgaaccgtgtcctccgggctggcgctcatggtggtgggcaggaacgccgccacacccacctttttcagttcccggctcatgtggcggacggcttcctcgccctgcatggtgtccatgcccttgaaggcgtggatatgaacgtccacgaagccgggcagcagcaggtcgcctcccagatcaagcaattcttcgccctccgccgccagcccggtgccgatggcgctgatccgtccgtcccggatcagaaggtcggtcttttcctgaaattttccgtcgataaaggctttcgcgttttgaatcagcatagtgagccttccttccgtatcgcggctgttactgcagcttaaaggcggcgtagatgtccgcatagagggattccgcatcgccgatgttcttcacatactccgcgtttttcagcatttcttccgggggattgtaggcgggattggcccagtagtcggcgctcagctccgcctcggcggccttattgacgcacatatatgcctgatattccgcgtcgtgggcggccaccttcgcgtccatcaggtagttcaggaacgcatgggcgctttccacattttgggaggcggcggtcagcacgaagccgtcgatgccgaagcccagcccctccttggggtacaccagcttgtactgggggaactcctgcatgagcaggctggcaaagggcgtgaacaggaagcccacgctggcctcgccgctctgcatggcggcgtaggcctccatgtcgccgaaggtgcggatgttcttgtacaggggcatcagcttttccctggccttggccagaatgtccgggtcggtctcgttcatgctgtagcccagggtcttcagcgtcacgccgatcagcacccgatactgctccaagcaggccacggagtcggtcaggctttcgttccacaggtcttcatagccggtgatctcaaagggcacccgctccgggtcgtacacgatcagcgggcagcccgccacgtaggggatcacgtactgattgtccgggtcgaaatactggttcagatacagcgggttcaggttttcgtagttgggcagcaggctcttgtccagttcctgcaaaagccccgcctgacgcaggatgtccagcgaatagtcgctggtcaggatcaggtcgtagccctcgccgccggactgggtcactttcagcagcatgtcgtcgatggagtccatgggcgaccacaccacgtcgatgccggtttcattttcgaaggcctgaatggtatcctcatccacatagccctcccagctgagcacgttgacggttttggttccctcggccagcgcaggcagcgccagcacggccagcgcaagggccagcagcagagacaatccttttttcatgttcaaaacccctttctgagtttccatggaaacgcattgttctattcgatcacgggcaaagcccggagatcacagagatggatttcccgccggagacgggatgcggacgttacgattccgcctgacgtttttcccttgccttccgcacggcctgtacgtaccgctgggtcgccacggccagaaatacgacggcgatcatcagcgaacacagcgcgttgacccgggggctgacccccaccttcacactggaataaattttcaggggcagcgtgccctcgcccgcgccgtagacgaagaagctgatgacgaaatcgtccaggctcatggccagcgccagaaacgcgccgctcaggatggccgggcggcacaggggcagggtaatgtcccacagcacccggcggggcgacgcgcccagatcccgggccgcgtcgaacagggactgatccatgcccaccagccggcttttgaccgacaggaacacgtagggaatgcagaaggtggtgtgagccagcaccagccgggccacgttgtcccgaacgcccaggacgttgaagatgaccataaaggcaaggcccagaacgatctccgggatcatgatgggcaggatggagaaggcctccatgaagcggtcaaaccggcccggtttaccccggaaccccagcgcgctgcgggtcatacccaccgcgcccagactgccgatggctacggacagaagcactgaccacagcgccacccgcaggctcatggccagcgccgggccgtagccgcccttgccctccagcagctcgccgtaccagcgggtcgtccagccggtaaaggccagcgggatccgggcggaattgtcgttaaaggaatagatcaccaccaccacaatgggcaggtacagcaccagcagcaccaatccgaggaagagcctggagccgaaggaatgttttttcatccgttttttcctcctcagaacaggccgaggccgtctgcgtcgccgcccgccttgcggtacagggcgatgaccacgccggtgacggccagcatcagcacgctcagggtcgaggccatgggcaggtcacggctcttcatcaggctctgaatcagattgcccgccagcatggtcttgctgccgcccagcaggtcgtttaagaagaacagccccgtggaggggatgaacaccagcacgcaccccgccatcagcccggacagggtcagaggcacggttacggtgaaaaaggcgtgcagcgggctggcgcccagatcgcgggccgcctccaccacggaatagtccagcttttccaccgccgtggaggacggcaggatcatgaagggcaccagcgcgtacaccatgcccaggaacaccgcgccctcggtgttcagcagcttcagcggctgctggatccagcccagatgcatcagcagggtattgatggggccgttgccgatgagcaaaatgcgccagccgtaaatacggatgagggaattggtccagaagggcaccaccagcagcagcgtgacgatggaacgggaggccggtttcagccgggccatcaggtagccgaagggatacccgatcagggcgcacagcagcgtcgtcagcgccgccagccgcagactgttcaccagcacctgaaaatactgaggttcccgcaggcgggcgtagttgtccagcgtccattgaccggacacgccgatcagctctccccggctctgcaggctcaggccgatgacgtagcccagcgccgccagcacgaacagcaccgtccacaggtacaaaggcagcttcagcagcagggcgaagcgtttgtccttacggttcatccctttcccccctcggcggcttccaaatcgagcttttcgtcgggcaccaccggcgcgtgggtctgattccagcccacgtacacccgatcgccgatctggaactgatccatttcggaagcctgcgtcacggcgttgaccgtcagccggtcgctgagggcgatcagcgtatgctgcatcccgccggaatagtatttctgccggattacgccctgcaattccatctggtgctggggctggaagccatagcgtaccctctggggtcgcaggcacagcaccgcccggtcgcccacggcaaagggacggtcggcgattgcgggcagctccacatcctccacacgcagggtcagccggccttccggccggacggaggtcacttcgccccggagcaggttgctctggccgatgaacccggcggcgaacagcgtctgcggatgctcgtagacctcctccggtgtgccgatctgttccacccttccctcccgaaggatcacgatccgggtggacatgttcagggcttcctcctgatcgtgagtgatataaacgaaggtaatgcccatttcctgctgcatccgtttcagctccgtctgcatctgctgacgcagcttcagatccagcgcgcccaggggctcatccagcagcagcaccttgggccgcagcaccgccgcccgggcgatggcgatccgctggcgctgaccgccgctcagctgggaaggcatccgcttttcatacccggacaggcgcaccagccgcagggcttcctccacccgttccttctgctccgcctttttgactccctttacttttaacccgtaggcgatattctgaaacacattcatgtggggaaacagagcataactctggaacaccgtgttcagcgggcgcttttccggcggcagatcgctaatatcccgtccatccagcaaaacgcggccctcggtcacgctttccagcccggcgatcatccgcagggtggtggtctttccgcagccggaggggcccagcagggtcagaaattctccctgttcaatatccagattcaggtgatgcaggatcattccctgcccatagtccttgcacaggttttccagtcgcagcagcggcgtttgttcactcacgggccttttctcccttcacggcccggcagatggcgtgcagcagcgcctctaccccgggccaaatttctcgattgatggtgtataccgtggcgcagccttcccgccgggcgtgcaccagccccacgtccaccagcgccttcatatggtagctgatggtgggctgggtgcagtcgaaggcccggtggatctcgcagccgttcatttcccgttcggaaagcatacttaatatctgcagacgggtctcgtcgcagagggctttcataatgggaatggatgcctgaaagcagttcatggtttcgactcctttaccgtctatatagagaatcctctatatagacggtagtttatatccatagagtgccgttgtcaatacgtaatttattttttagggaaagtgaatgtaaaaagcctccgacagcccgttcccctgcgggttacgggcttcgcaccctttttgcggcctgccccgcttcgcgtcgcaggcttcggactgcggtagccctttcagggctgtcctcgtcctcggtgcttcgcaccctttttgcggcctgccccgctttgcgtcgcgggcttcggactgcggtagccctttcagggctgtcctcgtcctcggtgcttcgcaccctttttggcggcctgccccgcttcgcgtcgcaggcttcggactgcgctgccgctgcgcggcgtgctcgtcctcggtgcttcgcaccctttttggcaaacagaaaccccggaccgaagcccggggcgtgatgattccgttttggtttccttgttttgaaaatcaacggtgaaaaagctcttccgcaaaagctttttccctgaccttcggcttactcagccgtgacggtgagcggcgaagcattcgctgcaatagatgggccggtcgctcttgggcacgaaggggacggtggtgggcttgccgcaggcggcgcacaccgtttcgtaggattcgcgtggcgcgttggcacggctgaccttccgggcggtgcggcattccttgcagcgggtaggctcgttctggaaacctttctccgcatagaattcctgttcaccggcggtgaacacgaactcagcgccgcagtcacggcacacaagcgttttgtcctggtacattttggggatcctccacttccgtttaagttggtgcatctggctgacctggtctttgaccccacactcgccggccggagggtttgctcatcgcttcggcgccctacgcgccctctctcgccgtcttgcggcggccggacttacttctagaacgcgccatgctcaccggggctttgcccggcttacgtggaccgttttgcccgcgtctggcatcggctttcaaccacagacccagatgcaacgcttttattatatgatttcatttaccaaaaaacaaggtgcttctttgtacaaacttcgcattttgtcctgttcggccaaaagccgccaaacttcgaccgttttcgcggacgttacagggaaaaacaggactctttacaacaggggcgggcatatggtaaactgctaggcgttgtgaaacggagcaaaaatggaaagccgcgttggaagacggaacgcggcacatgcacaggaggattgcgcatgaacgcaacgatggtattgtccctcatgggaggattgggcctgtttctcttcggcatcaaaaccatgggcgatggtctggagaccgcggcaggcaaccgcatgaagcaccttttggaaattctgacccgcaacaagctgaccgctgtcctgatcggcgctttcatcaccgccgtcattcagtccagcagcgcaaccaccgtcatggtggtcggctttgtgaatgcgggtcttttgcaattaagtcaggccatcggcgtcatcatgggcgcgaacatcggcaccaccattacctcgctgatgctgtcggtggagatcgacttcgccattatcttcaccgccgtgggcgcggtgctgcagctggcgggcaatcgccccgccgtcaagctgggcggacagatcgccatgggtctgggaatgctgtttctgggcatggacatgatgtcctccgccatggagcctctgcgggactggaagggctttcaggatatgatggtctacgccgccaacccggtggtgggcgtactggtgggtgcgctggtgacggcccttctgcaaagcagcgcggccagcatcggtattctgcagtcgctggctgcggcgggcgccgtcggtctgaatacctcgctgttcatcctgttcggccagaatatcggcacctgcgtcacctgcctgctggccgccgttggcaccaaccgcaccgccaagcgggccgccgtggtgcatcttttgttcaacgtcatcggcacggtgatcttcctgatcctggcggcgttcctgccgctggcggactggatcgccctgtttgccggggacaatatccgtctgcagatcgccatcgcccatgtgggcttcaatctggtcacgacgctgctgcttctgcccctgagcggcgtactggaaaagctggcgtaccttctggtacgcggcgaggacaagcctcaggaacctatgcggctcaaatatttcgacagccgtcttctgtccaccccgcccgtggcggtggagcagctctttaaggaagtcatgcgcatggcggacatcgtcatgaccaactatcactttgccatggactacttcttctcccccaaatccatggatccgtcggagtttgacaaccgggaggaagtcatcgacttcctcaacgaggagatcacccgggagctgatcgaggtcaagggcctgcagctcagcaccggcgacgtacacctgaccggctccctgttccacgtggtcaacgatctggaacgcattggcgaccacgccaccaacatcatggagatcggcgcggccagacgcaaggaaaagagccgcttctccgccaaggccgagcatgagatcgagaacctgtccggcattgtgacggaaatgctggaaaagagcgtccgcattgtggacaagcagctggacgacccggaggatctgaacgaggtcttcgaccgggaaagccacgtggacgagctgtgcgagacgctggccgctcaccacgtggatcgggtgaaaaacaaaaaatgtacgccgaaaaacggaatgctctatctggatatgctcaacaatctggaacgcatcgccgaccacgccaacaatctggcggagtccgtcgatcacaagggcgaccccgaccggctgctgtggtaaaaagcaacaccggcgcgaaagatattctctcccgcgccggtgtttttatttttccaatgaaatttcccgcccgtccacggcggcggctgtcagcgcgtcgtggatgtaggtcaatttcaacgagaatacgtcctgccgctcctccagcagccggaagaaaagcttgtccccctcccacaggggaaggctgccgatcttctccttttcgatccattggaggtcgccctccgtgcaggggatgggctggccttcaaagccgtcggcggtatacaaaaaggtatattcgtccagatcgtcaatgacgaaggtgatcacgccccgcagccgaaagcgggtcagcgtatagcccgtctcctcccgaacttcccgcaggatgcattcctccggggattcgccctgttccagatggccgcccacgccgatgtacttgtcgtggttcatgtcgtttttctttttggtgcggtgcagcatcaggtagcgcccgtccttttccagatagcacagcgtggtcagcatcttgttcatggcttcggtcttcctttcgcttctttcgttccacggaggtattatagcacagttgccgctctggttgcatccgggagaagaaaccagtataatggaacggccaatagggctgttttcctcaacaacaaaagaaaggctgaacgatctatggacatctttgcatatctggaaggcatggcggctcagcacgggcccagcggccacgaggcttccgtggcccagtggctgagcgagcgcttccgccccctgtgcgacagcgtgaccatcgacgcgctgtacaacgttatcgccgtcaaaaaggccactctgcccacgcccgacggctcccccgctccccgggtgatgctctgcgcccatcaggacgagattgccctgatggtgtccgacattctgccggacggcaccctgcgcatgggctccgtcggcggcgtggatccccgcatcctgcccgcctccacggtgacggttcacgccaccggcgagggggaaacgcgaaagctgaacggcgtggtgggcgcgctgccgccccacctgatgagcgccgaggatcgaacgaaggcctatacccgggaggaactgttcgtcgacctgtgcatggccccggaaaaagtgaaaaagttggtcaatgtcggcgacctcatcaccctgcagggccccgccgtcaagctgctgaaccaccgcgccgccgccaagaccgtggacgaccgctcctgcgtgggatgccttctgctggccgcggaacggctccagaaaatgcagcatatgtgtgatatttactttgtggcttccagtcaggaggaagtcggcggccggggcgcggcggtagcttcctataccgtagaccccgatctggccgtggtgctggacgtgaccttcgctcccacgccccagtgtccgccggataccacctgcccgctggacgcgcctgccaccgcttacggcccctatgtgcagcaccggctgctggaacggctgaagcagacggccaaggaaaacggcgtcaccctcaactgtgagcatacggagcgcagtaccggcaccgacgcggacgacgtgcagatcgcccgggcgggcgttccctgcgtgctgctcagtctgccggtgaagtacatgcacaccagcgtggagctgttggacatgaacaccctgtccgaatgcggccgtctgctggcgctgtttgtggcgggcattgacgagaaatgggaggatggcttatggaactgagcaggctttgtgaaatgcagggcatcagcggccgggaagagctggtgcgcatggccatttttcgggaatgtgcggaagtactgggcgaggaaaatgtgaagatcgaccgaacgggtaacgtgatcgcccacaaggcctgcagaaaagcggacgcgccgcgggtgatggtggccgcccacatggacgaggtgggtctgatggtcatcaacgccgcggacgacgggcttctgcaggtgaggaatatcggcggagtcgacccgcgggtgctggtgagcaagcgggtcaaggtgggctacgacgtgcccgcccgggacggaaagcccgcgcaggaggctctgaacggcgtgatcggcgcgatggcgatccacctgcagagcgccgccgaccgtaaaaacgtgctgcccattgaaaacctttatgtggatatcggcgcgaaggacaaagacgaagcgctggccaaggccccggagggaacgcccatcacctttgccaccccctccacccccatcggcgacgggtgcctgctgtgcaaggcgggcgacgaccgggtgggctgctacaacctgctgcggcttctgcatgccgacgtgacctgcgatacgtggttcgccttcacctgtcaggaagaagtaggcagccgtggcgcttacggcgcggccttccgcattcagcccgacgtggctctgattctggagggcaccaccgccaacgacgcgggcgagcaggacgagacccggaaggtctgccggctgggcaagggcgtggccgtcagctttatggacaaagcctccatagcgcagccggaactgtttgcggagttgctgcgtctggccgagggcagtggcattgctcatcaggtgaaaatggccgtggcgggcggcaacgacagcggccccattcagcggacgggctgcggcgccaaggtctgcgttctcagcgttccctgccgctacatccactctccgtccaccgtgctttgtctggaggacgtggaagcccaatacctgctggcgaaagcctatctgacccgctgacttatactgaaacaaattgatcgggggaatcaagccatgtatgaacttctgaaaactctgacctccgcctacggcgcttccggccgggaaacgcccgtcgccgacgtcatcgaagaactggttcgcagccatgtggacagcgtccgccgggacaacatgggcaatctgatctgcgtcaaaaacggcaccgaccccaacgggaaacgcatcatgctctccgctcatatggatcacatcggctttatcgtggccgctgtggaaaaagaaggcttcctgcgggtggctcccgtaggcggcatcaaccctgccgtcagccagacccggcacgtcagctttgaaaacggcgtacagggcgtgctggtgcgtcagcccctgaaggagggcgagacggtcgccatgaagcatttctacatcgacatcggcgcgaaggacgcagaggaagccctgtccatggtgcaggtgggcgacgtggccgtttacgccaacgactgtttccggctggggcagcatcgggtctccgcccccgccatggacgaccgggtggcctgcgcgctgctggtcagcctgctcagcgatctgccttctgtgaaggacacggtcatcgccgtgttctccacccaggaggaagtaggcctccgcggcgcaaagacagccgcctacggcgtggagccggacgtgggcattgcgctggacgtgaccgccaacggcgacacgcccgaggacaagctgcccgccgtgaagctgggcgagggcatctgcgtcaagatcatggatcggggcagcatttccaacccggagctggttcgggagctgctggttgccggcgaaaaagcgggcgtgcccactcagcgggaagtgctccccttcggcggcactgacgcgggagccatgcagctgacccgcggcggcgttcgcgtctgcaccctgtccatcccctgccgcaacgtccacagcgcctgcgaggtcatcgacctgcgggacgtggaagggggcaaaaagctgctgctggcctatctggaacgttaagcgccgcccggtgtctacgctctcaacgtttcttgattgcacaggccctcccctgcgggagggcctgccgtttttctcccggttgacgcggcggcaaaaggccgtataatgaaaccatcccgaccaaagaaaatggagtacacttatgaacgcttcaaatccttccatggaaaaagccccgcgccatatggggatcgagctgctgcggatcgtggccaccggcatgatcgtgctgcaccatttgctggcccacggcgggctgctggctgtctttcccagccccgggcccacggatgcggccatgcgcctgctgaacgccttcgcttactgcgcggtcaacctgtacgggctgatctccggctacggcggcagcggacggtttcgtccggcgcggctggtagggctttgggtgcaggcatggtttaccggcgtggtgctgacggcgcttttgtcgccgctgaccccggtcacggcggcggactggcgcacggctcttttgccgattggttcgcaagaatactggtacctgacggcctatttcggcctgtatgtgctgtcccccgccctgcacgctgccgtggagcggctttcccgccgtcagctgacgttgacgctgctgggctgcgccgtccttttcaccctgacgccctccgcggcggaatcgctgagcctgagtggcgggtatcacgtgggctggctgtgcgtcctgtacctgctgggtgcctggctgcggcggtatggttcgcccgcccgttccaactggaagccgctgctgtgcttcttcctctgcgtgggaatcgcgggcggatggcagatcgccgcgctgctgctcaaggcccggggcattacgccgcttatggacggcgatcaactgctgcactacaacagcccgttgatgcttctggcttcgctggcgctgtttcggtggttcctgcggctgcatccgtcgggccgtctggaacgcttcgtccgctgggccgcgccgctgacgctgggcgtgtatctgatccacgatcagcctgttttccgccgggtgttcatcgtcctgcggctgaccggattcagcagtctgcccaccctgctgatcctcccggcgctgtttagcgtatggctggtagtcttcgccggttcggcggcgctggaatggctgcgcgttcggcttttcgccctctgccgggtcgaccggctctgccagcgggccggagaccggctcaccgcgctggcctgccggcttttgccggaagaaaaagcccgcccttgacccatcccgctccatggactacaataaggaaaggacctgcctgtccgtcattcctacggaaatggcggacggcagaaacccaacagggttccattcggaaggaggacatttctcatgagtatctcccggaaatattttgacaaaaccgcccgcggcgaggaagtgacccaatatacgcttaccaatcacaagggtgccagcgtcagcgtcattgactttggcggcattgtgaccagcatcgtggtgcccgaccgggacggaaagctggccgacgtgaatctgggcttcgacgtggtggatacctacgacggcaagggcggctgcatgggcgcgctcatcggtcgggtgggcaaccgcatcggcggcgcggcgttcgatctggaaggccgccactacgtgctgggcaagaacgacggcgaaaacaacctgcacggcggcccggagggcttcagccagcggatgtggaaggccgagcccatcgagggtcgggacggcgacaccctgcggctgaccctgaccagccccgacggcgatcagggcttccccggccagctggacgtgaccgtggactacacctggaacgacgcctgcgagctgggcgtccattacatggccgtcaccgacaagcccaccctgtgcaacatgaccaaccacgcctatttcaatctggacggtcacgacgcgggcacggtggagaacctgaccctgcagatcaacgccgactgcgtcaccgaggccgacccggcgctgatccccaccggacggctgctgccccagaaggggctggcctacgacttcaccgaggaagtccggctgggcgacgtgctggccaggacccccgtggatcccgtcatgcgggacgcgggcggagtggacttcaactactgcgcgggccgggaccgggagaccaagctgatcgccaccctgcgctcccccaagaccggccggcgcatggacgtgatcaccgaccagcccggcgtgcagtgctacaccggccaggggcttgaccacaccggcaagggcggcgttcactacggcccctacgcaggcgtatgtctggagacccagcactatcccgatgcgattcatcagccccatttcgaaagctacgtgctgcgtcctcaggacaagtacgacaccttcaccatcttccgcttcaccgcggaataagcagtcgagggctttccgcccggaaggaggcgcttgatgtccactcagtttcgcatgaccgacggcccgcttttggacgctcagggccaactgatcgaaaaaggctaccagacccgtctgagccgcgtctacgaccggagcgccatccgggcgggagcgctgcgcatcaaggaatgggactactattgcgtgacctccggcagccgagtgctggcgctgaccattgcggacaacagctacatggggctggacagcatttccctgctggacgtagacgcaggctggcagcatacccgcagcatcatgcgggccttccccatgggcaagaccggcctgccctccaccagcgccaggggggacgtttgcgtcagcggcagggatcacttcctccgctttcaaaacgacggccgcgtccgggtgctggacgcgcagatgggcaattttcagcccggcaagtccctgaaggcccatctggtgctgacggacgagccggaggactccatggtgatcgccacgccctttgcgggcaagccccggcacttctactacaatcagaagatcaactgcctctccgccgagggcgaggtcgtctttgacggacgggtctatcccttccgcaaggaagattccatggcggtgctggactggggccggggcgtatggacgtacaaaaacacctggtactggagcagcctgagcgcccgcctggacggcgtgcccttcggcttcaatctgggctacggcttcggcgacgtcagcgccgccagcgagaacatgctcttctacggcggcagggccttcaagctggacaaggtggagttttacattccgcagaccccggacggcagggacgattttctcaggccctggtctgtcgcggacaacgaaggccgtctgaacctgaccttcacccctgccctggaccgggccagcctgaccagcgccctcgtcatcgaaagcgaccagcaccaggtcttcggctactttgacggcgacgttctcttcggcgatacgcccctccacctgaaccatctcctcggcttcgccgaaaaagtccgcaacaaatggtaaaggggcagtgcccctttaccccacaccgcgcccatagggcgcggggctgctcgtgggaaagcaacctggccggggttttaccgccgtggcacgacgggtgccacggctcgcgggtctggtacggctccctgctgcttgtatagcatagaccgccattcggcgacgggcctcatggctcgcgcccccaaatccgctggccgagggccttccaaaatcgccccgcaagggggtaagcctgaccgccatctactgcgacggaagcagaatccctgcaagggctgcgtatgccccacgccgactgtggggaatcataagccttctttcgttgaagcggcaaagcagtccagttgtagaaaccacgtcaccccgcaaggggtaagtctgccccacgccgactgcgggggagcagagcggcgataggcagcggagggaaaaagccttgccctttttgaaagaggaaaagagtgagcacgagcgcgcacgaacgtatgagttagctagccaactgtgctgcgcgcgacattgcgaactccctctttcaaaaatgggcaataaagggctttttcccggcgggtgagcgaagcgaaccgaggacgaggacagcccgaagggctaccgcaggacgaagcccgcgaccaagggaggccgaaggccgactagcgccagaaatggccgaaggccatgaagcgcgtagccaagcacaagcgtagcgcagggcttggccgcagtgcaaagcggggcgggccgcctctggagtcgccgtgccgctggctttcttttgcacactt

SEQ ID NO: 1263 - DNA, 4937 bp, Unknown
  16S sequences of unknown bacteria
ccgcgcgttgcttggcggccgtctttgcaggaacgaactgcgcggcggcatcgggcggaaacacccagcggtcgtcgacgggaccgacccccggatggacgagcttccactccccgtcgacgcgcttgatcttgggggcgcctccggggggcgtgaacaggtgcagcgcgctggtgagcgggcagaggtactcgcgcgagatccacctgatgagctcgacggcggacgcgtcgaaatacggggtcgagagcatgcctgcgaggggcttgatctttgccgggtcgcctccgtcggcgatgatgtcgtcttctgagagctcttggaggccgacgacgtaggcgacgacaggacggttgccaaagtcgacgctcaccgcgcagccaacctgcaccgaggcaagctcgtgcggcacgcggtagaagaaggcgcggtcgagcgcacgcgcggatacatcgactatgactgacgccaggtacatgctggtttccgttccagatacaaagcgggacgcgcagcacgcgtcccgctcgcttcatctgcgttgtcgagtgcgactacaggccgcaggcggccttgagctcgtcgacgcggttggtctgctcccaggggaagccctcgcggccgaagtggccgtatgcagcggtcttggagtagatcggacgctgcaggtcgaggtcgcgcaggatagcgcccggacgcaggtcgaagacctcggagacggccctttcgatcttgtcctcatcgacatgcgccgtgccgaaggtctcgacgaggaggctgagcggcttggcgacgccgatagcgtaggcgatctggatctcgcagcggtcggcgagacccgcggcgacgacgttcttggcaacccagcgggctgcataggcgccggaacggtcgacctttgtcgggtccttgccggagaacgcgccgccgccgtgacggcccatgccgccgtaggtgtcgacgatgatcttgcggccggtgaggccagcgtcgcccatggggccgccgacgacgaagcgcccggtcgggttgacgtagatctcgcagccctcccagtcgacgccttccttctcgaagaccggcttgatgacgttctcgatcaggtcctcgcggatctgggcctgctcgaccttatcggaatgctgcgtggagatgagcaccttctcgacgccggtcggcttgccatcgacgtagcggacggagacctgggtcttgccgtcggggcgcaggtactcgagcgtgccgttcttgcggacctccgtcaggcgctccgcaaggcgatgcgcgaggtagatgggcatcggcatgagctgggaggtctcgttgcaggcgtagccgaacatcatgccctggtcgccggcgccgatctcgtccagcgggtccttatccgcagagtccttgtagttggagctcgcgtcgacgccctgcgcgatgtcggggctctgctcgtggatggcgttgatgacgccgcaggtgtcggcatcgaagccgaactttgcgcgcgtgtagccgatgttgcggatcgtgtcgcggacgaccttgtccacgtcgatgtacgcctgggtgcgaatctcgcccgtgaccatgacgaggcccgtggtaacgacggtctcgcatgcgacgcgcgcgttcttcgggtcggcggcaacgccattcggggcgatgtagcccttcgcggcaagctcggtttccttctcgaggattgcatcgagaatcgcatctgaaatctggtcgcagatcttgtccggatggccttccgtcacagattcagaagtaaagagatatgagttcttgctcatgtgcactcctgctggtatagcttgaacagatggggactaccttaacactctagccaggataattgcaccctaaatgtcgataggcccgctccgtggcctgtcttcccttcggggtgcgaagtatcaggccctgcttgagcaggaacggctcgtagacgtcctcgatggaatccgtctcctctcccagcgcgctcgcgagcgtggaaaggcccaccggcctgcctccaaacgtgttcacgagcatgtcgaggatacggttgtccatggggtcgagccccagctcgtccacctcgaaaaacgccagcgccgcacgggcgacctcggccgtgatgatgccgtcgtagcgcacctgggcaaagtcgcgcacgcgtttgagcagcctgttggcgaggcgcggcgtcgcacgcgaacggcgggcgatctctatcgcgccctgctcgtcgacctcgacgcccagaagcgtcgccgacctcacgacgatgtcgcgcagctcctcgaccgtgtagtactcgagatggaacgccgcgccgaagcggtcgcgcagcggaccggtcagaaggcccgtgcgcgtcgttgccgcgacgagcgtgaaccgcggaatctcgaggcggatggagcgcgccgcaggaccctgcccgattacgatgtcgagcgcgtagtcctccatcgccgggtacagaacctcctcgacggcacggttgaggcggtggatctcgtcgatgaacagcacgtcgccctcttcgaggttcgtgagaatcgccgcgaggtcgccggggcgctcgattgcagggcccgacgttgtcttgatgttgacgcccatctcgttagcaacgaccgtggcaagcgtcgtcttacccaagcccggaggacccgagaacagcaggtggtcaagcggctcgccgcgaagcttggccgcctggatgagcacggagaggttgtccttgatacgccgttgccccaggtactcgtcaagcgtggcagggcgcaggctcacctcgcccacggcgtcttcgggcgccgcgtccgcatccacgaggcgggcgtcgctgtgaaattccccgtcggagacgaagccgggtgcttcccatgcactcatgccctacctcccaactgcttaagcgcatagcgcatgatggcggagacgtcctcggacgtgcaccccttgagcgcggccgcgatttccggcgacgtgaagcccatcgactcgagtgcggcggaagcatcggccatggcgccgctttttgccgagtcttcggcggcgctgaactggtccgcttccgacttgagtatgccctgcagctccagcacgacgcgctgcgcggtcttcttgccgacgcccggcaccgaggagatcctcgtgacgtcgcctgccgcaatcgccgaggcgagctctttgggattgaaggtcgaaagcgccgagatggccatcttggggccgatgccgctcaccccgatgagcttgacgaacatctccttctctgccgcatcgcaaaagccgaacagcgacatgccgtcgtctttgacgtgcaggtaggtccacacctgcgccgtgttgccgactgcaggcagcgtgccgagcgccttcgaggacatcgacatctcgtagccgatcccgtttgcctccagtatcacgccgtaaccgtctttgtgcgcgatgatgcccttcacgtacgcgatcacgtcatgccctcctcttcttcatgctgcgctccttgtccagggctgcctggacgcgcgcctcgaacttgctctttgcctctgcagcagacgccttgtcgtccatgcgtcccgacaggcgcgcggcgctctgcttttctatctcgcgggccgtgcgcaggcgcgcatgcgtaattgccgccgcgagcgcgtcggcagcatggtcgggcttgggctcgtggtccagcttgaggatggccttgaccatgtactggacctgttctttgtctgccgcgcccgtcccgacgactgcctgctttatctgcatgggggtgtattcgccgtactcgagccccttgtaggcgcaggcaacgagcgccgccccgcgtgcctgcgccgtggggatagccgacttggcattctcgccgaagtaaatgccctcgacgctcagcgacccgggcatgtacctgtcgatgatctcgcacaggttatcgtggatgatcgcgagccgcgtgggcaagtcgtagcggttcgtcgtggagatgcacccgtaggcaagcggctcgacgcgtgcgcccgtgcacttgatgacgccccaccccgtgttcgcaagaccggggtctattcccatgatgatcgatgaaaccacgacgactcctacaaccaaacaaatgttcgcacacagcatagaggttcgactgctcgagcgcaaggcgcgtgattcggggacaactgcgcgaaaactccgctgctgacctgcgcacatcgtatccgcctccgatattgctcggagataggtcgcggtcgcctctgggaagtgctcagattttagggggtggttttggcaggtggttcggattgatggtttggccgtgcgcaaaaggcgcatcgatcattcgacctgcccgacttgggcactgggaaagtaggtaaccatgagaggacagccaggacgcctgagaaaggccccgctaaacgcattcaacgtaaccttgaccctcgcactcgtagtcttgatgtgcgtgccgatgctctcgggagcagcgcccgccaaacgtgcggacgccgcttccgacccgatccacctcaacgtgggaggctcgatctactacgcgggctacgagacccactggatggacgtcgacggggccatggcgtattgcgcccagccccagatgcagactccgccttcgggcacgtacgagaaaagcccgctgcgcacggtgccgtccggcgtcacgcaggcgagcgtcgagcagatggccgcgggcatctactacggcttcggcggcccgggcttcgacgagtccaagcgctacttccccgccacctggtttgacgggacccccatgaacgacgagcgctacgccgcgctcacccacatcatcatctccgacatctattcttgtacgggcagcctcgcgctgcagggcacgagcgacgagttcagagagtgggccagctacaacgtcatcggctaaa

SEQ ID NO: 1264 - DNA, 4795 bp, Unknown
  16S sequences of unknown bacteria
ggctacgacagcgatccggctttgtatggccaggagaatgtggcttgccgcaatatcgaccgggatcgggacgaaaaagaactggcgctcctgcgccgattttgcggcgcgcggaagccggttctcggcatctgcagaggctgccagctgatgaactttgccctggggggcgatttgattcaggatcttcccacgaaagagcgtcatgtagatcttgaaaaccgggatcagctgcatgaaatcgtggcggcgccggatacttttctggcggcgctttacggctgccgcgccgtggtcacctcggcgcaccatcaggcggtggggtgtctgggcgagggtctgcgtgccgtggcatgggcgccggacggcgtggtggaggctgttgcgcatacagcgctgcccctgtggggggttcagtggcaccccgagcgccaggcttttgaacgcgcgcgcactggcgcggcggacggggcaaagctctttgacgcattttgtgcgctgtgtagcgcatagcgcgcgcaaaacaggaaaaaagaaggtgaaggacggtggcttccagcaaagaaatggtagactatgtttgcgatcagctcagcggcgcgggggaaatccgggccaaacggatgttcggcgagtggggtctgtactgcggcggggtttatttcggctgcgtctgtgacaaccagctgtttatcaaacccacggccaccaatgtggatttgcttgcacgtccggagccagcggcaccctatgagggagcgaaaccctgctggcgcattgaagatctggaggatcggaaaacgctggcttcgctggtggagcgcacctgcgccgagctgaagcagggaggaaaaaaacggaacgggcaggaggagtttccatggacggagaaagactgttagtcgtggtagattaccaaaaagattttgtggacggggcgctgggctttgccggtgcggagaatctggatctgcgcattgcggctaaaatcaaacgctatcacgatgccggagatgtggttgtgttcacttatgacacgcactggaaaaattatctgaccacccaggagggacgtaaactgcctgtggagcattgcatctgcggcacaccgggctgggaactgtacggcgaaacggccaagcagcaaaaggaagaagacctgtgtttccagaaacccacatttccgtcgctggaactggcggactatctggctgaagaggagttcgtttctgtcgagctggtgggtctggtgtctcatatgtgtgtgctgagcaacgcggtgatggccaaggccgccgcgccggaggcagagatcattgtggatgctgcgtgtaccgcttcatttgaccccaaactgcacgaagaagctctggatttgatggaggcgctgcagatcacagtgatgaaccgctgacagaatgcggcaaacgacaaaagagaagaggcttttgtatgaaacaggatatcaattacaccatgctgtttgacttttacgaactgaccatgggcaacggctatttccagactgggttgaaggaccgtatctgctattttgacgtctttttccgctgcgtgcccgacggcggcggatttgccattgcggcggggctggaagaggtggtgcgctatattcagcagctgcattttgacgaggaagacattgcgtatctgcgctccaaaggcgccttttgtgaggattttctcgattttctgcgcatgttccgtttcaccggtgatatctgggcggtgccggaaggcacgccggtgtttcccaaggagccgatcctcactgtgcgtgcgccggcgatcgaggcgcagtttattgagacctatgtgcttctgacgctgaatcaccagtctctgattgctaccaaggcgaaccgtatcgtgcgcgctgcccaggggcgcgctgtgtcggaattcggatcccgccgggcgcagggagcagacggcgcggtgtccggcgcccgggcggcctatctcgccgggtgcagcggcacggcctgcgccatggccgacgagcgctacggcgtacccgcaggcggcactatggcgcattcctgggtgcagatgttcgaagacgaatttacagcttttgacgtctactgcgccttgtatcctgcctctgctacgcttctggtggatacctacaatgtgctccgctccggtgtgccaaacgccatccgcgcctttcagaaacacagtattactaatggggccatccgcattgactccggcgacctgacctatctgtcgcgcagggctcgcagcatgctggatgcggcggggctgaaagaatgcaaaattgtggcgtccaatgctctggatgagtatattatccgggatctcatcaatcagggtgcctgtatcgacgcattcggcgtgggcgagcggttgattacttccaagagtgaaccagtgttcggtggtgtatataagctggctgccattgaggacgcggaaggaaatgtgattcccaagatcaaggtcagtgaaaatcccagcaaagtgaccacgccgcattttaaaaaggtctggcgtatttttgaacaggaaagcgataaggcgatagcagacctgattacagtgtatgacgaaccgatggacgaaacaaagccgctggaactgttcgatcccgacgcggtgtggaaacgggagaccgtagagcgctaccgggctgaggaactgctgcggcccattttcaaaagcggcgagctggtgtacgatctgccggatattgaaacgattcgcgcttactgtgcccgccagatcgagcggcaatgggatgaggtcaaacgctttgaaaatccccacaactattatgtggatctgtcccagaagctctgggatatcaaagcagatctgctgcagcaggcaaaagcataacaagcataaaaacgctcccgaaacctatggtttcgggagcgtttgtgtttttgcggaaagatggtcagagcactgcggccaggaaatcctgcgtccgtttgacctggggatgctcaaagatctgctcgggtgtgccctgctcggcaatgacgccctcggccatcagaataacccggtcggccacatctcgtgcaaatcccatctcgtgcgtcacgacgatcatggtcatgccgccttctgccagctctttcatcacggagagcacctcgcccaccatttccggatccagcgcggaggtgggttcatcgaagagcatgacgtccggattcatagctaaggcgcgggcgatggccacgcgctgctgctggccgccggagagctgatgagggaatgcgttggccttgtcggccaggccgacccggtccagaagctctatggcctttttctcagcttcttccttgctcatcagcttcaaatctacaggggccagcataatgtttttcttcacgctcaaatgggcgaagagattaaagctttgaaacaccatgccgatgttctggcgcaccttgttgatgtccacctttttgttggtgatttcgtatccatccacaaaaatctgcccttcggttgcctcttccagacggttcagacaccgcaggaacgtggactttccgccgccggaagggccgatcacgcagaccacttcgccctcggctaccgtcagatcgatgcccttgagaacatccagatggtgaaaactctttttcagattatgaacgactaccttttctgtcatagctcagtctcttttccatataatgtgccaaaatcatcaaaagggatgtgaacaccagatagaagatgccgacccatacataggttgcaaaataatcgtagcgtaccgatacatactgggtggctttgttcacgatctccgccagtccgatcacagtcaggatcgaagtgtccttcagcgtaatgataaactggttcaccatgggcggaatggcaatcttgaacgcctgcggcagaacgatcttcactgtagtgcggccggcgctgaggcccaggctgcgggcggcctccgtctgtcctttcggcacggcctggatgccgctgcggaaaatttcggagagataggcgccggcgttcagactcagggtgatgatgcccgccataaaaggtgtggggtgaaacccggggatcacctgaggcataccgaagtataccaccagggcctgcacaatcatgggcgtaccgcggatcagccaaatgtaaaaattggagattagattcagcactttgaaccgcgagatcttcatcaggcaggagaacaggccgaccacgatgccaatgacaatggagatcgcccagatctcgatggtgatttgaaaaccctgaatcaggaacggccaggcgcgctgcagagtttcaagaaacgattggatcataaaatcaacttcctattgttggagttggcgaaagggatgaaatgctcagccctcgatgccgtaattggccaggatttcgtcatagacgccgttggcctggatgttggcgaggcctgcgttgaacatttcgatcaattcaggattgctgcccttcagaacggcgaagccatagttgccgatttgaaccttgtcgcccacagtcttcagatccagatcctgtgcggcgatctgatagttaatcacggaaaagtcctcaaagccggcggcatcattgccattggtcacagcggtatacaccgtgggagaatccttgtaggaaacaatggtgaacccgtattcatcggcgacgctctgagcatacttttcgctttcggtgccggctttcaccgcaaccgttttgccgctcaggtcttcaatggaggtgatggagctgtcgcccttgacaaacataatctgac

SEQ ID NO: 1265 - DNA, 6098 bp, Unknown
  16S sequences of unknown bacteria
tattatctccacacctgcaagctctgccgcgtgcgccgcatctgccataatatgctctatatcgtctgccgtcgtaccctggggcagcataacagcaagcagtatgccgagcggctctacgccgtttgaagctatgtcgttgcaggatatatgtatggcgagtcttcctatgtctgagaccgccgccgtaattggatctgtcgaaagcacgcattcatatttaccgaaatcaaccacggcacagtcttcgcctatgcccggtcttgttatcacttcatctcttttatatgttatcttatcaaaaactattttttttaaaatctcgctgtcgagtttgccgacaggcagcgctttcttgtccatttgcttatcctttccttactgaaattctattcatcaatttctgtttttctcaggtattttacctatatttacccgaaatacgcccgtttactcggtaatatacgcttcatccttcaagatatccttaataaactgttcctccgttattatcggtaccccgttttccttagccgctttattttttgatgagcccgaagttatatcattgtttatgagataatcggtttttttcgataccgatcctgcaactttgccgccaaattcggctatcagctctttgagttcgtctctgtttttgaaatgagaaagagagcctgtcacgacaaacgtcttgccctcgatcccggaatttgctcctgtctcttgctgcgcttttttttctattttcacctgcgcgtatatatcttcggcaattcgtctcttctcggaattgtcaaaaaacgctctgtaattatctgccataatatcgccgatgccgtctatttctatgagctcgctgcgcgttacatttttaatgcgctcaaaatcgtcaccgcaggcacggcttataagcccagcgttagctgttccaatccccggaatgccaaggctgtaaagaagccttgccgcagtcgtatttctcgccttctcaatggaagctacgagattggcaaacgatttttctccaaagccttccatatttataatttcgtctttatattttcccacgcagaaaaggtcggccggctccgatatgagccgcttagctatcaacttttctatcgtcgcttcggaaaggccttctatattcatagcgtcacgtgaaacaaaaagcgtaaaccactttatctgttttgccaggcagtctttatttacacacacaagtgtttcaacaccattttcgctgcgtatttccgtatgctcgccgcatacggggcatttatccggtatttcaagttctccgctttttgttttgttttccgctatctgcggaattatcatattagccttatatacggaaatcgtgtcgccgattccaagtttcagttcctttacaatgctgacattgtgtacagacgcacgcgatacagtgcttccttctatatctacaggatcgaatatagcgacgggatttatgagacccgttctcgatgcgctccactcgatttcgcggagagttgtgtccgctgtctcgtctttccacttaaacgcaatggaatcgcgcggaaactttgaagtattgccaagcctgcttccatattctatatcgtcgtacgtgagcaccagcccgtcagacggcaaatcgcttttcattaccttttttgcaaactcatcgacagcttcatttatattatcttctgaaacaagcgtatgctccaccacatcaaagccttgctgcgcaagccagctaaactgtgccagccgtgaattgccgaaatccgcactctccgcgcttatgccgctattttcagcctctgcatcgccgctttctgccgcagcataaatattttccgtactaacgagcgaaaatgcgtaaaaatgcacgcggcgttcagccgttatcttcgtatttagctgccttacactgccgctgcacaagtttctcggatttttgtattttgcatctgcctcctcaatttcggcatttattttttcaaagtccgagtattttataagcgcttcaccgcgaagcacaagcttgcctttataaggtatatttaacggcacattggcaaataccttaacattctgagtcacaacttctccaatttcgccgttgccgcgcgttacggcttttaccagctttccgccctcatatgtgagcactatcgtcagcccgtcaagtttccaggaaagcacgcctgtctgtgtgccaagccattccgccagctcttctctgcttttcgtcttgtcaagtgaaagcatacgcgactggtgccgctctttgggaagactgctaagtacttcatagcctacatttacagtcggacttcccgcaagcacagtaccgctctccttttcaagcataacaagttcatcatacagcttgtcgtattcaaaattcgtcataatctcacggctttcctgataatacgctcttgatgcgtcattcagaatttgcacgagttctttcattctttttacggaattctccatttatctgttctctccgttttcagcattttattcagcaacgctctttccgcgcccaaaatattttgccgcagtttaaagctttttgagaggtgctatatcctttgccagctttttcagaccgacgctgtcaaacataacactcactgtgcgttcgtcggattctataacgagcccgtgtccgaattttccatgcgttacctcgtcacctgcttcgtaagaagcatttcctgcaccgcttgccttgctttttacctcctgcttggcatacttcaggctgtcaaagggctttgcagaagacgcagaggacgcaaagccgtcatatccaccaaagccgccgctgctcttcttgccgtcgtatatagcatccccgtctatcagttttttatctacctcacgcaaaaattgcgattctctcgtataatcagtcttaccgtacagcgtgcgcactgccgcgctcgttaaataaagtctgtcctttgccctcgtcataccgacatagcaaagccttctttcctcttcaagcccgtcaggtttttcatatgctcgccaccccggaaacaatccgtcctccattcccggaagaaacacaaccggaaattcaagtcccttggcactgtgcatcgtcataagcacaactgcattttcactggcattatgattgtccacatcggaaataagcgctactctttccataaaatcctcaagtgtaagctctggatcatctttttcgtattcaaatattaccgatttaaattcaagcaaattttctattcttccgtctgcctcaaccgtattctgatcctcgagagccttaagatatcccgtgcgcacaagcagtgcatcatatatatccgaaactctaagattttgtttttcttcagcgcactcctttatggctctgagcatttccgcgacactcgttatcgcttttgccggcagagcatacagcacatcttcgtcgcaaagcgcgtcaaacatgctttgaccgcgcacgtccgcaagcgctcttagtttttcgaccgttttatcaccgatgccgcgctttggctcgtttattattcgcacaagcgacaaatcatcggcgctgttatgtacaagccgcatatatgccatcatatctttgatttcttttctgtcgtaatatctgagcccgccgagcactctgtacggaatatcatttctcgaaaaagcgtcttcaaaatttctcgactgcgcgtttgtcctgtaaagcacagcaaagtcacggtattcaagttctctgccgtctgccgctttgccacccgatgagccaactgcaagcgttcttccgctgagcctgtctatttccctcgcaatgtagctcgcctcatccttttcgttatcagctctgtaatatattatcttatcgccggcatcctttgacgtccacagcttcttcgcttttcttcctttattatgagaaatcaccgaattggccgcattgagtatattgccgtacgagcggtaattctgctcgagttttattacttttgttcctttaaaatctctctcaaaatcgagaatgttccttatatccgcaccgcgccattcgtatatgcactgatcatcatctcctactacacagatattgccgtgcgcacttgcgagcatatgcacaagcttatactgaatgtagtttgtatcctgatactcgtctaccattatatacttgaatctgttctggtaccgaatcagcacatcttcgttttctgaaagcagcttaacagcatttagcaaaagatcgtcgaaatccatcgcgttattttttctcagtgtattttcataagctctgtacacattataaattacctttgttctgaaatcctctccgcacgcgtttatgtaatcatcggcgctttgacccttgttcttacagtcacttatgattgaaagaaagtatgccggagtaaattttttatcatctatattctgctcttttacgatatttttaattaccgttttctggtcctgagggtcataaactgcaaaatttctctcatatccgaggcgctccgcatttaccctgagtatcctgagacatgcagaatgaaatgtctgtatccacatacctgaaatatccgccggcgacatcataagccccggtatatccgccataagctcctccactctttctctcatctcatttgccgctttgtttgtaaatgtaacagcaagaatgttatatgggctcacgccctgttctatgagatgcactattctgcaggtcatcgtgctcgtcttgccgctgcctgcgcccgcaagtatcagaagcggtccttccgtataaagcgccgcttctctctgcatatcatttaatctgtccaaataactacctgaactttttattgccatatttatatgaaactctcctatttcttttgtagtatcgctctttatcttttttcacttccgtttccgcggctcagcgcttccgcttttgccatatttagatacaagtctgcggtatctaatagacgccgtcttttgattattcttttcgttccgtatagtttagtatatcataaaaaacacgcgttctaaagcaccttatttaaattttatcatttaaatttctttatcgccgctcatcactttgaagtccgcagcgcacagtttcactgcttacaaccgctgctttttacgctgcatatgattgacttttttcgtcgattgtaatataatttgcaaagcgccttttaaaagcacgcaccaaaaacaaacggtaaccaaaccagactatacgatgtataataaaagctatgaacagacatttaacacttgaacaaaaaatattttacataatggctttcatcggcggctcgatggcaggatttgccacgctgcgcacgggtgtgctcggatctgcacagacctcaaacctcgcagagctcgctattgcaatagtcggaggcgatttatatcacataacgctgcgcgtaatagctatgattctttatgctttcggtgtcgctattccgcgtataatcataaaaagaacgactttgaatgtgaaaatcatcagcgttatcgtcgacattctcggcatcattcttctcggctttatgcctgagcatttaaatgccgtagtcgcgctttggccgatattctttattatgagctttcaatggaattcatttccaggtgcacgcggttatgtaagcgccagtatattttcgacaaataatttcaggcaggcggtaacagggattaccgattactttctcgataaaaatcccgagtccgtagacagagccctgttctttacaggaactctgatatcgtttcaccttggagttatgctttcctgtattctgatacgcagcttcggctttaaaacagtatgggcctttatactcccagcactatttgcagtaccgctcatcagaaaagagcagcagcaaagcgcacttgcaaaaaaagcataatactactaataatatttttgcataaaaaacatagccatgcgccaagcgcgtggttttttacatacaaagaaagaagctcgtctaagccgctttcattgcttcttcatatcttattaaactcagaaaaactgctcgcagagattaaaatagcgcaaa

SEQ ID NO: 1266 - DNA, 2488 bp, Unknown
  16S sequences of unknown bacteria
cgcttacgcgcggcgttcgtccgggatctgtaggcgctgggcgtcatcccgaacttctccgagaagcggcgcacaaaataactgatgttgtcgattccgacgctcatggcgaccgatgtcaccgtatcctcggtggaggtcagcagatccttggcgcgcgacagcctgtaatcattaagatatctcaccggtgtcacgcctatcgactcgttgaagcatctcagcgcctcgctctttgatattcccgctgacgccgctatcatcgacaggtcggttttctcgctgtaattctccgagatatatccgagcattgtgcgcatacgggaggacgtcagcatatcatgcccggacacgcgccttgtcagctttccatcgccggctgttccgagaaatgtcaggaactccctccacagtatcccgcaggaaagaaacaggtcgagcttgccgccgctccggacaagccggtatacctcgcgaagagcgtcaagcacccctcccgccgccgcgtcatctctccgcatcaccgcagaggttatccccgaatcgagaaccggaagcatcgactccgtgtagatgtccgtcccctcctgaaaaaggaaggacggaggaaacagcacgttcggcataatagccggagccgccgactcaaacccgtggatgaccctgctgccgatgaatatcccgtctccctcgtgaagtcttatccgatccgagtctatcaggcagtcaacctccccgcgctccgcgacacaccactcaaactcgatgtgccagtgccactcctcgcgtcgtcccgcgtagcggtcgaggtcgtcgagatagtatacaaacgggaatcccggcgttccgtgctcgtccagctcccggagggtctcgtctgtcctgattgtcagcatactgtcgtccgatgtcatttcttccgcgatatcgttttccgccatgatattctcccttctttttttcgattctccggaaccggagaaccggataaattcatttctggagatattataacataaaatggcgatatttgtcaagacattacgaaaaacaggtgatataatgatatggacttcattttttgaaaggaacccgtatcaatgaaagaaaattgcaggacgacgatgctcgcgtgttttatcggatatatcgtgcaggctgtcgtcaacaacttcacgcctttgctgttcgtcaatttccagacggtctacggcataccgctcgcgaagataacacttcttatcacaattaacttcctgattcagctctgtgtcgacctcgtgtcggcgtggctgctcgacaggatagggtaccgggcgggggtggtcttcgcgcacgtcgcgtcggcggcggggctcatcatgctgactatccttccggagcttaccggggacccgtatatcggcatactcatctcggtcgccttctacgcgatcggcggcggtctgctcgaggtgcttatcagccctatgatcgaggcgtgcccgaccgacaacaaggagagcgcgatgagccttctccattcgttctactgctggggacacgtcggcgtcgttcttgtgtcaacggcgttcttcgcggtcttcggaatacagaactggaagatactgtcggtcatatgggcgctcatcccgatcctgaacggcgtcttcttcatgaaggttaaggtgtatgagctgaaggagaccggcgacgagggactctctgtcagggatctctgcaagaagaagatattctgggtcttcatgctgatgatgatttgctccggagccagcgagcaggcggtcagccagtgggcgtcgaccttcgccgaaaaggggcttggcgtctcgaaggcggtgggcgacctcgcgggtccgatgtcgttcgcgctgacgatgggtatgtcaaggctgatcttcggaaagtacggagataagatcgatcttgacaggttcatgaaattcagcagcgcgctctgcgtcgcgtcatatctcatgatctcgctgtcaaaatcgcctgttctggggcttatcggctgcgctgtcaccggattcgcggtcgggatcatgtggccgggcacatattcgaaatcggcggtgtcgatcaggggcggcggaacggcgatgttcgcgctgctggcgctcggcggcgacctcgggtgttcgagcggcccgactctcgcggggttcgtgtcgagtatcgcgggaggaaatctcagagccgggatactctccgccgttattttcccggcgcttctgctcgttggtctcttcctgtgcggaagggaagttgaaaagtccggaaaggactgaaacgcgcgggaacgtcggcgggactgttctcaggtataaattaaagaaaggtttgttcatgatgaaaaaaatcacgctgacagttctcgctctcgctctcgcggcatcgaccggttgcggaggtggcgggtattcaaatactccggtgacgttcgatatcgtgaccgagacacgcgcgccgcagacggtttatg

SEQ ID NO: 1267 - DNA, 4638 bp, Unknown
  16S sequences of unknown bacteria
gatctgttcctccgtgatgcttgcctttacctgttcacgtatggcggcggtcacgccgtcccgaatcggctgttcctgtttgcgcacctctgcttccgcctgtgcgcgggcggcccgagttgcctgctgctccacttgtacctgtacagcagctgtcacttctgccgtcacttttgcgcgggcctcttccgttgcggctttcagcgccgcgccgccgatttgctgctgtacatccgccaaaacggcggcatagttttcgcgcgtcattggggtatagctgagaccggtccgcgtcagtaggttctccagctgcgtgttggccgcagaaaggagcgaatcgaaaatcgtgcccgcgccgctttgcagcgccgcgctctgtcccgccagcagcgacaggccgctggacagctcgcttgttccgcccgcaagcccggccgctccgccgcttagtgtgtttgcgcctgccacaaggctggcagcacctgaggcgacggcagccgcgccgctgttcagttcctgcgctccggctgccagctctttcgcaccatcgtccagctcctgcgcgccgtcctgcaagtcgtcgatctgcccgtccagctcactggtgtccggcttttccatatgaatcgccaaggggacggcattcaaggaaataccctccatagagaaatccgtcacatccgtctcgatggtgaaagaaagatcctgccccggcagcttcatatagctcagttgcttgtcagcgcccacatttgcctctgtcgcgccttcggtctggatattgcggcacttcacggtgtccagcagcactgtggcctggaccatgtaggcctcatagaaatcgccgtccgccaatttgtttttcgtgacggatccgctgattaccaaatgtccgttggccccggcaagctcatcggctgcgacgttttttccatccagcatataggcaacagagatattccaaggaagctgcgcatccttcaggttcccttgataatagaacgtacctgcctccgcggacactgtgacagagtccccatccagtgaaatgtccgcttcactcgtcagattgcgcaccgaggaataggcgccgtagtcccgtatctccgtcttgccgtccagggcaaacatattgacaatatatatgtctgccacactgccgtctccggcgaggctcacatatacattttcttctttttcggtatttgccgtttccgcataaacaggagccatacaggctgcagctacacatagtgcggccgtcaatgccgccacgcgttgaatgaggcgtttcataatggaatatcctcctttaataattcttttcaaaacgcagtcccaggcttgttttctgcacaagtccgtcgaacaggcacaggcaggtgggaagcacgaacaaaaccatgcagcatgacagcactgcgccgcggcccaccagatacccaagctggctgatgaccccgtttgtggacagcgcacccagcatactgccggcaatgcacagaatgcttccgctggtcagaatagagacgactgtttcgcgcacagtgatacgcgccgcatgccaacgggaattttcgcgccggttttccaggtatttgttggtgaacaggatggcgtaatctaccgtagcgccaagctgtaccgtattgatgatcaggtatgcgatataattcagccgttctcccgttaagtatggcaccgcaaggttcatccagatggcgctttcaatgacgaatacaaggatcgcgggcagcgagagcgacttgaacgtgatgagcaggatgaggaagatcgctcccacagcgataccgttcactacgatatcgtcctctgtcacggtgtcccgcatatccagcgtgttgacggcttctcccgctatcaaataggcgtccgggtaatactcctgcgcagtttcccgcagctgtgtggcaaccgcgaaagggatctccccgtccacgcctacgctggtgctgatgaccatgcgcgtataatgctcgctgatcagcagctcccgctgcgcctttggcacatattcctccgggatactgctgcccacagtatctgtatagctgagcacctccgttacctcgggaatggtcttgaaagcgtcggagagcgccttttcgcgggctgtgtcccccctgggaaccatacagacgatctggttggaacggccaaattcctcgttgatgcggatggcgtccgcgccgatctgagtggaggcatccccgtatatctcgctggagccataagcaaagtcgatcctgtctttggcgacaaaggaaggcaccgccagcagaatgaacaggataagcaccgggaccttcaccttcatcacgaagtaagaaaatccgcggaacgtcggcatgaagctgcgatgctgcgttttgtcaatcagcttataacacagtaccgccagacatggcagaaagaccagcacgcacagcagcgagaacacgatagccttcgccatgacaacgcccatatccggcccgatgcggaaacgcatcaggatcagagcggcaaaaccgatcacggtggtgagtgcgctggaggtcacggaagaaaagctgtcctttaccgcgtgagacatggcatcctgtacatccatcccgctcgcccggaaacgggaaaagctgtgcagcagaaaaatcgaatagtccatgctgacggcgagctgcagcacgctgcccgctgcattcgtcacaaagctgatggtcccgaatgcaagattcgtgcccatgttcagaacgatagccacaccgatggttgccatgaaaagcaccggttcaaaccagctcgtggtggtgagcagcaaaatcaggaataccagtggaagcgcaatggccataaccatctttagctcgcgggtcgtagattctgtggccatacccgtattcaccgcctccccgctcatggcggcgtcctcaccaaccacagcgcggatatccattaaatgactgtacaagtcatcctcatccacatagcaggtgaacagcacgtttccctccttgtaccagctttccactgtgtcgccgtccagcgtctccagcggcgcgtaaacattggcgtaatcatccagccacatcacctccgacacgcccggcacctgctggagctgtttcttcagcgccagcgcctccggaatcgccgcatcctcgatcataatgcggcagttggcagttttggcgctgtattcctcctccattacatccagggcaatggtggacggcgcgtccttgggcagataatgcatcatattatagtctacctttactctgcggctgagcagtgcacacaaaaccgccagcaccgcaaacagggcaacgatgccttttttatgatggagcattttctgggctattttgttcatccaaccgaactcctcagtcttttcatttttgtacatatgttgacttttgtttctgaattgattatagtggaatcagataataaaatgcaatcagcagattcccgctgatctatgcaactttgtataaattcaacggatattgtacagttttaaaaatattttgcagtcaactcaattggccgcagtggaggttccataaatggcgaaagcagaatacaaaagcgcaattcgttcacgcaggatgatccagcgcgcgctggtcgaactgctgcaggaaaaggagcttgataagatcaccgttacggacatcgtgacgcgcgccgacatcaaccgcggtactttttatgcgcactatgcagacatttcgggcgtgcttgacagtattatggaaaatgtctgccagaccatccgggaagcgctggaaaaacaaccgctttgggcaaaagctccagatgcacgcattgtgctacaccactcgcagcgcatgctggaaagcgacccggaattttatcgaaatgccatccgcaccaatgtttccaacatcgtattggaaaagctgcgggaattctttattgaacagatgatgcagcgcgaaagcggctatgctgtccgcaaccatgaacaatatgtgtttaccgtccggtttggttccggcggcgttatcactttatataaggactggttttccggcaacctgcctttttcgctggacgagctgaccgaaaaggcggcgcaggccatcaacacaatgcttgcgggtttgtaagttgtgtttttatatgcaaaaaggcgcagcactcggctgcgcctcaacataaatgatagatacagtctatatggaaaactaaatgtcgttcatatttcacaaacgggcctataagaaaatgaacccacttactgcaaacaccaagctttctattaacaaaaaaacgccagaatcatacgattccgacggttttagcccgagtgtaattataggattcaggaaaatagctaaagtgattaaacatcaattccaattacgtatattggaacttgtattgcgcttttgaaatagggcaggtatttttcaaccttttcaaaattaagagatccctcccagttatggccatattggttggtcaaaaatttttgcatggcttttgtagttgtgatataaacaccgaaatcaataaggtccaaatttgaataggatgccatctggaactttagcaagtcagttcccaaaaacgaagcatgtccaaattggacctgatatgtac

SEQ ID NO: 1268 - DNA, 3860 bp, Unknown
  16S sequences of unknown bacteria
gccattgacctatccaagtctgtgcggaaatttgcccggaatgtggatccgactttctccgcccgcctcatcgctgtcccgacgaccagcggcaccggcagcgaggtcacctgctttgccgtcatcaccgacccggagaagaacgtcaaataccccctgacgtccgacgacctggtcccggacgaagcaatcctggatgaggttctggtcaagagtgtccccgcctctgtcacggcggatacggggatggacgtcatgacccacgcgctggaggcctatgtcagcatccagaacaatgaattttccggcgccttcgccgagaaagctgtcgaaatctgcggccaattcctgctgcgctcccaggcagataataacgacacccacgcccggcggaagatgcatgtcgcctcctgtctggcgggcttggcgttcaatgcttcttccctgggcctgaaccacggcatggcccatcagctgggcgcggtgttccatatcccccatggcagggcaaactccatcctgctgccgcatatcattgagtataacagcgagatcaatctctacagccgcagcaagtccagctatgcaccctgcgtgcagaaatactgcaatatggcccgcattctgggcgttaacaacctcaatgaggtcgtgacggttcatgccctgatcaaccaggttcgctttatggcgacggagatgcatatgccaaccagcgtctccgaagcgctgccgaagctgacgaaggaggaatatgaggcgaaaatctccctgatggcgaaaaacgccctgcaggatggctgtaccgccacaaacccccgcatccccacagaggacgacgtcatcgagctttacaaaaagatctggtgatgctgcaccccaagcgtatgataaaacagaaggcccgccgacaggcgggccttttgctctgtgttctttagttgatcttgacgttttcccagagcgtgttgaggtaatccaggaggtcggggtcgaggttgcggtaggctagggtgttgtagcgctgggcaaagtcgccgagctcggggtagagaatcgcaatggcgtcggcacccatgtcgtcttgataggctacgctgttgtagaccaggctgttgggggaggcgtagctggtgtactccgcgttggcgacggcgggctcctctgagagcatatagttgatgaaaatctctgccaggtctttgtgctccgcgcaggtggggatgcacatggcgtcaatatagaaattggtggggtccgggtagtagaattggaggtccacattatcggactgggcgtcgcgcatggtgaaatagtcaccggcgtagtacgcgccgatggaggcctcgccggattccatcatgttgaagatctcgtccatcacatagctgtagaccaaaggacgctgggccagcagctcatcataggctttgtcccagtctgctttgtcggtcgtgttgacatccaggccaagcttgtacatggcggtgccgaaggcgtcccgggagttgttgaactggacgatgcggtcggcataggcgtcgttccacagcaggtcccagctgccggtatcggcttcgtctacaacattggcgtcatagatcacgccgacgatgccgtaggcgtaggggacggtatattggtcatccgggtcatagtacaggcccttgaagttgtcgtcgatatactggtaattggggatgttctcaaaattcagcggctggagtaggccctcgtcggccatccgggcaatcatataatccgagggaatgatgacatcgtagctgacggcgccgctggatatcttattatacatatcctcattggaggcaaaggtcgtgtagttgacggtgatcttctcgccgtaggtctcttcataccaggactcgaattcccggatggtatcgaagctgccttcgctgccgtcggagatatactcgccccagttgtagacattcagggtctggctgcttttgctgccgcagccggcaagggacagggccagcagcagcgtcgctgccagcaggagcatccattttttcattgtacatttcctcctcgtattattcttgttccgcggcgggggcgcggcggccctttgcctgctttttgcgggcggcccggagcgatcggctctcttcgttgtccacgacgttgctgatgagcagcagcgtgagggtcacgaagaaaatgatggtcgccagggcgtacattttgggattgacggttttttttgtcatgccgtagatccgaatcggcagagtctcgaagccgttgccagaggtgaaatagctgatgacgaagtcgtccagcgagagggtgaaggccatgatagccccggtgatgatgcccggcaggatctccggaatctccaccttccaaaaggcccgcatcggggtacagcccaggtccatggcggcctccggcagggctttgtccatctgctggagcttgggcagtacctgcaggatgatatagggcgtgcagaaggtcacgtgtgcgatgagcatggtgagaaagctcagactcgtcgatgcgccgaacaggcggccgacaaagacgaacatcagcatcagggagatgccggtgatgatatccgggttcgtcatggggatatccgtgacggtgttcatcaccgcccggtaccatttcgagcgcagcttgtggatgccgacggcggctgttgtgccgatgacggtggcgatggccgtagcggaggcggccagcagtaaggtgtttttgaccgattccagggtattacggtcccgcagcagctcttggtaccaattcagagaaaagccggagaggacggacaggctcttgctctcgttaaacgagaagaccagcaggacgacgatgggggcgaacaggaagcagaagatgacgccgctgtaaattttggaagaaagcttcatcttatttccctccgtatacgtgcttcgtggtaaagtatttcatcagcgccatgccagccagcaggatcagcatcaggataaaggcgatggccgcggcaaagtgcaggttgttcgcgacatactggccctcgatggcgtcgccaatgaggaagaatttgccgctgcccagcttttgggagatatagaaggtgctgatcgacgggatgagcaccatcgtgatgccggagatgatgcccggcaggctcaggggcaggacgacccgcttgaggacagaaaagctgttgcagcccaggtcccgggccgcctccagcagcttcccgtccagcttggcgagaatggagtagatgggcagaaccatataggggaagtagtcgtagaccatgccgatgatgacggcggtctccgtcccgatgacgtggatcggccccagacccagtttgcccagaagcccgttgataatgcccgtatcctgcaggattgtcatccaggcataggttcggatcagaaaattcatccacatggggatcatgatgagagtcatcatggttttctgcgtcttttcctttgcccgtgacatgatataggcgataggatagcccagcagcaggcagatgactgtcgagatgaccgccagcttcagggagcggacaaagatcaggaggtaagtgtgaacctccgtggtgctgccgtcgtcctgcaccaggctgctggtggcggtgaaaaagcgggtgatgtgctcggtcgtgaaggcgaagctgttgtccgtgaaggcgtagtaggcaacaaagatcagcgggataagcacgaaaagcagcgcccagacggagtaaggggccaggactgcccgctccgtgcgcagcgttcttgcagctttcatgcgtcttcctcctcacccgggtcggagagctcatcgagctcgttggagaaggaggagtagtcgccgaa

SEQ ID NO: 1269 - DNA, 22439 bp, Unknown
  16S sequences of unknown bacteria
cgcgcagaggcatagaggaaaagtgacttggcttgggttttaccgccgctcggcaacgggcctcgcggctcgccggtctggtgtgatttccttgtcagctgaataggaaagaccgccgtcgggcgacaggccctccggctcgcataaaaatgccagcgtggtttcaaatccacgctggcattttgcgtcgcaaaaatatccaagctgtagcgaagcatcccaagcaccgccatttgagtatgctccacgccaactgcgggggagcagagcggcgataggcagcggagggaaaaaggcccgcccattttgacggcggaaaaaggcgagcacgagcgcgctccgcccgtatgcgaaagctggccaactccattgcgcgcgacattgcgagccccgccggcaaaatgggcagtagaagcctttttcccgtagtcgccgtgccgcgtgctttctttggtactttctttcgcttcgaaagaaagtactgcccccacggggcggcagccccaccgtccgcgccggagtcggcgcgtcaagcccgccggggcaataagtatgcgcccacgggcgcaccaaagggctttccgctcgccctttggaaatctttgggcaccgaagttagcgagcccccataggacggcaatttcaaatctacgccggagtcggcatgtcctacccctgccaagaccagcgcatactttccccgctgtccggcaggattttcccccatccaagccgaaacaccctctatcccccaaaactcgccagaaaggaagtgcgcccatgcgcatcaccaaagatatcccctatggctccaacgggatgcatctggatctctatgcccccgatcaggacggcttcgatacactgatctggttccatggcggcggtttcgaagctggcagccgccgggacgcggagccgctggcggaatccgtcaccgcattgggactgggcttcgcgtccgtggaataccgcatgttccccagcgcaaggtttcccgactttctgctggacgcggcgtggagcgtggcgtttttgcagaagcacggccaggactgcggctgcggcggacggttcgtgatctccggtcagtcggcgggcgcctatatcaccatgatgctggcgttgaacggtgcgctgctgcataacgcaggagtggacgagacttccattctggcctatgtgtccgaaagctcccagcaaaccacccactataatatgctgcgccaacgcggcatcgacagccgggccgagcgcatcgacgaagaagcgcccctgtattacgtgggtcaacggccgctgacgaagcccctgctgctgatctataatgccgaggatatcccctgccgcccggagcagaacctgctgatgtaccaaagcatccgccatttccagccggacgcgcccattttcctcaaggagcttccgggcggccactgtgccggttccacccataaggacgaaaacggaaattatccctatgtgacggctctgaaggaatttctcgcctctctgcgctgaaaagcgccctgttttcgcattttttgacggccttttccgctttcgcattgacacgggaaaggctttcttctataatgaaggttgtgcgaaacccatgatttgcaacacgttaggagagactgtcgttatgaagacctatcattccgccgatctgcgcgccatgttcctgaagttctttcaagatcacggtcacgctgtgatctccagtgcttccgttattccggaaaacgaccctaccgttctgttcaccaccgccggtatgcatccgctggtgccctacctgatgggccagaagcatcctgcgggcacccgcctgaccgacgtgcagaagtgcgtccgcaccggcgatatcgaggacgtgggcgatttcagccacctgactttctttgaaatgctgggcaactggtctctgggcgattatttcaagaaggaaatgatcccgtggagttgggaatttctgaccagcgaaaagtatctgggcctgcccaaggaccggctggctttcaccgtgtttgcgggcgataaggactgcccccgtgacgaggaaagcgccaatctgtggcgcagctgcggcgttgccgacgaccacattttctacctgcccaaggagaacaactggtggggccccgccggcgtcaccggcccctgcggcccggataccgaaatgttcatcatcaccgataaggagccctgcggcccggactgctcccccgcctgctcctgcggccggtatctggagatttggaacgacgtgttcatgcagtataacaagaaggaagacggcaccttcgagcctctggcccagaagaacgtggataccggcatgggtctggagcgcaccatctgcgtgctcaacggcaaaaagagcgtctacgagactgacctgttcgaaaatattctgggcaaaatcgccgagctttccggcaagacctacggcgaggacgaagccaccaccaaggccttccgcatcatcgccgatcatatgcgcacctccaccttcatcatgggcgacgaccgcggcgtcagccccgccaatgtggatcagggctatgtactgcgccgcctgatccgccgcgccgtccgctacggcatggagatcgggatgcccgaaggtttcaccggtgagatcgccaaggtcatcattgagcagtataaggacgtgtaccccgagctgaagcgcaacgaggccttcgtgctggatcagctggcgctggaggagacccgtttcgccaagactctgaagcagggcaaccgcgaatttgagaagctggctcagcgggtgaaggacggccgcatcgacggtgaaagcgctttccacctgtacgacacctatggcttccccgtggaaatgacctgcgaactggccaaggatgcgggactgaccgtggatatggaaggcttcaaggagtgcttcaagaagcatcaggccaccagccaggcgggcgcggagcaccgctttaagggcggtctggcggatcacagcgcccaaagcgcccgtctgcataccgccacgcacctgctgcacgccgccctgcgcaaggtactgggcgacgaagtggctcagaagggttccaacatcaccgccgagcgtctgcgcttcgacttctccttcggccgcaaaatgaccaaggaagagatcgccgaggtggagcggctggtgaatgaagccatcgacgctcacgcccccatcgtgtgcgaggaaatgaccgtgcccgaagccaaggcgcagggcgctatcggcctgttcaccagcaagtacggcgagaacgtcaaagtctacaccatgggcccgtacagcaaagagatctgcggaggccctcacgccaccaacaccggcgacctgaagagcttcaagatccagaaggaagaaagttcctctgccggagtgcgccgcatcaaggccgttatcggcactacggcggaagacgaaacccccattctgtaagggaaaccttccgtccaacggaaaaacaagcgaaccgtcacagcagcgttccctgctgtgacggttttttcatcaatgcctttggatgaaaaacagcgaaatctgcactggattccagatttgtttcgtgtttttcttttccttcatcgtctacaatgccaaaaggagatgatgcatatggatcagcagaaaatcggcgcgtttatggcggcgtgccgaaaaaggaagaaactgacccagcggcagctggccgaagcgctaggtgtgaccgaccgctccgtttccaactgggaaaatggcgtttgtctgccggacgcaagcctgtaccattccctttgcgaactcttgcaaatttccatcgaagaattcttcgccggtgattttctcccggagggacaggagcaaaatgcggcggacagccatctgctgcatttgctggaacgccggttgtatgacgcatcctccaaagaaatcagctttgacgaatttcagcattctttaaagagcttttcggaggctgccttgctgctgcggcgcttcgaaaccgaacaggccgccgttgactaccttgtgagcgaaacgggatcaccggcggaagaatgtgcctccgcctatgaaatttacagaaaaatgttcgattgatactgcttcgccccataaaaaacggcgcgaccacaaaggccgcgctgtttttcatgccgtattacagcagctttcccagttcttcgatctcgttcaagtccgtggcccagctggtggcgaagcgcaccaccgtgtgtccttcgtccagcttttcccagaagctgaacttcaccttttcgcccagccgcttcatttccccgttttccagaatgacgaaaatttggttggtgggcgtttccataaagaagcggtagcccttggcccgcaggatcgcccggagacgttccgccgcctgaatggcgttgcggctgatgctgacatacagatcgtccgtaaacagcgtgtcgaactgtatgcccagcagccggcccttggccagcagcgcgccctgctgcttgaccatggtgaagaaatgctccggcgcacctttcgggaacaccacggcctcgccgcaaagagcgcccactttggtgccgccgatataaaacaccgtggtcagccgggcaatatcccgaagggtcacgtccgttccgggactgaccagcccatagcccagccgggccccgtccagaaacagcggcagatgataccgggcgcaaacgtcggacagggcttccagctcccgcagggaatacagcgtcccatattccgttggatgggagatgtacaccatgccggggaacaccatatggtcgtagctgccgtcatggtaatagtctaccagatattgctccacttcccccgcgtccagcttgccgtcatgctggggcagggtcagtaccttgtggccggtgaactcgatggctcccgcctcatgagcggcgatatgccccgtagcagcggcgatcacgccctcatagcggcgcagcagcgaggcgatcaccgtggcgttggtctgggtgccgcccaccagaaagtacacgtccccctccgggcagccgcaggccgacagaattttttccttcgcgctgtcgcagtaagcgtcatggccgtagccgggctgcttttccagattagtttccatcaaccgccgaaggatggccggatgggctccttcgcaatagtcgttttcaaaatacagcatcgtttttccctctttccgtcaaattttccatagctgtttcaaggccgtcaggctgccgacccacgcggcgaagtcgtcctccgggtgcttggcccgttcgttggcccagatggtttccagttccatccgggcggacggagccagccgcagcccgccgtgaatggggtcctccgagcagacgctgccgaacagccggttcgccgcctgcgggaaagccttggcgaagcgcagcagataggccgtcagccggttttcttccgactggccgggcgcggtaaaggtcccgttccagcgctccctgctctgcagtgtgctttggaagtcgccgtcttcatacagaagccccagcgccgcctcccgcttgggcgcgtcgctctgcaccggcatcagtgcttcggtgggatgctcccggctcaaggcttccagcgccatgcggcacaagccgtccgcctgttctctggaaagggtcttcatcagctgcccgccgttcccggcgatgcagaccaccagcttcaccggcatcaggggccgcagctccggctcctgccacgcccgctccatcatcagcccggccagataaaacaggaacccaaactggaacagcagcagacattccgtatagctgaccctgcccccggcgcgggcttcttccatggcctgacgaatttccggcgcataggccgcaaagaaatcgtccatcagcagcatggtcttttgggcttcccgtcccaaggatcccgggtgatccagccggtccgcgatgattgcagcggcttcggccatggagccgggagtttggacgaaatccgccgcaaactccgccccgtgccccctcgcaaaggaggcatagagcatctgacggcagcccaacagcagggagctttccgccgccgcgtgtttctttccgcccagccacaagcttaagtccgccgtggagccgccaatatccagattcagatacccgccccgggcgtccacctcgctgcgggaaaggaaataccagccgtccgcctgattttccagcgcatacagcaccgccgggaaccgagcgctcagcggcattcccgtttccttggccacctcccgggcaagcccccgcaccatttccagataagcttcctgacgatagggcggcagcgcgccgggcatactgactcgccagcttaaggcaggcgcgccgctcaaaagcgccgccagagaagtttgcagcatgacctgtttcagaaacagccgcagacagcgcagagcgaagttctcgtcgctccatttcaggtcgtaatacaggctgcggctgggcttgttcagcagcgccgtcaggctccggggcgcataaatgtgcccgtcctgcaatacgccccgccatttttcgggttcgtctccgaacatctccatcacgctgtaacacgcgcttgcgtccgtttgctccgacagaaattcatccgtcagccatgcttcttccgaatggcccagcagccgcccgtacagtccctccggcagcgcggcgggctgggtcttttcgccaagacgcagcatcaccgtggtggcgatactgccgaaatccaacccggcggctgcttcttcctcgtggcggatcagggtaacgggccggtcgttgaccagcgcgcccagactgatcccgccccgtttgagcacgatcatggccgggaaacgttccacacaggcggtctgccagcggcggttctccgctgttttccataagccctgcacccagccctcctgcgaaagcgaccacacgtccagattttccggctggtggctatggataaagtactgccgccactgcccgccgttcaggcgcacgttgggccagaccgtgacggagggcaaagccgcagcgtccagcgcagacgcgccgccttcttccggcagggcgcacaggcggtagcggcgcacaaaggtgatctgcccacagcgcatcccttcgggcgcgtccacgcggcagcccagcgcaaagcgggcctccgccaccccttccggcaggaggcggcagcacagactttccggcagcaaatggggctcgtgctctccggggcgttcgccggcttcttccagccatcgggccagcgccggggaaataggcggggcgaaccacgtggttttcttggctccttctacccgaagatagggggtcatttccggggcaaagggagttgtttccccctccgccatcaaaagcccctgagaaaacggttctgcaagccagccgtccgccccttcgcccagcaaagcgttcagcagcgggctgacgctgcggacggacgtgtcctccgggtaacgcagggtaatgcagctgtccccataatggggcatggcggcgtattcggcgctccactgccgcagcagcccgggaacgcaggggcacagacccgtgcgattttctatctcatcggccaattccgcaagggtcaggctcatctgccgctgccagccctcgtcccaccgatccagcagggcgatttcctctccgatacggcgaagcagcgcatcttccccttccgttccggcaggttccagcagcgccgcgtcggactggcgggcaaaggccgcgccgtccagcaaataaagctggacttcttccccctccgggatctccggcagggggtactccgcgttcaccagctgcttcagcaggggatccttctcccagccgttcagctgacagggcaggtgctcccgggtcagccgcaggcccgtctcctgacggcccagcccataaacggccatgaccctcgtgcggaacgcacggacggcgccttcgtcccccgcgttcagctgctgccggcctttttcccggctttgcaggatctcccggatcatccgattcagcaaagcgcaaaggggcgcttccggggaataaatcgggctgtggacggaagcgtcctcgttcagcgccgccagcagacgaagccggggcaccagcacggagatcatccgttcgtccagatagccgcaggggtcgagaaaacagcgtttttcccggtcgtaccagcgaacggatggcggcagcagtcggctcaggtcgcccagattggcggcgggcatcagcaccatggaatgggacaaaaggcacagcggaaccggctcgggatgctccgactgggtgcggcaaagggtgaatacctgcagcccttcccgggcgcgcgccggggaaagagcctcccccacggcccggacaaaaccgccacgttcgtccggctccatggtatacagccgcagttccgcacaggagccgtcctcagccagcagatcccacaacaatagcagagccagaatgccccggtaatcgcgcatttcctgatgggtcatggcctgttcccacggcagacgggccagacggcgaagctgttgttcgctggccagcacgtccgggatggcatagcccacctcccggcccggcgttttcagaaaacgggcaaaattttccagccattctcgcggcttctgattgccatcgcattggatgcccgccttttcctgatagccgatgtgcatcccctcgtccatttcgggcagcaggctcaaatagggcgtttggcgatccaaccggcgcttttcggcttcgtctctcatcggtcttcctcctctccggcgcagcgaagaagcgtggccaaaaaggagcagacggccccctccgccccggctcccagccgttgaccgccacccagcccggcgatgatcttcgccgccgtctggcggtcgggcacccggcggacgaccagatgatgcagctcccgctgaagcttttccgccgcccggctcatttcagcgcggctgcgctgttccgtgcgaaggccatactgcgtcagcagcagaagcagctcgtccatcccttccccatccagcaggtcgttttccggcaaatggccctctgcctctgcgggctgacaaagaatgggcggcagggtgcgcacgatctggatcatccagttggcgtagaaattcaaaaaggtatacagcgttttcagaagtccttccagcttttcccgctccgacgcagggcgatgggcaaaatagggcgcgcagtagttgacccgggcgctttgacgatcgtccagcgaaacgcagcttttcagcgtagggtagcactcggcgaagaacagcgccgccgccttcagcagcgagccgtagccccggcggtacagtgtttcctcctgatcgaagctctgccagcagaaagtcggcgtgtgcagctgataataataacagtccatatggtgctgctcttcgccccggaacccggtgctgaaaaactttgcgatgcagcgggaagccagccattccagcatatgcgcatcgttttcctgactttgggagccggtggagtagcggcaggtggtcacgaagccctccgggggaaggcccagcaggtacagcgcgtcgaacacgccgttttcgtcccgctccccgtcccggatcatgccctccatgccgtagtattgcagagccgtgcgggccttgtcgagaaaatcgtcgcttttcaccacaatttcggtgtcctcgtccgccagagaagcgggcacccggtaatagggcagcatcagcagcgcgcccatttcaaaacggtcgctgcgggcggcgaagcgcttgcgcaggaaccgcgccacggcgggaatgcccgacgcgcccgtgccgccgaagatgctgccgcacaggatcagcttcaccggctcgtcccgatccagctccgcctgaatctgatccagcaggcggttcatttcgtccggctgaccttcccggcgcagatcgtccagcgagttcagcaggtcgtgaaaaaacagcacccccagatcgggatggccgcgaaagccctcgctgtactccagcgcggattccgtgcggctgaaaagggtgcggctcaggagctgatcccggcgatgattttccaccattttatccacggacatggcccggcgggacaggttcatgctccaacgctccagttgcagcgccgtgtgaaagccgggatgctccgccggatattgccgaaacgcccgctgcagctcaccgtagctttccgcggcccgcttggcccgtgtggtgttgccgcaggccgtgtccacgtccacggacagcatggtgacatccgggagcggcgccgttttcccggactcgtcctgcgtatacagcccgtccactgccgccagatagaccagactttccagaattttgttcccggtgccgcctaccgccagcacataatagcccatggcgcatccccctttcctacagacgcttgaagaacgctcccttcccgctcagcaccggcggcgcggccagccgaaaacagacgatagccgccagaccgttcagcagaaaaggacagaaataaatgacatagtcccagccggtgcggccctgcacgaactgcacgcccagcagccacagcgccgccccgcccgccagattcaccgcccagatcacagtctgggtcagccggtaatctcgaatggcgcgaagggtgttccgggcggcgaagcagggcttctgatgccgaagccgccagcccagctgcaaaagcagcgtcagcagccagacaacggtccaaaccgccgtccaaaacagaagccattgctgttcccggtgctgcaaggcctgccgccagagctccggcgacgctcccgcagacgtctgggcggcggatacggcggtcgcgagcctcgcctgcccctggaacagccccaataaggtctcggcgatatggggggcgcttcccgccagcttatagggatatccccaaaacagccccgccagcatccaaagcaccggcagcccgaacgccgccagatagcacagcagcaccttcgttcggttggaatagcgaagacggcttcttccttttcccatcgtcattctcctttgccttacggttcgggcatatcggccacgaatacgtcaaaaacgcagcggatcagcggaacgttttccacattggccccttcccgaagctgctgcaccagactttgcagatgcagcgcccggtacaccggcgggaagtcgggaattgccacgtcctgataaggcttggaggtggccgggccccacgcgtggtcaaactgcttgggcacgtttttcagccgcctgccgtagcggtacaaatgctgggtgaaggcttcccacgtactgatctgactgttggtgatctccgtgcccagttggtcgatccattccacttttggccatagaatttgtcgtccagataggtttgcttccacttcaagtcgataatagccgctttttagcttcgtatgatccacctgaagatttacttccagctgtccgttttcttcattccagtgaatatctgtcaatgtaaagggattttcttcctttccatcggcgaagggatcgtcctgccgaacgaaaacgtatcgtttatcccgcagggtcaaaacctgacgatcctcccggctgtcctccgccgtttccggggtgttgggcagaacggaatccagcaacagcgaatcgatcgtccggacgctcgtccccgtcagttgggacaaatccagcgtttccgcgccctcgactgcctgaaggggccaatggagcgtgatcccttcgttgcccgcccggcctgtcagtcgcacggtgtacaggccattttcccggctgaccgtaccttgctccgtctccacgatgaagccgtccgccagctgcgtgtacagccccgccgaggggcgctgaatttccgtgtattcatagaagaacgaaaacggctcctgcgtcactgtttctccatgggccgcgtagcaaagctgccccttttccgggccgcgggttccctgcaaagacgtgtccgcatccagcagcgcattcaatttttccgtataggcacgtacctgttcaggctggcccacggccagcagatacagaagccggggcatgggcatagccccctgagtggttcggttttccgcatagtcgggccgtccccagagcagcggctccgcaaagtccgccgcgccgaagctggtcatttgccccatgtaatccagctgcatcacgtacagttccaccatgaggccctgatcgaatacgccgcgttcctgcagaattttttccagataatccaccggcgcgccgctgacgtctgtgccggtaaggcggcgcagcgccgccgggtcgcaggtgatgaccgatagccgggacgtgtccagattttgcagggcgtagaacagcggcgaatcgtcgtccttctccacggcgctgtattcagcgggcggctcctgtttcttctgatgaaacgccgcaatgaagtcctgcagcgccttgctcatctgctccacccggcccggattttccaacagtgcgccgctgtccccggcgaagcgctccatctgattcatcagaggcgaacccagcgcatagaagctgtccgtcattttttcagaagaaaaagcggaaaacacatcgggcatggggtcaacagcgtaggtcagcaggtcccggcggaaagaacgcagctgctcctccgtgccgtcaaagccctgcgaacggagaaaatcgtccgtcaggcgctcgttacctgcccgcagcagccgagtgcgggaaccttcggcggcggtcagcacgtccttgagcacgttttcgtaccagcccacctgatcctgatagcggtaatgaaagccgccctgacgatacttggcgctggcccggggataaatgctgtcctcatgctcgttcacgccgcccatgacctgcgaggcgtccagccacacatccacccgcagcgggccctcttcggatgaaacagtggcggacacgatctcggccgtttcctcataggcgggcatggacagcagctccagcgacggggacgcttccaccgtccgtccctccaccttccagcgggaacagccggtaagcagcatcagcgccagcagacagaccgccagcttctttcctcctgcgcagcggggctttcgcatccgcgccgcctcctttcgtatcgtcaatcgtcttcttccgtgcgaacccggcaggcttcctccaccgcctgtaaatagccggggccattgcggtacataccgtcatacaggcgcatataggcccgataacgccggggtgcagcgtattccaacgcccggtttcggcagtctctggggcttttcggctgatcgcacagctcccgaacggcctgtgccagcccgttataatcccccatgggcacggtgcggcccacctcgtccgtgacgatctccggcatggcggtcacatcccagcaaagcacctgcgtgccgcaggctaacgcttctaccagcgtcatgcccatggtctccgcatggctcaggctgacgcacagatccgccgccgtgtacagggcgcacaggtcgttcaagttgcccgtgcggggaatgcccagcaccgatttttccggcagggaacgaatctgatattcgtccagccccaccgccgccacgcagtattccgggcccagtttttccgccagttccagcaggtcttccagtcccttgcgcggctcccacgtgctggccacgctcagcaccaaatgcctcccctccgcttcgtccagcccgtaataatgggcggcgttgcgcaggaaggcttcgtccgcgcagggtgcaaacgcgtctgtatcgatgccattgggcagcgcatacacgggatattgccctaaaaaggagctttccacctgcgctttcagccactctgacggcgtggtcagcaccagatggggcagtctgctgaacaacgtccgtttttcccgccagtttcgggcgctctgatcccggaaccagctccggggatattcccgcaaaaggctgcaatggccgcagccgctctgccagcgcagacagccctcgccgcaggtttccgcccgccgccgtctgccgcccccgtccgccggcgcagcgtcctcccccagcgaaaaataggcgcagtgccccgtaaacgcccagcagtcgtgcagcgtccacacggtgggaaggtcgttttccttcaaataggcaaacagtgtaggcagatgaagataggagccgtgcagattgtgcagatgaacgacgtccggcttgaactttttcagctgcgccaccagcttttccgtttcccggcggccaaagaagccctgacgatcggtcagccgggaaagcagcgtgtagcctaccgtctgcgccgtgctgccgatgcggtagccgggcacgtccgaggggcagctgcctctggcgtagcacaaaagcgcccggtggccctccctcatggcctgacggcatagctccacggcaatgcggccagtgctgaaggcggctgtcacgttgatgtgaacgattctcatgagcgggcgctcccttccgtttccaacttctgctacctgttttccttctgagaaaacgctccgggagcgccgctcccttttccgggtttgccgcgcccccgaagcgtttggactcttagtaattttcggctttcagcttgaaataggccttcggatgacggcagaccgggcagacctccggcgcgctggggccgatgacgatgtggccgcagttggagcactcccagatgcggtcgccgtcccggctgaatacaagcccttcccgcacgttcgccagcagcttgcggtagcgctcctcgtgggtcttttcgatggcccctacgccctcaaacagccgggcgatttcgtcaaaaccctcctgccgggcctcctccgccatggtggcgtacatgtccgtccattcgtaattttcgccgttggccgcgtcctccagattgacctcggtggacggcacctcgccgccgtgcagcagcttgaaccacagcttggcgtgctccttctcgttggcggcggtttcctcgaaaatctccgcgatctgcacatatccatccttgcgggccttagacgcatagtaggtgtacttgttccgcgcctgactttctccggcaaaggccgtcatcagattggcttccgttttggttccctgcagtgacttcacgatgttctcctccttgccgccgaaatgcctccggctttccttatcttgtattctttccaaaaaatgacccggtgaatccgttttttcaatagggtctctgttttttccaaccatcagagaccggcgagccgcgaggcccttcgccgagcggcggtaaaaccccggccaaccggctttccctcgagcactcccgcgctctatgggcgcggcagactgtcgccccccttgattggccgtcagcgcccgcgaacagcgcttcgctggttcgcggaaaagtgctgcggcacagggcttaggggctctgcccctaaaaccctggcaggaggcagtgcctcctgcacctccacttttttcgacacactcccgcgccctatgggcgcggtgtggggtgcaggggcactgcccctgcccaggtttggcagaagccgaaaaccgaccagtggtctgtgtgaagggcgtattgaatcaggggatcgacctgctccgattcgggacgctcagccatgttgttgcggagacgcaggcccttttccacccccaccagatgattgtccaacttgctgtcgtatagataggagtagctcttgaccgagttggacatattgccttcgatggtggtaactgcatacacgccgtcgcccctgtcctccacgtccaccaccgaaccgatgtgtacggttcggtattcgttgctcatgtccgcataaatcaccagatagcccggctggggtatgcccacaaagcgccccatggacaggaaaccgtcgtactgattgcctacctgcccttcccgaaggaactgtacctccggcgggttttccttgtccacatcgccctttttcacaggctccgccccggcggcgttggcgcagtaaatggtgaagaccgagcaccagcctacttcattcttcttgcgatagtaccacttggcatacttgttgtacttgggcagacgggcccgctgcacctccgtaaactcccggcgaagcacgtaaagatagttgcggatcagttgaggcatggcgtcgtccgaaacgctgaccttcaagacctgctccccggcagaggtgcggtacgtcagcgtggtctcccccgctgaaagcgccgtgaccatgccgtcctccgagacggacagaatgctttcgtcccccgagatcagctcgccctccaaggcgggcaatggccgctctgcctgctcatcataggggatcacctccgtggatacaaagggcgcagccaccgtttccccggtgcgaagctcccattctccgtccgtcaaagcctgctgagcgggggtctccaaagccgcgcgagccgcctcaaaataggccgtcaaatcctccgcggccatggctgacggaatttccgccaaaagaagcagcgccgccagaaataaacaaattccctttctgcgcaaaacgatctctccctccgtgttttccttccgattataccataaactgccccaaaacaaaatctcctttgtaatggacccgcgattgtgctatcatggaaggcgaaaggagaggacatttcttgaaactgctcctgcatatctgctgtgccccctgctccattatgtgcatcgagacccttcgtcaggagggcattgagccggtgggcttctgggataatcccaacattcacccctataccgaataccgcagccggaaaaactgtctggtcgattatgccaaagacatcgggctggaactgatcctgcacggcgattacggtctgcgcccctttgttcagaccgtggcggacaacatcgacggccgctgcgtcaactgctaccggatgcggatggagccgaccgcccgctatgccgctgaaaacggctttacccacatctgcaccacgctgtttgtcagcccgtaccagaatcacgaactgctgcggcaggttgcggatgaggaagcggccaaatacggcgtggagcttctgtaccgggacttccgtccgtggttccgtcaggggcaggacaaggcccgggagctggggctatatatgcaaaaatactgcggctgcattttcagcgaggaagaccgctaccgcaagcgcaaaaaaaaggctgagccgaagccggaggagggcaagctatgagcgaccgtctgctgccctccggccaatggctgaaggatcgcctgtccacccgctgggtgggcaaaagcgagatcatttacgaagaagagattccctccaccaacaccctgctgaaggagttggcccgtcagggcgcgcccgcgggcaccgtggcggtctgcgactttcaaagcgccgggcgcgggcggcttcagcgagtctggaaagcgtctgcgggagaaacgctgcccgtatcgctgctgctcaagccccgtcttacgccggagcagattcccctctgcacgctgggggcggcagttgcggcttcgcaggccatcgaacaggtctgtcccggtctgaaagcgggcatcaagtggcccaacgacgtggtcatcagcgggcggaagtgcgtgggcattctctgtgagggggcttttgacccggaggggcggctttgcgtcatcatgggcgttggtttcaacggaaatcagcgggagtttccgccggagctattcgcgtcggctacgtcgctttttctggaaaaacagcgctgcgatcccgccgccgcgcccgtggtcctacgggagcttctagccgcctttctggaagcggtggagcgggtcatcgaccgcttggaggcgggcgggcttcccgccatcctcccggaataccgtgcccgttcggtgacgatcggctctacggtacgggtcattgcgcccacggaggaatacatcggtcaagcggagggcatggacgacgcaggggcgctcttagtccgggatgcttccggctctttacgggtggtcgtctgcggcgacgtatccgtccgcggtctcatgggctacaccccaggggcagtgcccctggaccccggaccgcgcccatagggcgcgggggcgctcgaggggaaggcgattggccggggttttaccgccgtggcacaacaggtgccacggctcgccggtctggtgtgacttcccgctgattgggtgacacagaccgccgctcggcaacgggcctcgcgccaggagcagcgcctctggactccgaaccgcgcccatagggcgcggggtgctcgaggggaaggcgattggccggggttttaccgccgtggcacaacaggtgccacggctcgccggtctggtgtgacttcccgctgattgggtgacacagaccgccgctcggcaacgggcctcgcgccaggagcagcgcctctggactccgaaccgcgcccatagggcgcggggtgctcggagaaaagacagttggccggggttttaccgccgcggcacgacgggtgccacggctcacgggtctggcgtagctttctggtgattgggtggcgcagcttcccgtcaaagtgaacgattctgtcgatgccgccgaagttttgattcaaactcaaaagatcgtgagggaaaagaaatgtgctccatttcgccgcaagggtcaaaaaagctgtttatcgcctccttactgctgctttatctgctgatgctggcgctcaatctgtttacgcccttcggcatggacgattattattacgctttcagctgtctgaccggcgaacggatgacgcggctcgatcagctgattccgtccttgattgcccacggcaaggtgatgaacgggcgctatgcggcgcactttttcgtgcagttgttcgccatgctgccaaatttcatttttgacctttgcaacgcggcggtttttgtgctgctggtgctggggctgtaccggctggcgggcggtgcgcggcgccatgatgtgcggctgctgctattagtcggctgtcccgtcttcctgcttctgccggacttcggcagcccggttctatggatgtccggggcgttgaattatctctggtttggaacgctggccgtctggatgctgatcccctttcggaatgcgctgatcgatcaggctgcggccccgcgtatcggcaaggtcatcctgctgtcgttgggtgccctgctggtgggcaacaccagtgaaaacttttccatggctttcgcgttcctgctggggctgtgctttttgtcagaacgtttcgttcacaagcgctggacgttttggatgctgcccgttctcttctgtgtcgtggcgggctgggtcttcctcatggccgctccgggagagcgggagcgcgtggcgggcggtgtggccggcttcggcgtttatctggaacgtctggtggaagtgctgcaaaactggaaacgctatctgcttgctcccactgtggcctttgccgtgctgctgggaatcagcccgacgcagccggagacccgcgaccggcggatcttcgcatgcctgaccgccctgtcggcgttcctttgcaacggggccatgacgctggcgaactactatcccctgcggatcgtattctggccggtcattctgatgatcgccgcctgcgccttactactgccgacgctggaagggccaaagacagcttgggcgctgaacggcgcctcgctgctgctttgtttcctgctggcggtcgatatgctgcaggcgctccccaacgattacaaccgttaccgactttacgaggcgcgaacggcggagatcgttgcccttcgggaggaaggtgagactgacattcacaccttcggcgtgttgagccgctccaaatacgatatgttcggccccatcgagctgggcagcgactcggacagttggctgaatcaggcgaccgctcgctatttcggcgtggaaaagattgcggcggatcgttttgaataaatcatcacgatataaggagggtttcacatgaagcaactttttgaaggcagcatcaccaaagtgcatggcatccgcgtgggacaggcccagaacgacgcggccaaaaccggcgtgacggtcgtgctttgcagtcacgacggcgcggtcatgggcgcggatgtgcggggcgcggctccgggcacccgggaaaccgacctttgcaaaccggagaatacggtggagcgcgtgaacgccgtaatgctttcgggcggcagcgcctacggcctggacagtgcctccggggtcatgcgttttctggaggagcacggagccggggtggacatgggggtctgcaaagtgcccatcgtgcctgcggcggtattgtttgatctgaaggtaggcgacgctcacgttcgcccggatacggccatgggctacgaggcctgtgaaaaggccggcaaggaagtccgtcagggcgcgttcggtgctggcacgggcgcgacggtgggcaagctgatccccggtacggttcccgcccccagcggcatcggcacggccagcatcacgctgggctgcggcgtgaccgtgggcgctatcgtcgcggtcaacgcctgcggcgacgtttacgaagccaatactgataaggtactggcctgcggccatctggccgacggcaagccggtgctgtgcgaaaacctgctctacggtagtgcgcccatcccggaaatgctgaagatcggtaccccctccggccagaataccaccatcggcgtggtcgccacggacgcagtgctgaccaaggcacaggccctgcgcatggccacctgcgcccacgatggttacgcccgcaccatccgcccggtgcatacccagatggacggcgacacggtctttgcgctgggcaccggccgcattgacgcagacgtgaacccggtgcagctctgcgccgctgcggcggaagtgacggcccgcgcggtgcagaacgcgatttgggcggtacagcacgcatgatcgggcttggtatcgacctgtgtcaggtggaacgcattgaaaaagccatggcgacccacgccaattttctttcccgctattacacggaggaagaacaggcttacattgcgcagcgagacaaggctggcccgcagagcgccgccgccatgttcgccgccaaggaagccctgctgaaggccatgggcgtaggattaagcggcggcattaccctgcgggaaatcggcgtgtgccatgatgaaaacggtgctccccactacaagctgaccggcgctgcggcggaaaagttgcgcgtcatgggcggcggaatgatctatctaagcctgacccacgaaggtggggctgccgctgcggtggcggtcatcgaacgagcctgaaacgatttgcagggctgcggtattcactgccgcagccccgttgattttctcattcatttttcggaggaaacgtatgctttggaacgccattgtacaaaaagagcccattcataaaggctggtcctgcgacaaaaaattctgcgcgcaaaccgctgatgggacgaaatacctgctccggctcacgccccatgaaaaaagcgggacgcggcggcagttgtttgacctgctgggccgcgtggcggaaaccggccttcccatgtgtctccccgtagagttcggctcatgggaaggcggcacctataccttttatacctggatcgacggcgcagacgcaaacgaggtcatccccggactttctccggcagatcaatatgcgctggggcttgaggcaggccgtatcctgcaaaagattcacagcattcccgcgcccgccggtcaggaggactgggccagtcgcttcgggcgcaaagccaatgcgaaaatccagaaataccgcggctgcgggctgcatttttcgggcgatgacgcggtgatccgctatctgaccgagcaccgggaggttttggagggccgccctcaaacctttcagcacggagattatcacatcggaaacatgatgctttgcggcagccagctagtcgttattgattttgaccgtttcgattttggcgacccatgggaggagttcaatcgcatcgtgtggtgtgcgcaggctgctcccctctttgcctccggcatggtggacggatattttgacggggatccgcccccggcgttctggcagtgtctggccttttacatcgggagcaacacgttgtcctcggtttactgggccatagattacggcgaagaagagattcaggttatgctgcgtcaggccggggacgttatggactggtatgacggttttcagcgagtggttcccggttggtattcctctctttgaatattcaaacagccccgcgttctttcgaacgcggggctgttttggacgatgctgttgtcagcttcgtgaaattactcgatgaccttggcaacaacgccggagccaacggtgcggccgccttcgcggatagcgaagc

SEQ ID NO: 1270 - DNA, 3623 bp, Unknown
  16S sequences of unknown bacteria
tttgtggcgtctaaaataatgcagtcggggtttctgtttggcaaatctactgcggccgcagacaaaaagtctgcgtcggcgctgtcaagaacagaaaatcttacgccttttacttcaaaatccctgaataattcattttcatctgcgggaacattgtaaagtattctgtaaaaatcgccgtcgaacattccatcggccaaaatcggtatattgggattttgcttggcgagtttttccactttttctccataaagtttttcggcatagccggcaccggccaaaataccgatgttgtaaccggttaaaaaagcgcagggcaggataactatatctgcatttgcggcgattgcctttttgatttccctgtcagcggcattgaagttttcctctatgcccatgggttttgtttttattttagccaaatatatcagcatattaccgcctccgtttatttctgtttttattttgtttaatatcatactaccatatttttttaaaatttaaaactgttttcactgattttttctcaatttatatgttataatatgacaaagaaaataagatgagggtacctatatgcaatacagaacagacaaaaaaggaaataggatatcaatattgggctacggctgtatgcgttttaccacaaaggccggagcgatagatattgacaaggcggaaaaagagattatgaccgcctatgaaaacggtgtaaattattttgataccgcttacatatatcccggcagtgaaaatgcccttgggcaaattttgcggcgcaacggaataagagataatgtgaacattgccacaaaactgccccactacatgatgaagaaccccggtgacatggacaaatactttaacgaggaattaaagcgcctgcgcaccgaccatgtggactactaccttatacacatgcttaccgatgttaaaacctgggacagactttgcgccatgggtattaaggagtggatagaaggcaaaatgaaaaacggccggataaggcagataggtttttcataccatggcaacagcgatatgttttgcaggttgatagaccggtacgattgggacttctgccagatacagtacaactaccttgacgaaaacagccaggcggggaaaaccggccttcattacgccgccgacaagggaatacccgttgttattatggagcctttgagagggggaaaattggtaaacaacctgccagaaaaggcaaaggaactttttgcggcctacccgattaaaagaagccctgccgcctggtcctttgcatggctttggaaccaaaaagaagttacctgtgtgctatccggtatgaattcaaccgaaatggtaaaagaaaataccgaaattgcagacgccgccaaagcggacagctttaccggtgaggattttgacttgttgcggcaggttataaatgcaattaacgcaaacacaaaggtaggctgcaccggctgccgctactgtatgccatgccctatgaatgtggatattccgggaacattttccgcttacaaccgcatagccgttgacggaaaacttatggccatgaaagagtattttatgtgcaccggcataagaaaccagtacacaggcccggcaaactgcattgagtgcggcaaatgcgagttgcactgcccacagggtattgaaatacgaaaagagctgaaaaacgccaaaaaggccttggagacccctttgtacaaggttgttaaaaagctggcgccgctgtttattaaatattgataagggcaaattaaattttaactgtaaaatatttgcatttcttaatattttacatcggttttaaccgtttaaacacaaaagagctttaaactgtgatagatttgtaacaaattattacaattttggggcaaacccgttacaaaatattgttttaaattctaaaatgcacttaaaagtatatacacaacgccccattagatgtataatatatttatcagtgggagtatgcccattgacccatttgtaatttacaaaataaatataaaggagctattgctatgattagaattcaggaccctctgggtaaaaccgttcttacaaacgatttcttcgtgggacttgtaagcaatgccattaaaaattgttacggtgttgcgggcatgagcgcccggaacccccgggacagtgtgaaaaccttgattttcggctctgatcaacagggcaaaggcgttgaagtaagcgaggacgaaggcgcccttgttattacacttcatatcaaggttgtttacggcgtaaatatcggcactatcgtcgacaatgtaaaggaaaaagtttcctatgccgttgagagaatgacaaatttaaaagtaaacagaatcaatgtctgcgttgacgacattgtaacagaataatacgaggtgcttaaatgattactggtaaaatattgcgtgacagtattatatccggcgcaaacttaattataaacaacaaagccaaagttgacgagttaaatgttttccctgttccggacggcgacaccggtacaaatatttcaatgactatcggtgcggcaaaaaaagagcttgaacttatgggcgacgattgcaccgttgacaaagttgccgccacaacagcttcatgtatgctgagaggcgcaagaggcaacagcggtgttatatcatcacttttgttccgtggtttttcaaaggctttgaaggacaaggaaacagccgacgcaaaggatttgacacgggctttgcgcaagggcgttgacgcagcatacaaggctgttatgaaacctaccgagggtacaattttgacagttgcaagacttgcctgcgaaaaggccgagtctatggaggaagatgacattgccacactttggcaggcgattgttgatgcagctcaggttgctcttgacaacaccccggaacagttgcctgttcttaaaaaggccggtgttgtagacgcaggcggtcagggcttggtttacatctttacaggtatgctcagtgtttttgcaaatggtgtaatcgttgaaaacgaagaggaaaagaaagcgaaagaattccgggcaaagggcgtttactcaaaggaaatcgaagctccacagacaaatatctaccgcacggaatttatcataaacaaaaatgcctctgccagcgtggaaaagctccgtgcaatgcttgaaagcatcggcgaagatgttgccaccgttgacgatgacaagattataaagtgttatgttagaacagagttcccgggcaaggctttgaacgaggcagtaaaccacggttatatgaccgacatcaagattacaaatatgcttgaaaaggttgcggaagtttcaaagagaggcgagagccttgaaaaacaggcacgggatgcggacagtgacgaagaatttaagtacgccgcagttgacccggatacggaattcggctttgttgcagttgcatccggcgcaggcctttgcaatatgtttaaggaccttggcgcaaatgccgttgtaacaggcggccagacgaacaatccgtcaactgacgatattttaagagccgtacagtctgtaccggcaaagacggtttttgttttgccaaataacaagaatattattatggccgcagaacaggctcggtcacttgcgg

SEQ ID NO: 1271 - DNA, 2904 bp, Unknown
  16S sequences of unknown bacteria
ccatcggccagcagcgtgctgccgctgagatacgtcaggcagacagacgcgtaataataccagcccagcacacagggaaaggcgaacagcacgataaagaacgcgatgagcgccggaccggcaggaccgatcgcccggctgaaggccgccatcatcagcgtcatgccgtcctgcccatatccatcgatgccgatgatcagcagcgcaaacgcggtgagcatgcagacgaggaaggtgtcgatgaagacctcggccacgcccatgaggccctgacgggcggggtcgctgaccggcgctgacgcataagagagcggcgcgctccccatcccggcctcatgcgagaagatgccgcggctcacaccatagcgcacggccttgctcagcgcgaatcccgatccaccggatgcggcggcggaaaagtcgaaagcttcccgcaggatctgctcaccgatcgtgccgatgcgctccgcatgcgtaaagatgatccacaggcacatcccgacatacagcagcgtcgccagcgggatgagcacgcggttcgccttcaggatcgcctgccctctgccgcgcagcaccacggctgcggcaagggcaaaggcggccgcgctgatccagggcggaagatcgaacgccatgtgcaaagcggcgcagacgctggaagccggcaccagcgcgcccatggcgaacgccgccgccatgcagcacaggcagaagcatgccgctgcggccggatgatgcagcttttccaggatcaccatcgcgccgccgcgccagccctgcgccgtcttgacctggcttgcgcaggacagcgtgacctccacatacttgagcaccatgccggccagcgcgctcacgcccatccagaacaccgcgcccgctccgcccatggcgagcgctgccgccacgccgaccatcccgccgatccccagcgtgccggccagcgcggtaaaaaacgcatccttgctcttctgctccccgctcgatctgcgcttgacgcgcatgagcggataacggcgggcgaaacaaacaaaatacagcgcgctcaggatcagcaggaccgtcatcccctgtccccagatcagctgattgagctgtgtgagcaccctctccacgcgcatcacctcgccgcagtatatgcgctcctcttcccctgaatgcacgaaaggcagctttcgctgcctcaggatgcgctttcgatataagcgtcgatatgccgttccacgacgctaaagggcgccgttccgctttccagcaatgcctcattgaacgccttttcttcaaaggcattgcccagcgcgtcctccgctttttcacgcagatccatgatctcatgatatccgacatagtacgtctcaaatacggccgggttggcctgcagctgctgatagagcgcgtcgccgctgccgatggagagccccatttccgtgaagtaatcctcaaactcctgcagggaccatccctcatagtggatgccgatgtccgcggcgatcaccagacagtacgtgagcagctcatattcgcggtagacatcgagcagctcctggctgatgccctccagatactgaaggctctcatactgcgcatagaccgcaaagccttcggtgtaggcgcccacattggccagcgccttgatgaagttgctgtcgatattttcatacatgtaagcatactgatacatatggcccgggaagccttcatgcgccacggtagagaacgtatcgatcgaatcgacgccggcattgttcggattcacccgcagctgcttcaccgtatctccatccaaagaagggatgttgaaatacgcggcgaccccgctgtccgaggcgatctcctcattgacatcctcgatctgatagctgaggtcctccacctgcgggaagctgtcgaagatcttgccctgcagatcctgaaggatctcatcatagctcgtatatccggtcttgggcagatcctggctcagcacttgttccgtctcctccggataagccatcgcatacatctgcagctgctgcagatgctcgttgaacgcctcttccatcatggctttgacttcctcaggcgtcttgttcgagccgatgctctgctgcagaagcagcgcatagtactccttgccatattcgaactgcgccagtccctgttcattgttttcgccggatgactgcagttcccgcatcgtatccaggatatcctgatacgcgctcagaaacgaatcggagaacgccgtgcgcagctgttcctgatactgcgcggtcttctcttcgcccagctccagcgcggcgatgctgtcattcatcgcctgcagcacagcgctgtcttcgccgctctccacgatcccctcacaataagagatgaccgaatccagatcgagcatgagcagccctttctcttcctgtatccgtgtgtattccagggcgctgtccacatacgggcgcacatcgctcatcagcgtgatgaggtcctgcacatcctcttcattgcgcagctgccaatcggcgaacagcgtcggcagctgataatgcaggccggagatgctctcgaacatcggcgcataataatcaaagcgctcatcgctgagcgactcgctcaatgagacctgataatcgaagatgtcatagatgtcctgctgctctgcgctcagctcatcccgatcaaaggtgcggaattcctcgcacgtcgcctcaaaagcatccaaagacgcctgctggctctcctcatccatccgcgtgcccagggaaacgctgatcttgtccgggtcgacgccgaagctctccggatcctgcagatagacatgcgccgtcgtatagtcgctttccatcgtatccacaaattccttttcgatgaacgcgtcgaagcgctcctgttccgcggtcggttcttcgctctgtgcctgaggctgtgtctgcg

SEQ ID NO: 1272 - DNA, 7069 bp, Unknown
  16S sequences of unknown bacteria
agctaaaagcagcagatttacagtctgtcccctttggccactcgggaacgctcccatatggagctggtgaacggagtcgaaccatcaacctgctgattacaaatcagctgctctgccattgagccacaccagcgtcacaggtattcatttcacgtccgacgtatcgaacgtataatattataccacatccgcgagtgtttgtcaagggttttttgaaattttttctcctttcatgaaaaaatccatgaaaaaaaatgatatgtcggatcgtttgaacaagtggttttgacgattactgacattcggacatattgcggcagaaaattttgaaaaaaattgcaataatattatcgttttctgttgacaaatcacgacgttaatgatataatatttttatccggagaatataatgaatccgtggcgcgacctttttgattttttacagtgattgtttgtgcggcggatgtgtctgcgaaaggagaaccgcaaataatgtatctgcttatttctgacccgttttgcgttgagggtaatacacagagtcacttctgtctgacgggagaccgtctttccgctgccgtccgcagttccccgtgccttgaggagccgtcgtgcggcatggggatgcgcgcgcttgtctattcactgaagaggtcggatgacgacaggaattgcctgatggcggagatatccgggatgcggataagaaacggaagactggaggtgtcatacggcgatatgtctccgaccgccctttcctgccgcgacgcgaagcgcaggatacgcgcgaaaaagtacgcgtccggcacccagaccggaaacgacatgactgaggtgccgcttatcatcgccgtggatgaggagacattcggtaatatactgaacggcgacggaatggcgtccggagctttctgcaccagacttgaggagcttcagcggtacgggcggctcgacgatataatcgcggagtttccgaccgatctcagtatttcggaatcggatgtgcgaaatgaccctgtctgtatcggcaagctcgcgtttgctctggcgaagaagctgacccgcgtcacgaccggaagaattccgcgcggcgaggaggagagcgtgagggctgaggcgctgtgtctgaaggacagaatgaaagaggcaatggacagatgcttcgagctcgagagtgacaaccgcagtctgcgctccgcgcttgcttactattattatcatcagctgtgtgacgccggtctgttcatcgaggattcgcgcgaggagtgcttcagggtcggttcacgtctgttcgacgggctcgtctgtgacccgccggagaagagctacaaggaccgctcgagatacatactcatgcgtatgcgctacgccgatctttcgggcggttttgccggcgactcgttcccggatgagctgtacgcgctcgcgaaggtgtacgagggcttcggatgggaggagaagcgagcgttccgcagagagtatacgcgggtgtgctatgagttcgcgaaattcgtgattgaccgtcggctgtatgtattctataaccggtatatcaagaaaaaattcggctcatggtatcactgcccgataggctttgtcggtgacgacgggtatgacagacggcttttccagacggaggaatgcctgcggagcgccgtcaggtgccgacctcccgaaaatttttttcttccgactatgactgaactcgattatcgtttttctcaggtgttccagataaatggcatacgtcggctgctgggcggcgacgacgaggcggcgcgtgaggattttctcatgtccgaggagtacgtgaagagcgcgtgggacacttataacgaggtcagagccgcggcggcggacgagaacgtgaaatatgttcccgccatctcgaccatcttcccggtctggctgatcggcgttgaggcacgcaattgctgttttctcggtaaatacgaccggaccgcccgtgttatctcgcgcaacaggctgccgagcgacgcgcagctatgtcagtacgccgagctcctcgcgatacagggcgacttttccggcgcgcgccgggtactttccggtttgtccttccgcggaagaggggacgagcgggtcaagtcgcttgtcagatatcttgatgagaacgataaataattatgattgcccccagacggatttcgcgtccgcttccgggggctttttccgttctgttgcacgatatggacatgtctcgggaaaacacgtccatacagtcgcttgacatattccgtactctatggtagaataggataaacgaccggcgtgatccgccgtgatttcaggaaaggaatatacggaaaatgaaaaagacctatcttataggaaacgcgcatatcgaccccgtctggctctggcgctggcaggagggcttctccgagatccgcgcgaccttcaggagcgcgcttgacagaatgaacgattacccggacttcaggttcacgagcgcctgcgcggtctactatgagtggatcgagaaggttgacccggagatgttcgcggagatacggcagagagttaaggaggggcgctggaacatcgtcggcggctggttcttacagccggactgcaatatcccgtccggagagagcctcgcgagacattcgcttatctctcagcgttatttcaaggagaagttcggaattacagcgaaaaccggatataatgtcgactcctttggtcacaacgcgtcgataccgatgattctcagacagagcggtatgaagaattatgtcttcatgcgtccgggaccgcacgagaacgcggatctggacgatctcttcgtctgggaaagccccgacggctcaagcgtccgcgcgtacaggataccgcactgctactgcatcaccaatatggatcagctcgacgacgtgatcgcgaggtcgaccgaggagaagccgctgatggcgttctacggcgtcggcaatcacggcggcggaccgaccgtcatgctgataaacgagatcaacgcgaaccacaagccggagggcgtcttttactcgacccccgacgagtatttcgaggacacgaagaacaacgacgtgaaggtcgtgaaggacgagctccagcaccatgcccgcggctgctacagcgcgctcagttacgtgaagcgctcgaaccgcgccgccgagtacgcgctctatgaggcggaggcactctctgttctcgccgacaagctgaccggtgaggacaattatccgtccgagaagctgaagaaggcatggaagaatgtcctgttcaatcagttccacgatatcatgggcggctgcgcgataaagagcgcgtataaggacgcgtcctatctctacggcgaggtaatgtcgatcgcggagcaggcgtcgaatacagctatgacccgtatcgcgctgaatgtcgacactctccatgacgagacgatgccgaccgcaaagatcaactggcgcctctggagctgcggaaagcttggcgctccggtgttcgtcttcaacccgcacgcgtgggacgtcgaggctgtcgttgagataacgtccttggcgtcgaagatcactgacgacgagggcaatgaggtagcgatccagaaggtccgcgccgagtttacgaacggcggggaaaagtacggcacggcgttcatcgcgaaggttccggctctcggatacaagctctacagaatattcaccgatggcgagccgaccgtgaaaaacgctgtcggaatcactgagcattccctcgagaataatttcatcaaagtcgtgttcagtgagaagaccggcgagatttcgggctttgtcgacaagcgtaccggcgaggacatactctctggcgagaccggaacggtcctgctcgacgagacaaattgcgacacttgggcgcatgacaaggtgtatctcggtgaggacgccggctccttcggtgagcctgtgttcagcattatcgaggagggcgatgtcagatcgaccctccgcatcgagacgagattcggaagctctgcgctcagacgcgactacacgctcgagaaagacagcgacgcgataaaggtagagctcacggtcgacttccacgagaagcaccgcgccttcaagctgactatcccggcgggagacaaggtcatttcctcgattccgttcggaagcatcgagcgcccgctcggcaccggcgaggaaccctgtgcagaatggctcgccaccggaaagatcggctacgcgagcgatatcacctacggttatgacacgaccgacatgctgatgcgtccgaccatcttcagaagctgcatcatcaacgaccacttcggcgcgcgcgacgagttctgcgagtatatggagcagggagtttccaccttcagatatactctcttcccgttcacgacccgtgccgacgcgaagagacgcgccgacgagttcaatctcgctccgaagccgctccacgacacataccacaagggaaccctcgcggatgagttcagaggctttgagaccgacagcggcaacatcgtcgtcacagcggtcaagcgcggcgaggacggcggaaaggttctcagatttgtggagcttgacggtaaggacgcgaaggtcggagtcgggctcttcggcgagaagacagagatcggaacgaaggctcacgaggttcacactatcgcggatgggcgcgatgtcgaccttatcgagtggtaaacagataaatatgtgcgtctgacggttgtccggcgctcgaaaaagccgtgtggtcttcacgcggcttttttatctgaaaattttttcggaaaacggaacatttcgggaaagaattgcgtctctatatatgaagaacaaaaacggaggtacttcatatgaaacgcttatcaacagtaataatcatcatcgccatgacgctcgtgtcgcttgccgccgtctcctgtggggaagagagcgacgacgcgctgctgaccggggtcttcacgaagaccggagtggacctcggcgagggcttctggacgaacggcacgctcgcgttctcggatgggaagctgtgtgtcgtcggcgagctgcgggacgacaattctccggcgatggcggtcgtgaatacggcggacatgacggtttcggtcgaaaagctgccgatttccggctccgcgtcggatatcgcggtcgggaaagacggcgttctctgcgtcgtgaacagttttgacgaggagaccttcaggactgtctacacactcgagtgcgtgaaggacgggaatctggtattctcacttgtcgccgacagtgtgattgacctcggggacaatttctggggtgtctatgccgcgtcgggtgacggatgctggtatatcgccggcagcaagacattcgccatgatctcgcctgacggaaagaccgaaatgacatcagagcttcctgaacaggcgaacggactcgccgccgacaggaacggcacgcttcacgtctggggcatgggataccacatgatactctcggacggcaggctcgaaagcagttccgagtggcttgacgccgccggcagcggcagcctgttcttcggagaggggcacgatttctaccggacagacgagaacggcatcggatacggagaccttaccgaaaacggcgtcgacaccggcgagatcatgaacttcgtgaattcgtcacttgtcatgtcaaatggcggagattttgtcgttgccgaccccgagacgatctatatgcacggcagcgacggggtcggcggcgagcgcggactctggaaatacacgaagaccgacgacaggctgctgaccgacatgaaggtcgtgaaggtcacgtatatagagaacggcaggaacatgatccccctcgccgccgtgaagttcaatcagtcgcagaacgagtactacataaaatgcgaggaatacgcgtcgaaaaacagcacaggcgactggcagtcgctcatgtcgcgcctcgacgcggatatcgtcgccgggaatgtcggggacatcataactgtcagcgatccggacagcataacaaaatacgcgtcgaaggggctcttcgccgacctgtacgagctgccggggtttgagaaggacaagatgttcggctgtgtcagcgaggctatggagcgcgacggcatcctcgcggcgataccgcaggagttcgtgctgaatacgctcgctgtgcaaaagggaactgtcggtgaggatttcgacgtcggaaagataatcgacctcgcgaaaaattcaggcggtaagcggctgttcatggctatgaaccgtggggcggtgaacggacagctgctgaacagcgttcttaacgagtgcgtcgacttttcagccggtaaatgtgatttctcgtccagcgcgttcaccgattatctcgattatctcatgactctgcccgagaacgacgaggacgcgatgtacgacggcgcgaaccactacgcggcgggcgagataatgttctatcaggcgcggatcggcgcgatttcagactacgcgatgactctgaatattttcggcgacgcgggcgcggatatatgcggttatccgtcgtatgacggcggacgcgctgatctttcggcgggcacctactactcagttgtgaaaaaaagccgcgtgaaggacggcgcggcggcgttccttaactatctgctctcaccggactgcacgatagacgagatgcacggtatgcggaagataccgtcgctgaaagccaccatgaaggcgtgggaggagagcgaagggaagatgtactattacttctacaaaaatgatatcaaccgctggtcagctgacacgaatccgattgatgagacagagatgggcgagccgggcgtctgcgtgaaggtcgaccgggagctgtttgacagtttctatgaatatctcgacggcgcacatgttttcgggaatatgccgcagagtatcacggacatcgtggctgaggagatggacgcgttcctgtcctccgcgaagagcgcctcggagaccgcggatatcatctcgaaccgcgtttcgctgtatctttccgagaaaaactgaaattttcgcttgacatatcttcctgattcctgtataatattatgtataccggatccggaggtcacagtgtatataaat

SEQ ID NO: 1273 - DNA, 8426 bp, Unknown
  16S sequences of unknown bacteria
gaaacagcatagcgccgcttttaagccgcggcgcggcggaatgggacctaaaattgttgctctgggcggcggaaccggactttccaccatgctgcgcggcttgaaagagtatacaaaaaatattacggccatcgttaccgtgaccgatgacggcggcggctccggcgtactgcgtcaggatctgggcatgccgccccccggtgatattcggaactgtcttttagctcttgccaacaccgaacccgtgatgggagaattgttggggtatcgttttacggagggaatcctgaagggacagagctttggcaatctctttttggcggccctcaatgagatatccccatccttcgatgtggcagtgcgccgcatgagcgaagtgctggccattaccgggcgggtgctgccggtgaccaatgaaaatgtggtgctggaagccgagtttgaaaattgtgctcaggtggtgggggagtcgaaaatttttcagtgcaaaaaacagcaggactgccgtatccgccgcgtgcggctgcagccccggcatcctcaggcgctgcaggagagtttggaggccatccgtgccgcggatctgatcttgttggggccgggaagtctgtacaccagcattattcccaatctgctggtggatggcattgtagaggaaattacccggtcggacgcactgaaactgtacatctgcaatgttatgacccaggagggggaaacagagggatactcggtcagcgaccatatccgggcgctgttccatcatgctgatgatcatatttttgattactgcctgaccaactcggctgccgttccaaaagagatctgcgcgcgctatgccgccgagggcgcggctcccattgtatgcgaccgcgaggagagcgaaaagctgggtgtctcggttattgagcgggaggtgtccctgatcggagccgatgggaaagtcaagcatgacaccgcggcattggctcgggagatttttgccgtttacgcagaatacggttcgatccgcattgcggaggattccttttgaggcgtgtgcgcagacagaaagcgaggaacgatcatgtcattttccggcgaagccaaatcggagctgtgccgtgcggcgctgcagcggcagtgctgtgcccgggcggaagctcatggcgtgctgttgttttgcaatacctttcaaagggataagatccgcattgtcacagaaaaccgggcttttgcagcccggctccccaagctgtttcacaaagccttcgggcttgcgtttgaccgtatgccggaggggggcgaagaaggggccaaactgacgtttgagatctcggagcgggacaagctggccgatatcgtcaatgtttgcggcttttccatggagcagaatctgtcgctgcacatcaattttggattgctggaagaggactgctgccgcgtttcctttttgcgaggcgtctttttggcaggcggcagtgtaacggatccggccaaacggtatcacatggagtttgtgacctcccactataaagtcagccgtgaactggaagcgttgctgatcgacatgggattcgtctcccgtgagacgacacggggcggtaactttgtcacctatttcaagcagagtgagcacattgaagatctgttgacgctgctgggtgcgccggtggcggccatggatatcatgtcggctaaagtcgaaaaaaatctgcgcaacgaaatgaaccggcgcgtgaactgcgatacggccaatgtgacaaaagccgtggatgcggcgcaggagcagttggcggcgatccggcggctggaagagacaggccggctggacacgcttccccggaagctgaaagagacggctgccatgcgtgcgcggtttccggagatgacgctttcgcagctggcggatagttttgagccgccgctgaccaaatcctgtctgaaccaccgtctgcgcaagctgacggagctggcaaaacaatcagaaccgtaaaagcgaaagagatctggatacagcaaaggagaatggaacgatgaaccgagcagaacgggcaaatgcatatcacaacagcggttacaattgctgtcaggcagtggcagctgcgttttctgatgtgactggactcagcgaggcccagtcgctggccatcggcggaggatttggcggcggactgcgctgtggggagatctgcggcgcagtgtcgggggcggttatggtgctgggcatgacgcatccttataccgattgtaccgatcttgagcggaaacagcaaattgcccatttgacgaaagagttccaccgccggttcaaagcggagtttggctgcgagcgatgtttggatcttttgcaggccgacatttccgacaccgagcgcttcaaggcggccaaagcctccggcgtaatgaaaaagtgcccggtgctgattgccgctgctgtagaaattgtggaacagatcctgcgcgaaaaaacacgctgaaagaaaggagacgccatgtcctttgctcatttgcatgtacatacggagtacagtctcctggatggtgcctgccggatcagcgaactgccgaaactggtcaagtccatggggcagactgcggtagcgatcacggatcacggcgtgatgtatggcgccattgatttttatcgcgcctgtaaagccgagggggttaagcccattatcggctgtgaggtgtatgttacgcccgaagggcgtacccggtttgacaagatgcacgaatttgacgctgaatcccgccatctggtgctgctgtgtgagaacgaggagggctaccgcaacctttcttttatggtcagtgcagcgttcactgaggggttttatatcaaaccgcgcattgatctggagctgcttcgcgctcattccaaagggctgatcgccctttcggcatgcctggccggtgagatcccccgccgcctccggggcggggattacgagggcgccaagcgctatgccctgcagatgaaggagttgttcggtgcagacaactttttccttgagctgcaggatcacgggatccgcgagcaggcggcggtgaatgccggcatcctgcgcattcacgatgaaacgggcatcccgctggtggtcaccaatgacgcccactatctgcgcaaggaggatgcatatagccatgatgtgttgctgtgtatccagacggggaagactctgaacgacaccaaccgcatgaaatatgagccgcagaacttttatcttcgctccacagaagagatggcggcgctctttcccacccacccggaggccattgagaataccggacggattgccgagcgctgcaacctggagttcacattcggaaaatatcatctgccggaattccagctgccggaggggtatgattcggcggcatatctgcgtgaattgtgcggcaaagggtttgccgagcgctatcctgaccgcccggaatgccgccagcagctggaatatgaactggacatgatcgaaaaaatgggatttaccgactatttcctcatcgtgtccgattttgtaaactatgccaaacatgcggggatccctgtgggtcccggacgtggcagcgcagcgggaagcatggtatcctattgcctgaatattacagaaatcgacccactgcagtataatttatactttgagcgcttcctgaaccccgagcgtgtgagtatgcccgatattgatatggatttcggcgatacccgccggggtgaagtggtggattacgttcgccggaaatacggcgatgaccatgtggcacagatcgtcaccttcggcacgatggcagcccgcggcgtgattcgcgatgtgggacgcgtgatgaacattccctatgccgaggtggatcagatcgccaaacaggtaccgaacacgctgcatatcactctcaacgatgcgctgcgcctgagcaagcctttgcgggagttttatgagagcgaaccgcgctataaaacgctgatcgatacggctcaggcactggagggaatgccgcggcatgcctccacccatgcagccggtgtagtcattacccgccggccggtgtatgaatatgttcctctggcgaaaaacgatgaagcagtggtgtgccagtatgtgatgaccacgctggaagagttgggcctgcttaaaatggactttctgggcctgcgcaacctaacggtgctggacgatgcggtaaaaatgctgcagaagcatcaaccggaattccggttggaagagattccggaggaagatccggaaacctatgagatgctctcgcggggccagaccagcggcgtgtttcagatggaatcgacgggcatgaccggtgtgtgtattgggctgaagccgcagaatattgaagacatcacagccattattgccctgtaccgccccggtcccatggaatccattccgcgctttatcgaatgcaagcaccatccggaaaacatcacctatctgcatccgtctctgcagcccattctaagcaacacctacggctgcatcgtttatcaggagcaggtcattgaaattttccggaaactggccggctattccctggggcaggcggacatggttcgccgggccatttccaaaaaaaaggccgctcagatccagcgggaaaaagaggcgtttctgcacggcgatgcggaacgcggtatctgcggctgtgtcaacaatgggatcccagaacaaacggcccaggatatttatcagcagatttatgattttgccaactacgcctttaacaaggcgcatgcggtcagctatgcggtggtggcctatcaaacggcttacttcaagtgccattatacaaaagaatacatggctgccctgctgaccagcgtgctggataattccgacaaaatcgccgagtatatcaatgaatgcagggactgcggcatccgccttctgccgccggacattaattactccgatgataccttcaccgtggaggacggtgggatccggttcggactggtggcaattaaaaacattgggcgcggctttatccgtgcggtgatgaacgagcgcagggagcatgggcggtttgcttccatgcagagtttctgtgaacgaatgtatggtacggagatcaacaagagggcgctggaaaatttgattttgtccggcgcgtttgattccactggtgcgcgccgctcgcagctgcacgctgtttatgaacgggtgctgggtggtgtggtggagagccggcggcagaacctggagggacagatcgactttttcggcggtttttccggggaagcaacgcctgtttccgccgaaattccgctgcccaatctcgaggaattttctcccgaagagcgtatgcgccaagagaaggaaacaacagggctttatctttccggccatccgatggatgcctatcacgagcgtgccaaggcggcgggcgcggtgccgattttgtccattctggaagattgcggcgatgagaacgggccggttcggtatggggatggacagtatgtgaccgttgcgggtgtggtgacttccagtaaaacgaagaccacaaagaataatacactaatggcctatgtcatggtggaggacagcagcgcatcgattgagctgctgtgtttttccaaagtgctttctgcctcgggcagttatctgtccgaggggaatgcgctgctgctgcggggccgtatttccctgcgggatgaaaagacgcctcaaattatgtgtgacgaagcccttccattggacagcaccatttctgcggcggccaaaccagcccggcagggaccaaaggtactggagggccgccggcttgttgtcaagtgcccttcgattgatgatcctgtgatgcggcatattcagctggtgctggaaatgttccccggcccatctcagttgatcatggtgatggcagataccggaaagcggtatggagcaaaatgcctgctgcaccgcgcgctggtggaggagctggaagaaacgctgggcaaagagtgtgttgtattgcagcagtaagggatatattgaaaaggacgggaaccgatggcaaatcggttcccgtccttttgcttggcttgggcgaaatcaggttccttttgggtactttttcagcaacgcgtcaagaatactgttataaatttcttctgcatgagattgaaagtgtgcgctgagctgttcggccatctctttttttgataccatcaggtcaagattcataatgttatccacatcgtcgctcagggaaagggtgacggtatacgtcccgttgggacgctcgtttaccatggaacggaccaatccctttcgtttcagtttttgattatatacggcaatgtttttgtcggctttgatgcgcacggagtatgggatactgctctcgcacacctcgctgttgcggattccgcggggcgtggcgcagtagagtccatcctccgtccgtttcatgtgttcgctgtccaccagctcattcaggcattcggagaaagaaaaataatccacgccgtcgtcgcacagcgcaagatccgttaagacgtcgatgccaaccggttcgattaggcgggaggcgatatagaggatcaaaaatttgatgtccagtttgtcatgaataaagccgatgcggcccatactgctcacttccttggtttcataatccactttgtgatttcattgtaccacatcttcgcaaaagcaacaagggtccgtacagcgaatgggaacggattttggggagcggcatacaatgggcatgaagggagattttccttccattacttataggaggatatatatatgtctgagaagatcgttcccggccctctgcaggattgttctgcgtcgattcaggaggccgtttgcatcaatacaaaaaaaatctttgacagctgccgcgatcaggactgtattgaggacctgcgtttttaccctgtccagtgcggccaggacgtcatcaacaacgctgtttcggtgaaaaacgccaaagccgaactgctgcacgtgtacacagacgtggagccgatcaatttcaaccgtggattctatactgtggatctgcgttatttttaccgcgtagtgctgcaggtctgctgcggctgcggccggcccacggaagtggaaggactttgtgtgtttgacaaacgcgtgatcctcttcggcagcgaaggcggcgcgaaggtatttacctccggcacctgcatgaattccatggatgcgggcagtatcgaaaagagcaacctgccctgcgccgttgtcactgcagtagaccccattgtactggataccaagctggtagatgcctgtgagcgccgttgctgcgactgcgacatctgcgagattcccagctgtatctgcgattgcttccagtcggagctgtgcggtgcggatcagggcaagcgcgtatttatcacgttgggtcagttctccattgtgcggctggagcgggatactcagctgctgatccccagctacagctattgtatgcctgaaaaggaatgtacctgcggcggcggttgtggctgcggcacagatccctgcgagctgttccgcggaattgctttcccggtcaacgaatttttcccgcccaacgcgctggagaaaaagtgcgactatgagggcgtcaagtgctgttgctgttcgaagcggtaagctgagtgcacagcacccgtctattttacagaataaagaaacgtgcgttgccgattccgatatggcggcgcggaaaaaagcccggcatatgccgggctttttctgcatccgtctcaggcggccggcattctttctgtccaatgccgtagggtggagcagtattttgcggctcggatcaaacgactttttgttttgcgttctaaaagaggacaaccacccatatagtttagcatccgttacaaaggaactacgaaagaaaaggggagaggcaaatgcgggaggagcagaaggagttgtatctgataccgtaccgccaggcggcggaaatactgccggaacaccttcggcgcgcagctctggctcgctgtgcagatgaacaggctgtggcagaggaattccggctgcgttccgggcagaagatgtcgctgctggggccggaaggagagacatcgatttcggaagagccggtgaccggacaggatctgcaggccgtgctggatcgggccacagagttttcagcttatcgctgcgccgggagtatccgtcaggggtacgttacggtgcgcgggggttgccgggtgggaatctgtggcacagctgtgctacgcggcggtgagatcgccacggtgggagagctgtcgtcgctctccatccgtattgcccgggcagcgcttggggtggcaaaagatgtgtatccgaaactgtggagcgaaggcagctttgagagcacgctgatcctgtcgccgcctggcggagggaaaacgaccctgctgcgggatctgatccgctgtttatcaaaaggatcgcagacgcatccggctctccgcgtggcagtggtgg

SEQ ID NO: 1274 - DNA, 2031 bp, Unknown
  16S sequences of unknown bacteria
ccggtgagtaccggcgttgagccggaacagttcggggcgaagggcgacggcatcgccagcacgaaggaagtcagcggcaacaccatccggggccggatacggcataaagtctttcaggactgctccggcgtggagaataacaatgtagaagtgcggagattctcgattctgggatgagccgctggacccgctgccgcctttggactttcacgcgcagccggactggttcgatgcccgtaccctcccggagaacctgtccaacgtccgtatcataaaagaatatgagcagctggaagcctttatagagaaagacgagtggatcggagaccccgttctggtgcggaaggaagagctcctgaatgagatgagcagccgcgcccggaactatagaggccggcgcggcggagctgactatctccgcgccatcagtcaggacatcgacgtgctgcttgatttcatgggataaggattctataagatgaaaagggaagagcctcactgcaaagcggtgaggctcttccctttggtggagcacagagggttcgtctggctcacgtgtggtggaggcgatgggagtcgaacccatgtccgaaaagagttcagcgtaggtgtctccgggtgcaggcgatctacaacattcccgccgcgccacgccgatcgtcaggctagcgcattggtagcttcatgagttcctgccggtccgcaaagcttaggtccgttcaggtgctgtgtctaaaggacgccccggccccacacgacacaagagtgggcggaacgcgcagcactcaggctgcgagcaactgataattattgttgtcagttaattttttggaggagtttagagcaggtcccccactgctacccgctgcccaggcctcgctccccccgtcgaaacctttacgcccccataaaagcacaccttgcggcgtgctgataaagcgaatgttcctggcaggaaaagctgcctgaaaaagtttagtaatactggccgttggatttgaccgcccggtcaatggaacgcttggcgtcccgctgggcggcgtcggcgcgcttgtcgtagagctttttgcccttgcacaggcccacttccatcttcacgcggccatgcttgaagtaaagcgagagcggcaccagggtgtacccctgcagcttgcactgctggtgcagccgccggatctcgttcttgtgggccagcagacgccgcacccgcagcgggtcctgattgaagatgttgccgtggtcgtagggagtgatatgcattcccttgaccagcagctcgccgtcttcgatatcgacccagctgtctttcaggttaacgcctccggcccgtaagctcttgacctcggtgcccttgagctccacgccggtctccagcgcttccatcacaaaatactcgtggcgcgcctcacggttggtggcaatggtcttggttgccggacgttctttcgtcggtgccatgggtgcgcctcctttcttctggtctggcttcgtttttgtagtatatcatattcccacggttttgcaagggcggattttgaagaaagtgtaacactttcccaaatttttcgtgccttacagttccccgcggccagagagggcccggtacagggtggtctcatcggtgtactccaggctggcgcccaccggcaggccgtaggccaggcgagtggtcttgatgcccatgggcttgatgagcttggccagatacatggcggtggcctcgccctccacggtggggttcatggccatgatgacctctttcaccttgccgtcgcccaggcgggccagaagttccttgacgcacagctgttcggcagtaatgccgtccatcgggctgagcagaccgtgcagcacatggtacaaaccgtgatactcccttgtgcgttcaaacgcctgcacatcgcggggcgtttccaccacgcagatcacagaagggtcgcgttttgcactggcacagatggggcagatatccgcttctgtataattctggcagacgcggcagcgatggagcttggtgtgggcgttctggat

SEQ ID NO: 1275 - DNA, 13065 bp, Unknown
  16S sequences of unknown bacteria
tcacctccaccggacgttatccggcaccctgccctgtgaagcccggactttcctcgtctggcgcctttcggcctgccagccgcgatcatttatcctacttatctctcttcaaccgtaagattttatcatattacaggctgtctgtaaatcctttttttgcttaaatataatgattctcttttctacgaaaaatggctacagatcaaagcagccgcccccgataaattcccggatcagggaattgttcggaatgtcatcccccggaatcggcagaaaataatcgaggaatttcagcagccgcttcgcctcctcatactccggctcttccggactgatagaaaacagcttcggctctgcatagagcttcagcaccgccagctcataaatcagcgcagaattgaacatgacatctgcactctcctgatacggaaaaatgttgcgttcctcacctctgcgcacagaatcccacatcgcgatcgtatcctttgccgaagctcccctcgtgcgtgcatcccgcacgatccggcgcagcagccgtccgtcggtcgtcggaatccggttgtgttcatcaatgttcagctgggtcagggcgctgatataaattttaaatttgttctcccgtggcagcgagactgtcagcgcatcattcaggcagtggataccctcaatgatcaggatatcatcttttccaagcgtttttgtgcgccctttatattcccgccttccggtcttgaaattgaatgtcggcagctcgaccgtctcaccgtttagaagtgccgtcatatccgcatttaactgtacagcatcgatcgcctcgatccgttcaaagtcatacttgccatctgcgtcccgcggtgtcttttccctgtcaacaaaataatcatctgcggcaatcggatgcggcttcagtccatagactgagagctgcgtcgaaagcctgtgagaaaaggtcgtcttgccggaagacgacggtccggcgatcagcacaatcttctgttccggctttgctgcgatctgtgccgcgatctccgcgatctttttttcatggaacgcctcctggatcataatcagctccttcgccgtatgctgtacgataaaatcattgagcgcgcccaccgtcggaatgccaagcctgcttccccactccatcgaatcccgctgtacatggtatattttcatctccggacgaaactccggtactgtctgcggctgtcccttcggcggaaactgcagtacaaatccatcctcaaacagctttaaatcaaagcaggacagataagaggcatccggcaccatatagccataatagtagtcctcaaaggatttcaggctgtaaatattgaccctggaggctctccggtagcggaacagctgctccttatcgtacatccggtattcccggaaccgcctgcgtgcctccgtcgtcggaatcgaccgtttctcaatcggcgcagcctcctttacgagcgcatgcatgtattccttcacatcatccagcagctgccggctcagctttgtcctgccctgtaaggtacagaaatatccgccactgactgcaaaatgtacaccgatccggtcaatatttgcattatcgcccactacatggtaaaacgccttcagcatcagcagaatcatactgcgccggtatgtgctgtagcctgccttatccacaagcgtcacaaagcaaatactcgtaccgtccgatatctttttcatcagctcccgtaaccggccatcctcctttgccagcacaatcggatatgcatattcgctctgatattcctttgccagctccagaaaacgggttccctgtgggtattcctttttcacgccattgattttcaccgtaacgttctgtcccgccatatgttcacgctccttccgatgtcaaagcggatattcgcagtcgcttcgcggtctgcgctcaaaacctgctgtgcttcacagcgtacgcaggtctataatgtaacaaacggctcctgatatactgcttctgccaaaagctccgggaaatgctgctgcaacagcgccatcacctgcccaatatatattttttcaattccaaaatgccctgcatcgatcacagtcagtccctgatcctgtgcatccagtccggtatgatgtcccacatctccggtcagataaatatctgctccgcttttcagcgcttcctccatcagctcttttccaccggatcctgggcagactgccattcgcttcacgtctgtatccggctctccaaacagctgtacatgcgtaagcccaaatgcctcttttacataagcacagcatgctttggcgctcatacacgccggcagctcaccaacgctgccgattccatatgcatttccatccgcatcgactccggtcacctcaagcggtgtacagttcgtcaaatgcagtgcatgctctgccagctctgccatttttgccacatcataattcgtatgcatggcgtaatgcaccattcccgcacctgccatcgccagtatttttcttccatacattgtgtcctcgtttaccttacgaagaccgtccagcatcagcggatgatgggtcacaagcagatcgaccccggcttctacgcagtgatctactaccttctgcgtcgcatccagtgccacgagtaccttttttacttccgttttacggctgcccacctgcagtcccgaattatcccagtccatcgccagcgacggcggaaactgctcttctaataatttgataatttcttctgctctcattcgtctttctcctccctggctatgattttattcacttctgacatttacttatttacagattatcgtttacaccgaaagcttcttcgcacgctccaaaagctccagctccctttgaagctcctcacgccgtgcgttcgctgcctccgtctgtttgccctgcatcgcttcaagcacctgccgacagagccgttcttcccggctcagataatcctgtaaaagcggatgatgatttttcatgccggacatccccgtcatccacactgttctgaccatcggactcccgcttctttttcagatcctcctctgaatgtgttaccacccgcatcatcggataatattttccatcttcaaaaaccagatcctcccggtcgagctgccagcctttttcctcgagatacgcgcgtacgctgcggatgtccgactgcggctgaagcaccagctcccgacagcctgcaagcacgccctgcccgttttccagaatgcggaccataagcagtccgcccattccggcaatcaggattgtgtcagcctctcctgcctgcagcttttccagcccgtctgagagccgtgtttcgatccggccggtcagcccataacgccggatattttccgtagcgcgcaaaagcggcccctgattgatgtccatcgcgacggcctgtggtatcaccccattctgcatgagataaatcggtatgtatgcgtggtcggtccccacgtccgccaggcggcagccggggcttaccatcccggccaccgctctgaggcgttctgatatctgcataataaatcccttttatttcctttcgtttttactctaaataatcttttaacttccgcgctcggctcggctgcttgatccggcgaatcgccttggcctcgatctgacggatccgctcacgcgtcacatggaatatctttcctacttcctccagcgtccgctgatgtccgtcatccagtccaaagcgcagacgcaatacctgctgttcccgctccgtcagggtcgagagcacctcctcaatctgctcgcgcaaaatggtgtaggccgctgcatcctccggtaccggcatattgtcatccttgataaaatcacccagatgactgtcatcctcctcaccaaccggcgtctccatcgataccggctcctgcgaaattttcagaatttcctgcaccttttccgtcggcatctcaagcttcttcgcgatctcctccggcttcggctcccggccaagctgctgcatcagctggcgcgatgtgcggatgacacggttcattgactctaccatatgcaccggaatacgaatcgtgcgcgcctgatcggcaagtgcccgggtgattgcctgcttgatccaccaggtcgcataggtgctgaacttatatcccttggtataatcaaacttctctactgccttgatcagtccgagattgccttcctgaatcagatcgagcagctgcatccctcgtccggcataacgtttggcaatgctgactacaagccgcagatttgcctccacaagcttctgacgtgcatcttcatctccccggctcattttttctgccagctcgacctcctcttccgcgctcaaaagcgggatccggccaatctcttttaaatacatccggaccgggtcatccgttgtcgtcccttccggaacgcttaagtcctcttttcccggatccgggtcatcctcctcgaattcctcgtcatccggtgaaagcagcgcatcatcggaatctgagacatccagcacatcaatgcctttggcatccagatattccatgaccttatcatactgcgtctctgtcagatgcagatcgttcagcgcagcctgaacctccccgtattccagaacattcttcttttcctttgcagcctttacaagctcctgcagtttcttctgaacctccgtcgtccgtacatccatccggctacctacctttctgctgctgtacgcctgatccccgcttcgtgctccacgcacctgaagcgggaaagcttcttccagacgcacattccggcctctctgtgtcattctttccgtgttacagtgaaatatgcagctttttcagctcctgcagacgcctcttggcatcaataagctgctgcagtcccgccatatcggtcgggtccagctctctgctgcgctgcgtaattccgtgctccacgaccttatagatcgtctccttaatcgccttctcgcgttccgccctgttttcgaccggcacctctgtattaaaaagctgagccacaatccgctgctgctcgggttccgtaaagtaatttgtaatctttgccgggttgtgttcgccgtgctcgagctgctcatacagcatagaagccacctttcggtaaagtgtatcggaaaaatcctccggcttcacacacgattttacagttgcaaacagtcccggatattccgtcagccacgtgagaatcagacgctgcgaggtgagaattccgctgtccttttccttttgctcctgtcgttttacaggccgcggctccctgcgtgacggaaccccctgcatcagacagttcatcaccatcttgcgcattccttcaaaagaaatctggtatgcacccgcgaccgcctctatatagttctcccgttcgatctccagctcaaatccggcaattttttctgctgccgcctgaaagaaccgtgtcttggactccggatccttcatatcataggacttctcaataatcgaaagctcaaacataaaactgttctgcgcatgatcgatccgctcctggaaagcctctgttccaagcgccttgataaattcatccggatccttgtacggctccatatgcagcaccctggtcgcaatccctgccgtcttcagaagcggaatcgcccgcaacgccgccttcacacctgcttcatcactgtcatacgtcagaatcacctcatccgtataccgtttcaggatcgacgcatgctggctcgtcaatgccgtgccaagcgaagccaccgcattggtaaagcccgcctgatgcagggaaatgacatccatgtagccctcacagacaatcagatattttttccgtgtggtccgcgcaatatgcagaccgtataaattccggcttttatcaaacacgatcgtctccggggagttcagatatttcggcttcgcatcacccatgacgcggccgccaaagccgatcaccttcccattgacatccatgatcgggaacatcacacgattccagaatttatcatacatgccctgacgctcgttgacgctcatcagcccggactctttcatcaacgcatccgataccccctgctgcttcaggtaacggtagagttcatcgctgtactgcgatgcgtagcccagcccgaagcggcgcatcgtctcatccgagagctcccgctttttcagatactccatcgcctttgcaccctgcggtgcacgcagcaggcagtagtaatactttgccgccattttattgacctccagcaccgccgtctttaagtcccgctgctgctttgcctcctcggaatactccatttccggaagctccatccctgcccggtcagccagcgccttgaccgcttccggaaaggtgaaattctcatattccatcagaaacgtaaagacattgcctccggcaccacagccaaagcagtaatacatctgcttcgacgggctgacggaaaaggacggggacttctcattgtgaaacggacagagcccaaaataggagctccccttccgctgcagcttcacatagccggaaatgacgtccacaatgtcatttctggtacgcacttcttctatcatatcatctgaataatacatgtccgacctcctgcctccgttctgatccatggccttcgcctgtcgtttttccctctgcttctgattttacactaattcggtatgctttttccatcctttttctaaattatttcatttttcgggtttttctgacgaatccaaaagctgtttccatcagtcgtgatctgtactgctccgccgctggccgttgaaaacagtatacttccgcttttttccagccgtcggacggtctcagaagccggatgtccgtaccggtttcgtcttccgcaggaaatcacggccgccttcggctgtaccctggcaagaaacgcttctccgctgccattcgccgaaccgtgatgcccgaccttcagcacatctgcccaaagccgttctccgtccgtctctgccaggcgctgctccgccgctccctccagatctccggtaaacagcatgcggaaggatccatactgaaaaagcaatacgagcgagtcctcattccggtctccgctcagatccccggagcgcggtgacagtgcagtaaactgccagttggcactgccaaccgtcatcccctgctccatccggctgactgcaatctccttttgcccggcgagcatgctcagcttctgaaaatcctccgggtctgctgtcggcggcagaatgagatgttcaagtgtaattccatacacattttttccgctcagacccggttcatatgcctgcagaaattccagaataccgctcatgtgatccagatccgcatgggacaaaaataccgcgtctaccgtcctgatcccgtaatactttaatgtctgaccaatctgccgctcccacagctcctgctcactgctgcttcccccgtcaatgagaaacaccgcgccatccggcatgcgaagcaaagcgccatctccttgtccgacatccatgcagagtatctccatccgctgcggtgccgaccggagcaggaagaaaaaaaccagaggaatcccgagcagccagagacagcctcgccgtctcacctttttctgccgctgtaccgcaagggcgcaaaacagtgcaagtgccgcataataaacgaacagcgccaaaagcgagggccgaccgccgacccacaccgcttctggtaaatgcagcattccctgtgccagttgctccaaaaacgaaagcagataaccggccggcgcagcaaaaaacattccggctctctgtgagcacagcccgagcacggcgccgaccaatccggcctgcatgagcacaggcagcaatggcacaaccagtatattgagcagcatgctgtaaagtgacgtctgataaaagaaataaagtgtcacaggaagcatgccgatccatatcccggcggaagaaatgacggccgatgccacggtacagccccatcccctttttccggctctccgccccgcaaagggcagctgcaataccggcagcagccacaggatcaccgtaactgccgcaaaggaaagcaaaaaggacgcatcatgcaaatactccggctgctgaagcagcaaaaggatggctgctgccattgccgctgtcttgccatcgtatttcttccccagtacctgtgccagaagccacagaaaaaacatccagaacgcccttacggcagcaatcccgcttccggtcagcacgacatagagaaagagcagactgccggacaaaacagaagccggtacgattccaagcaaaagcccccgcatcagccggtatacccccatcccgatcattgtagcatgaagccccgatacacttgtgatgtgcgtgatcccgctctcctgatacagtgcttttatatccggatccattcctctcttttctccaagcgcaatagccatcatgctcccggcttccttttccggaagtatgctcgcgagtgatgcacacagtgctcttcttatccgataaaggaagggccggattccgtccggtccgctctttttcgacagaagcttcccttctgtcagctgacacacgatatccagcctgctgtaatacgtttttgcatcaaacgctccgggatttccggcctcttccggaatgcggagcgttcctcttatctcgatttcatctccgggaagcagcgcctcctcattcttttttatggtacagcccgcgccatgcgccggtacatccagtcgcagccagatcccattcttctcgactgccagtgcgcgcaatacgaccgacgtgctctcctttgtcgtactgcacgtatccacagttccgcgcatacacaggataccctccggtgccgctgcaagaagctgctccacagagttctgctgtgccgcccggcgctgacgttcccgtcccgcaagccgaagctgtgaaatcaggcatactgccaaaagcagcactgccatcggtcgtttccatcgaattatacgaagcataacggatcgtcagctctcttcccccgtataatctgcaattgagggatcgactcctacaaccgatccctgatcaatgacctgctctgtctgctgtgcggtctctttggaagccgtctgaggctctgtctcggactctgtctgtaccgtctcctcctgcgcagttcctgtctcatcatccggcagatagctgcgattcatggaaaactcctgatcgagttccacctcatcacggaagcggaccgacgcatccccttcgatttcaaactgcacgcctgtgatatcgtcgcaggtcgcacaaatagaatttacaacggcatacaatgccgcctccggcgtcaccgtactgtccgtcggcgtcctgttcgcctctgcatcaaagctgaccgtgcagacgccgtttttaatatacatattctgaatcttcacttcatcgctgaaaatcgcctgccgtcctttttcctcagatcccgcaatcaactgctcgatgatcacacgctccagtaccatattgctggaatagtgcagggcgcgcgtctcctgctccagctttttcccgctcgcatcagggaaatacagcgacagctttgcatacaggtaggaattgattccgccctccttcgtgtcaataaaggatgatgcatccatcgccggcaccggctgtccctccgcatcccgcagctgctctgacccgactgtgatcatgacctttgctacgcccggaatctgtgagaaggtctttacgatcgccgcccgcagcaatacctcatccgtattgctcaggtcatagtaagactgtgaaaaatcaatacgcagcacgtcgatgccgcgctcataaccctcaactgtcacaccactctttaaggcgctcgcctctccggacggcggctgcttcagcttatcgagcagctccgccatcagctcatcaaaggtagccgccaccggcatatacctgtcctccgtcagacgagttccttctgtattgacataatataccgtatattcattttcttcgtcggcctttttcgtgcagccgccaagcagcagcgcggcaagaagcgtcagaagaatgattcctttctttttcataaaacgccccttcctacgccgtatatttcagcggaatccgcactgtaaacgtcgtgccctctccctcgcggctgtataccttgatcgcgccatgatgcatcagcaccgcactgcgcgtgatcgcgagcccgaggcctgtgccgccgatctccctcgaatgggacttatccacacggtaaaaccgctcgaaaatatgttcctgggactcctccggaataccgataccggaatcctccaccttgacataaaaatatttgctgtccacattcagggacacatgcacccaaccctcatctttgttatacttgattccgttctccacgagattcgagagtgcaagagtcagctttgtctcatccacctcggcgatgaccggcttgaagctctccagcacgagctcgatgctgcgcttcgccgcgatcgggcgcaggcgtttcaggatcagctcgatcagctggttaatattcgtctcctgaatattgacatcagaagaacggcggtccatctttacgagcgagagcagatctgtaatgattttgttctcgcgatcgatttcctctgcgatatcgcccatgaattctttataaagctctaccggcacgttatcctgcgcaagcagtgaatctgccagcaccttcatggacgtgatcggtgtcttgagctcgtgggagacatttgagacaaattcctgcctggaatcctcctgcagcttcatacgccgcagcatgcggttgtatgcctccgagagcagctgcgtctctgtgtagtccggaatcgagatctcctgtccctcgatgacacctccacgtacctcctccagagaacgggtaatcttcccaaacggacgtgtcagaatccgcgccacataaaaggccgccgcacagatcaggacagaaagcaccagctgaagaatccacacggtccggctgatcgccgccctgccctcgctgacatcctccgtcgatacactcacaatcagaatgccctcgatctcttttgtctcctgatcacggatcggaatggtcagctccaaaaactgactgtccgcattgtaattcgaagaatctgtcccgaggaaggattcaagcacctcctctgagataatcaccttatcctcgtcgatctcgaacgtatcgcgaatgatccggaaattactgttgactacaatcagccgaccattgtaaagattcgccagctgcctcatctgcttgtctacctgcgttgactcatttccgtgtacatacccgctctgactgatctggtcgacgagctgctggcactgactctgtatcatggagcgcttctgagaaaccgtctgcgtcacgtaatttttcagaatcacatactccatcagaaaaatcggtgtcattccaaccagaataaaaatgacaaaaatacgtgcctgcagacttttaaaataacgaaacgctttttctttaatggcaaaaataataacccactccccattttgtatgtacgtattttggctcgctcggatttgcttcgatcttctcacgcagccgtcgaatatgcacatccaccgtgcgcacatcgcccggatactcatagccccacacgatattcagcagattctcacggctgtaaaccttattcggattgaatacgagaagctccagcacatcaaactcctttgcggtcaaattgacctcgcgtcctgcaatgctcactctgcgaccctcacagtccagcacaagatcgcccacttccacgatcttcccttttggctctgccgccgcctttgaagccgtccggcgcatgatcgcctttaaacgggcctttacctcgagaatattaaaaggcttggtaatgtaatcgtccgcgccgtactcgagtcccatgatcttgtccatgtcatctccttttgcggtcagcatgacgatcggaacatccgagaactcccgaacctgctggcagacctccagtccatccattttcggaagcatcagatccagcagaataatatcatacgccttctcctttgccatgcgcagtccttcctctccgtcataggcgcagtccacctccatgtcatcctgttccagactgaaccggattcccttcacaatcagcttttcatcatccactaccaaaacctttttgcccatgctctttactcctttaatctatgacaccattattttttctctgatcttctcaaacaggctggacttgatgccggaaatattctggatctcctcgatcgaacggaaccttccatgctcactgcgataggccaaaatcgcttccgcgcgtgcctcgccgatccccggcagagtcataagcagctctttggaggccgtattcaggtcgacccttccgtatgccgcatctcctcccggctcgccgcctgtcgtctgcgaagcatccgctgcaagtgcctgtacctcttcctgcgtatatacatatagccgctgcccgtcctgcaccggtgcggcctgattcagccactgggtatccgcatcttcccgaaaccctccggctgcagcgagcgcttcatacacccgcatgccatcctgcagcgcataaacgccaggcgcctgcactgccccgcacacatagacataaattacagacgaaaccccggtctgctcttctgtctgccgctcctgctccgtctctgaaaaggactcctttcgaagcccgtccatatgaatctctgttctccgggtacagccggtcagaagcaggatcatcacccccgctttcaaagcagctctccggattcgttttctgtgagatatattattccttttcttatgcattttctctgcagcttcagactgccgattcctctcatgcattcttatattgtaacggaaaattaaaagttttgcaatatttttttaccatttaaaaagaactactccgaccgccatgatcccgagtccgatcacgcgccgccacagaaacggctgcttttccacaccgaaccagcccataagctcgatcaggtaagctgccgccagctgtgcgagcacgatcagcattgccgcacgcgccgggccgagtacttc

SEQ ID NO: 1276 - DNA, 5934 bp, Unknown
  16S sequences of unknown bacteria
cctgaccgccacctccggcgacaccggcaaggccgcgctggaaggcttccacgatgtggacggcacaaggatcatcgtcttctacccggaaggcggcgtctccaaggttcagcgcgcccagatggtcacgcaggcgggcaaaaacgtctgcgtctgcgccgtccgcggcaattttgacgacgcccagactggcgtcaagaacgcctttgccgcctgcgaggacccggccctgctggccggaaagggcgtgcgcctctcctcggccaattccatcaacatcggccgcctggcgccgcaggttgtctactattttaaggcatatgccgatcttgtcaaggccggtcggatccaggctggcgacaaagtggattttgtcgtcccgacgggcaacttcggcgatattctggcaggctactttgccaagtacatgggcctgccggtcggcaccctcgtctgcgcgtccaacgccaacgacgttttgaccgacttcatccacaccggctgctatgaccgccgccgtccgttccacaaaacggtctccccgtccatggatattcttgtctccagcaatctggagcggcttttgttcctgctttccggctgcgacgcaagccttgtcgcttcttatatgaagcagctcaaagaggacgggcactatcagatcagcgacgcaatgctgcgccagctgcaaagtgaattctgggccggctgctgcgatgataccgggaccgcccaagccatccgggacgtctggcagcagcaccactatctgtgcgatacgcataccgccgtcgcctggaacgtggcccagcagtataaaaaggccatgcagccgaaaaacccggtcgtcatcctctcgacggcttcgccgtataaattcccggtggccgtcctcggcgccatcggcggcgatacccaaggcgatgaatttgacatcatggaccgcctgcacgccatgaccggcgtccccatcccggcaaatcttgccagcctgcgggacaaagccgctctgcaccaggatgtcatcgacaaagacgcgatcctctcctatgtcctgcaaaaggtctcggagaaaacttggcattaaacaggaggcgcaaggttgaaatatattcttttgatcggcgacggcatggccgataaccccgtccccgagttgggcggaaaaacgcccctacaggcggcagacaagccgtttttagacagcctttgtgaaaaatccctgctgggcagcgtcagcaatgttcccacccagctgccgccggggagcgacacggcgatcctctccatcttcggctgcgaccccaaccggtacttcaccggccgcagcccgctggaggccgcaggctgcggcttcaccgtcgcgccaggcgagatcagctaccgctgcaatatggtcgccctgtccgacggggagatgccctggggcgaacgcaagatcctctcccacaacgccgggaacatcgacggcgagagctccatcgccctcatcacctggctgctggcagacccagaatttaaggcgggctgcaatgccatcggtctgcgcatcgagccgacggattccttccggcacatcgccgtgcagcacggcggctccacagcgggcatgctggctgcgccgccccatgaccacttgggtgaacccatcggccctctggtcatgcacggcagcaaaaatgccgacgctctgcgagcgctgatgcagctggccacccaaaagctggatcaccaccccatcaacgagcagcgtcgtgcagacggcaagctcccggccaatggcatctggttctgggccgagggcaccgctgtacagctgccagactttgccgcctgcaacgggcacaccggctctgtcatcagcgctgtcccgctggtccacggcatcgcggcgctgtgcggcctcaagccggtccatgtccccggcgccaccggtgagattgacacgaactacgccgggaaagtcgccgcagccattgcctgcctgcaatcggaggacgatttcctggccatccacatcgaggcgccggacgaagccacccacaatggccgcctggaccataagctcctggccattcaccagctggacgagctggtgaccaagcctgtcgtcacctggctgcgggaaaacaaggtagacttccgcctgctggtcctctcagaccacaagacgctgatgcgcacccggggccacgatggcgacccggtccccttcttcctctacgacagcaccgccgagcgcccctgcggcctggcttatacggaggagaacggcaaggccggcccgtacctccccgcaggcaccgccctgatggacctgctcttcggcaaagaataacacctgttcaaaacgtgcgatgcccagccccatgctgcatcgcacgtttttgagactgcccggtcccccggcaaaataagaaaggagtccctccccatggaattttggaaaatgaacggcgcaggcaatgattttatcgtcatcgacaaccgccccctgcactacagccagcagcagctggcggacctcccccgaaccgtctgccaccggcacctgtccatcggcgctgacggcctgatggccgtggacacgccccaggcaggcggcgattaccggatgctgttttttaactctgacggctccgtcggcgagatgtgcggcaatggcgcccgctgcatctgccgctacggctttgaaaccggcctggccggtgagacccagcgggtcgagacaacggcaggcctcgtcactggccagcggatcgaccggcagcaataccgcatccgcctgaacgacccgacgaccctgacaatggatttccccctgcaggcatgcgggaaggaataccgcatggcctacgtcgagctgggcgacccgggactaccccacgccgtcgtcgaaatgcccggcctgcaggcactgtcctttgacgagctgcgcccactgggcaaggccctgcgcagtcacccagccttccccaagggcgcgaacgtgaatttctatgacctggttggcccggaccatctggtggaaaaaacctttgagcgcggcgtggaggacttcacctacgcctgcgggaccggcaccggcagcgtcgtcacaattctgaccctccagggcgcggtcagcggcaagcgtgtccgggtcgatgtccccggcggcacactgtacgtggatatcgaccgccaggacttcgccatccgcaacctttatctgaccggtccgacgaacatcatctgtcaaggcaagatcaccgacgaaacgctctcgctctaatgcagcgttctgcacagcttttcatcctgttttgcatattttttcgtcatataacgcattgttttgacatttgttgatcataatttacaattatgtcgattcttgtcgacaaatttatgtgctttttcaccttcactctattgaaaatcaaaaaattatgtggtagattaaacttaccgaagtgaataagagagagattctacggaaaatcaaaattctagtttcaggagtggagaaccaagatgggaaaacagatgagtgttttgatcgcagatagcagtgaagagttttgcgcgcagctaaaagacaaattgcaggccctggggtatgccgtcatgcccaccgccgcggacgggcagcaggccgtgacctgcatggagtcccagcggcctgacattatcgttttagatttgatgctgccaaagcttgacgggatcgccgtcctcaaggcggctgccaagctccagccccgtccggcgtgtctggtcatgtcggcctttgtgacagactatgtcgccgccaccgtctcaaatctgggtgcccgctattttatgctcaagccctgcgacctgcaggccatagcggaccgcatcaacgagatccgagacagcagcgaggaaacaaggcctaccgtcgctgccagacagcgagccagtgatgtgaacattgagaccatggtcacctcgatcatccatgagatcggcgtccccgcccatatcaagggctaccagtatctgcgggaggcgatcatcatcgccgtcaatgatatggacgtcatcaatgccatcacaaaggtcctctatccccaggtggcaaagacattccagacgacaccctctcgggtcgagcgtgccatccgtcacgccattgaggtagcctgggaccggggcgatctcgaaaccctgcagcgtttcttcggttacacagtctccaacacaaagggtaagcccacaaattctgaattcattgccctgatcgccgaccgtctgcagctgaaattaaaaagcagagagcacgcccagaatttctgacggcacggccacgcataaggtgcatccccgaaaagcgcatccatgcaaacagcacccgcacaagccacaacttcacaagcaactgcaatcaaacgaacaagcctgattgtcggcccaaacgggtccgatcaatcaggtttgtttgcatttttgtggtatgtttactatttttccgtctgctattgtatgccacgtacacagacttgcaacacctattcttccggaatcgagacaagcgaatcaatcgtaacgccaaggatctttgcaatcgcccacagttccctatcggtcgcgatccgcatttgcccttcaagcttggaaagactggatggattaatatcgaccccaagaagctgcattctttgtaccaatgtgatttgcttcattcccttctccttacgaagcctttccacattttctccgcaaatatttttgtccccatatggatgcgctctaggcttcacagaatcaccgccaatatcattcctttttagaattatattgtgcaagcctcttgacttaattccgaattagaattataattagaatacattgaaattctgctgatttataagaaacgcctgctgccaattttcacgagatgttctatccgcagcaggaatcgttaacgtatgacatacgtttccaagccttctacaacacgaacagaggaggagataacgacgaaaagaggtcagacaaatccacatagaagaacaaggaaaggaaaaataaaaatgaagaaaaacgcactatatggaatcgcgctcattctttgtcttgttttaactgcatgtgcgtgtaagcatgaatggaaaaatgcaacatgtaccaagcccaaaacctgtacaaagtgcaacgagacagagggtgaaccgctcgggcacgcgtggattgatgccacttgcaccgaagcgaagacttgtagtagatgcggtctgaccgaaggtgagcccttaggccaccaggtatcggaatgggctgtcacaacagaaccgacttgtacaaccaaaggagcgcgcaccggctcctgcgagatatgccatgaaagcgtcacagaagcaattgacattattgcacataccccgggcgactggagcgtgaccaccgaaccgacagaagacaagccgggagagaaaacgcagtattgtactgtttgcggtgctgtcatagcaacagaagcgtacgaactttctgcagaggaaattgaacagcagtttaaagacaagtgtactgtctactcctatgagacaattgcccgtgacccagaaagctacaatggtacttacggctgctataccggcaaagtcattcaagcaatggaaagcacgctatacgggttaaagacgtataccctccggattaatattactaagactagttacagctataccgataccatctatgtaacctataccgcctccaccgatgcgtcacgtattctggaagacgatatcgttacaatttggggcatcaacaaaggcacaacatcttatgaaactgtccttggggccacagtgacacttccaatggtccaagcaaaatatctggaaatcaattgacagaaaaaacaaccatataaacatagcaagagtgcacccagcggcggagcaacgctccgccgctggg

SEQ ID NO: 1277 - DNA, 3380 bp, Unknown
  16S sequences of unknown bacteria
cgggataacaaacttttcgggaagggtgtcgagatattttttgtgtttcttctcccaaagttcaaccttttcgggcggcatttccgcccccactcccctgcagcacttcatacgcccgttccacgactctcttgtaaaggtcaaatcgaccctgtatgtctcattggaaacgaccgaaaaaagcccttcggcagccgacgaaaccgggtaaacgacatcggtatgctccgagcccgcccacgaaggattgtactttttgatgaggtcgattgatgttcttacaatgtcgctttcaaagtaaagccattccataaaaagaatcaaaaatcttcccttttgttttaacaacgaatgaattttaggaaaaagaatttcatggtcaaaataatagaggcactgacaagccgttacaacatcaaaactttgctcgggaagttcaagcctttcggcgggacaaacgatatatcggatgtcaagccctgcgtcgcgagacagcttttcggcatatttaatctgattttccgaaatatcgacaccgacaaattcacctccgtattttgccatgtggcgaggtataacgcctgttcccgttccgatgtcaagaattttttgtccttttacgcaaagaccctttgaaagaattctgtcataaaattccgtcggataaatatctcggtagcgggcataatctctgctcgcctttccccaatcgaattcttttcctccgtcgattgtcggattgttcattcgctcactccctttatgttattttaacatatttttatcttaaaatcaagtatttctatgcaaaaaagagaacggcttgtaaccaaaaccgctctcttgttttttataaaattattttacctcgacgataccatcctgcttaagggtgatttccattccgtccttgacataatcgagaaattcgctgccgaggctgtcaacaaccggaagaggagacccttcaagccatacatcggacagcacggcacccgccgcagcaagggaatctatcggctcggaaaacaacatacaagccggctgacggcccatcgagcaggcacaataaagcacaaggccgcctgtggtcgagccgatggtcatgggcagacaaagagcctttccgaccatttgctttccgtataaatcgggattgttctgatctccgcaggtggcgtttttatctccgaactggagcgccttttgaaaggatgcaagcgtattgagtccgccgtgggaaacgagagccggagcagtaacatttccgggcgcaacaactctgcccttaaaagttttcatatcagtttcctccctttgtgatctgaacgacaatttcgtcgtcggtgtaatatcttgcgctggtgtatgtgcgcagcttgttgcttgaggttataacgggtatcttggtgctcagaggattgttcatatacataagcgggcaaatatagctggttataacacccgtggctttaagacgagccgcatattcggtcttttcaaattccttaagcactcccggagcggcggtaaagacggtgggcacgacaacctttttattgccgtactttttaagtccttcctccaccctcttcgtccatgtaacaagctggttaaggctcatgtgaggacatcccataaagcagagcttgggcttggcgtctttgtttttccaaataaccggatagctgtcatacactcttttaagctcggcgtcatcaataacataaacctttgcgtcgggtttaatgagcttttcgccctgttcaactgcctccggcgtaatattttccacatgataaagcccgacggcgccgtttgacgcggttgccgcaccgaaatccttaagatatgttttggcgtcctcgtcaagggatttgagccatttgtcaagacctttgatatatggtacgtcctccatgaccttcatgccgattgccgaaccgagaagctgagcctcgggctttttcgacgttttgatttccacgatccaatcggccttgcgcccctcgtccttaagcagaccgaaatcgggaacatatcccacaaccgagcccataaggtcgataatacccgagttgcggttgcatcttgcaccgagcaccgaatttgcgtaaacaacagccgaggattccgaccaggagagaatgtcacccatttttggagtgttgcccacctcgtccatataacaggtgcaggtaaaggcgtcgtcgttcaaaagaccgagctttttaagctgtccttcataaaaatcctgctttgtatacatgaatttgttgaaaacgagattttggataaagtttgagggaacgtttttatcaagaggctttgggtcaaccgaaaacttttgacttgaaaccgctcccgcctcgatcagctgatccataagcgaataaacaggtgcaagagccttaaggccgaaagaggtaacaagatgattgtatttgctcgtaaccttgaccatacggtcggctccgaaaagctcaccgtatctcacaagggtttccatgacctttgccatggtttgccccttttcgcccgaaagcacctgcttttgttcgtcggtcagattcattttatattccattttaatccgcctttctatattttcatggccgcttcataagccgaccacacaaccgagcgaagatttcccacgctcttacagtcgcctatgagcattgcttttccgccttttgtctcaaggggcgcgggaacatatcccgcacagcttatgaccgaatcgcactcaatttcgattttctttccgtttttgtcggcacatattatttttccgtccgtcacctctttgagtgaggtttcaagatatgtcgggactttattaagcgcaaaccattctctcaaatatgaggagtttgcgagacatacgccggtctgacttacgagatcgtccttcatttctacgataatcggcgttttgcccatgagagcaagctcatatgcgatttccgagccggtcagtcccccgcctataacggcaactctttcgccgacctgctttccgagaagaaagtcgcaggcctcaatcattttttcatgtcccgggacatttttaagaactctcgcgacggcaccggtagcaatgataacaggctcgtttccgaataaggaaatgtcccgaacctcgtcattgaaccgcacttcaacattcagctttttcatctgacgctcataccacttgagcagatcacgaagcttacccttgtaggactcggcaccggcagcaataaacgcaccgccaagcctgtcgctcttttcgtgaataatcggcttgtgaccgcggagcacaagcactcttgcggcttccataccccctattccgccgccgacaatgtgaacggttttaggattttgtgtct

SEQ ID NO: 1278 - DNA, 3158 bp, Unknown
  16S sequences of unknown bacteria
aacgggcaggatgaaacactccggaaagaaggcatttacgtgactgcatccgagacaaaggaaggaaagctgattctgaaagcggttaatactacagatgatgcattcctgcttccggttgaaggtgcagatggacagccggtggccggtgctgcgaagatatgggtgctggagacggcaggcgagaagccggcagaaaagccggagccttcgaaggttgctgagtgtgcgctggagcttaatggcagcatccggctggcaccgaagagctttaccgtattagaagtgtagcattaaagcgcgcattctgcggagcatttttgctttacaggacgcaatttccaaaaaataaaacgggccggaactgctgtgcagctccggcctgaagctttatggcattacatttttcctaatgtatcataaatatcgtaaatcagcttctccgacttctcccatccaaggcacggatcagtgatggactgaccgtagacgtggttgccggtgccgatcttctgcgcgccatcctcaatgtagctttcaatcatgaagcctttgatgagcttgcgaagctcagtgttgtagctcatgctgtgcagcacttcctttgcaatgcggatctgttcgatgtattgtttgccggagttcgaatggtttgtatcgatgattgccgccgggtttgcgaggccacgcttgccatagagctcgttgagcagcatcagatcctcgtaatggtagttcggaatcgaatcgccatgcttgtttgtcgcaccgcgcagtacgacatgtgcgagatcgtttccgtcggtgtagacttcccagccgcggtagatgaagttgtgcttgctctgcgctgctttgacggaattgaacatgacggagagatcgccgctggtcgggttcttcataccggccggtacggtcatgccgctgacggtcatgcggtgatgctggtcctcaacggaacgtgcgccaatcgcgacgtaggaaagcagatcgtcgacatagcgatagttttccggataaagcatctcatcggcgcaggtcaggccggtctgctcgatggcgtccgcatggagctttcgcatcgcgacgatgcctgcgaatacatccggcttcttttccggatccggctgatggacgagacctttgtagccctctccggtcgtgcgcggcttgtttgtataaatacgcgggatcagaaggatccggtcgccgatcttgtcctgtatcttcgcaaggcggtggatgtaatcgagtaccgagtcgacattgtctgccgagcaggggccgatgatcagaataaatttatccgatgcgccggtaaagacgtcgcggatttccgcgtcacgttttttcttgatttctacgacccggtcagagagcgggtacatttttttcacttccgcaggaatcggaagcttttttacaaaattcatagccattgtacggtacctctttagcgttaagattttactactgtgaatcattatagtctaattcatttcaaatgtcgaccaaaattttggttttatttttttcaggtgtgtgttatatttaaatactagtgtaccgatctgctgaaaatcaacaggtcggcacatttatcatttttcaaacatgcgtcaggaatggggcatgcgacgggcttcatttacagacgaaatgacagagaggcaacagaatgaaaagcagtgaaaaaaagtactttccaatgtttgtggatcttaccgataaaaaagtagtggtggcaggagccgggacgattgcgaagcgcaggatccgggccatgttggagtttacagagcacctgactgtgattgcaccggaggtgaacccggagctgcgcacgcttgaagagcaggggaaactgacggtccttcgaaaggcttatgagagagaggatctgtatgacgcggcacttgtgatcgcggcgacgaatgacaaaaagacaaatgaagacatctatgcggcatgcaaatgcctcggaataccggtgaatgtctgtaacgaccgtgacaagtgcgatttttattttccgggtattgcgacctgtgggaataccgtgatcggtgtaagcacaaacgggcgggaaaaaaggcgtcagcaggcgctggcaaagcagatcgagcaggtgctttggcaggagacgaagccagaagaaacatctgtcagtgaatgaccaaaaaatggagggcatatgcttgtaaaaatttttacagacggggcagcacgcggcaatccggagggaccgggaggttacggtacgattctgcagtatacggatcgaaccggcacacttcatgagcgggaatatgcgcagggctacgtaaagacaacgaacaaccgtatggagctgatggctgcaatcgtcggactcgaagcgcttacccggccgtgtgaggtagaactctattccgattcccagtatctggtgcacgcttttacacagcactggatcgacggctggatcaaaaaaggatggaagcgcggaggaaatgaaccggtaaaaaatgtggatctctggaaacggctgcttgcggctgcacagccacaccggattcagtttatctgggtgaagggacacgacggacatccggagaatgagcgatgcgaccgccttgcgaccggtgcggcggacggagacgatctgatagaggattcgatcaatattttggcttgaaaacccggattggctgtgctatgatgaaagacaggctggcagcaaaagggctgccaagcatgcagtatttccggacgcagacttgcatatagaaaggaatggacgaaatggcagcagcattttttagtgagtttttagtagaactgatcaaactggttgtccttggagtagtcgccgtggcagcaattttctgtggaaagaagctgcgtgaccgcaaggacgcaaaataagttacttttggaggaatgattgtggaaaaatatggagtaaatgagttacgaaagatgtttctcgacttctttaagagcaaggatcatctggttatgaacagcttttctcttgtaccgcacaatgacaacagccttctgctgatcaatgcgggcatggcgccgctgaagccgtactttacgggcgcggagatcccgccgaagcgcagagtcgctacctgtcagaagtgtatccgtaccggagatatcga

SEQ ID NO: 1279 - DNA, 7046 bp, Unknown
  16S sequences of unknown bacteria
catttgagcagctcagtcgcgcgatttagcataagccttagtagtggcattagcatgttcgcgcgggagagtgagacgcggtgaatgcagcttaaatctgtatttcttcatcgcgcatggtcgagaatacctaatcaaactgaattggattaggctaaccgcggatgggcgttagaaattgcgttgaagttgagcgaacttgtgatttcgttttacttccgtagaaagactgacgaacgatttataaatttcagcccaacatacagacgcggtcattctaatgccactactaaggcttatgcttcatcgcgccccaaaactcaccgcgcgcacattttatgctccactactacatcttacgcataaccgcgcgactaatcggttgaaatgtgcggagacggcagttaatcatatcagcctaactccaccgtgaagccggtactcgcagagggatggcgtctgaatccctctgtgcgccctccgcgtaggagcgtcccctcaccgcagtgagatttaattaatctgaaagggcgaagctctttcttccttcttccctcacttgaagttaaagtgagcctaaaatttctgcggaatctttcaaaaagattaagttttccataaatttacccatttttccttgacatttcagcgaaaatatcgtacaattatctcaaatacttcccctcatgggaaatgcacgaagctcgacgcctgtagaccgtttgtttcacgtgaaacattagcataacataacacaaatacaaaatttgcgaattttaaaggagaaccaccatgataaaagttggcgttatcggatgcggtactatcgctaattccgcgcatattccgtcctatatgaattgccccgacgcggagattaaatatttctgcgacatcattcccgaaagagctcaggctgccgtcgaaaaatacggctgcggcattgctgttgaggattaccataccgtcctcgccgatcccgaaattaccgccgtttccgtctgcacaccgaacagaatgcaccccatcatctctatcgacgcgctgagagcaggcaaacacgtcctctgtgaaaagcccgccgcaagaacctacgcggaagctctcaccatgcagcaggctcagcacgaaacgggtcttacgctcaacatcggcgttgtaaaccgcttcaacactgccgtaaacgaaataaaaaagctcatcgacgcgggtgagcttggcgaggtttaccacatttacgtttcgttccgcgcacaccgttccatccccggtctcggcggagctttcaccacaaaggaaatcgcaggcggcggcgcgctcatcgactggggcgttcactacctcgacatcgtaatgtactgcatgggagatcccgctcctctgaccgtctccggcaaggcattctctaagctcggcgtggacatgaagaactacgtctacgagagtatgtgggcggaaaacacgaagaatctcgacggaacatacgacgttgacgactccgttacggctttcgttcgcacagaaggtcctacgattacattaaacggcgcgtgggcgcagaacatcggtccgagcgagacttacatcgacttcctcggtacaaaagcaggaattcgtctccagtacggcggagatttcacggtttacggcacaaaggacggcaagctcatcgaatacaagccggaatacgagtccactcccatgttccagaacgagattaacgctttcgtccgctgtgttcagacaggtgagaagctcccgagccacatcgacaaaaacatactcacttccaagctgatgcagggtatctacgactccagcgaccgcggcgaagaagttaaattttaattcaaggtgataaaataatgcagcatacagtaagaactaacatttacgacgtcaatgtagtgttcaaaaagaaagaaattacgcgcgatgggtatacgctcaaataccgtctctacatcccgacgaactacgactgcggcgagaaatatccgctgatggtattcctccacggcgcgggagaaagaggagacgacaacgaagctcagctgaaaaacggacttcagctcatgttcaacgacatcacgtctccggtatacgacagcgtgatcatagttccgcagtgtcccgagggcgagcagtgggtcaacgcggcgtgggcggactacacgtattccgtagcggcaactcccgaatcccgcgcgcttgagatggtatgcgccgccattgacgaggttcgcgacttctgcaacatcgacgacgacaggatctacataacgggcttatcaatgggcggcttcggcacatgggatatgctgtcgcgtcacggctcgaaatttgctgcgggaatgcccatctgcggcggtggagacgtacgctatgcaagacttctgaagcggataccgatacggacgttccacggctctgcggacgatgctgttccggtgagagcgacgagggcaatgtacgcggctatcaagcgtgagggcggagagaacatcaactacacggaattcgagggctgcggacacaatgtctgggacatggtttactcgaaccgcgaaaacatagactggctctactcgcagaaccgcaaagacaggcgcgaggcagcggaaagacgtgcgaagatgcagaaatacgcgacctacggcggcataggaatactggcggcagcggcggtggttcttctttctggaaagaagaagagaaagaagtaagtttaggctaaacttaaaataaagctggatttcgatgagggttgtacctcgacaaaatccagcttttgttattttgtagaaaagactccgtcttttgaattttaattaaatcacctgcgggtgaaggtcgctcctacgcggagggcgcacaaggagactcagacgccgtctccttgtgaatctacgctcgcggtggagtttggtttagcaataaacttcatcaacgcccacttgaacagatcagtcgcgcgggtttgcataagccttagtagtggcattagaatgttcgcgcggtggagtttgacgcggggagtttcgttaaaatcggtatttctttatcgcgcggagtgttgaataccaaatcaagctgaattggattaggctaaccgcggattatcgggagtttgtgcgttgacggagagaaaacttgtgatttcgttttgcttccgtcagcgattgcaaaaacgtcttatcaaatttagaccaaataaacagacgcggtcattctaatgccactactaaggcttatgcgtaatcgcgccccaaaactcaccgcgcgaacattttatgctccactactacggattacgcaaaaccgcgcgactaatcggcagaagtgtgcggggacggaagtaaaccatatcagccaaactccaccgtgaagccggtactcgcagaggggtggcgtttgaacccctctgtgcgccctccgcgtaggagcgtcccctcaccgcagtgagatataatcaatctgaaagggcgaagctctttcttctatcttctcacttgaatcttaagtgaaacttacaaaggggaagtctcttagaagacccacgtcgtctaaggaaaagaaaattgctgcgctctttcttagcttgccttcttcggaagaaggatcgatatcagcacgccttcttctacctcctttcgggtggattcgacgggaatgcctgattttttgattacgtcgaccgcgtggtctatcgaattgtagaatagccttatgtcgcgtatcaccagcttcctcttctgctcgcttccctttggcttgctctctctctccgctaacctcgatttcgcgcagattatgtcctctatgtattcctccgtccggctcacgttcatctcgcgcttgattattatcgacagcacctcctcgcgctcttccttgtcttcaagtcggagcagtgctctcgcgtgcctttccgtcagtccgttttcctctatcttctcctgctcgccatcgctcagccgcagcagcctcagcttgttcgctacatatgactggctgacggagagctttttcgcgcacgcttcctgcgtcattcccgtgagtgagatgagcgactgtatcgacgcggcttcctcgaacatcgacaggtcttccctatgcaggttctcgattatcgcaagaatggcagcgtccacttctcccgcctcgacagatactacgggaacggtggttagtcctgccatctccgccgctctcagccttctttcccctgccacaagtgtaaattccgcttctccgcctattccgagaactcttctcacgatgagcggctcgatgacgccgtgctcccttatgctctcggcaagcgcggcaaggctctcgtcacatcttatcctgcgaaaccgtccgtcgggaactctaatctcgcttatctccacctcgcgcaccacacggcttatctctttgatttttccccagaacatactttactatccttccttttcttttccgatttatttccgttttgtttcggtgactgtattatatcacatcggaaacaaaatacttgtcgcactcggcggcggagttttgggtatgtttcgggcaaaacggaaaaaatcccccgcatcggtttgatgaaagggatttttaactgtgtcggtcggggaatgcgatatgatgattgcctaggctatttcagcggctgttttgttatctcggcgtatctccgcggatattttcttggggtctcggctgttttttcgtagatgagcacaactctcgcgtcgccgccgggcagtgtgtagcttatcttgtcacgcagtgtcagaccgagcgtctcgtgtgcgtttcctgccgccagaatctcctcgtccgcatgggatttcagagcgcagaagtaccctcccaccttcgtcagcggtgcgcaaagctcgagaagcgtcggcagtgctgcaactgctcttgcggttgttatatcgaatctttcacggaaatacggctttttctcttccgttttcggctgatttttcggtttttttgcgctcttcttcggtgcgggagaatcgggataagcggtcagctcctcggctcttgcggcggttgcgtcaatgttcgtgaggtcggcgtactctgcggtctccttgatatgccctatctttttcgcagtggagtctattcccatgaagaaaagcgggaaataatcaaggctcgcggcggacatgggcaatgtggggaaaccggctccgcagcctacatcggcgacagttttccgtgctatttttgacacgattccctgcttttccataatcgcgaggggcaggacggagtcgacgatgtgcttgcggactatttcttccggctcgaggatggatgtgaggttgaattttttcgcgttctcgacgagcttttccgttatcttgtacattctcgtgagaacttcgtccgaggtaacgtgcgcgtacagctccggcgtgaagtacgtctcggattccgcaaaagccgcgcggcaaatgctaaagaattgttcagacattcatctgctcctctacgatcggcgtatgggcaaggttcacgaggaaagagcacatatcgcgtgtggaattcggcttggctatctcggagatggagcgtttcatcgtctcgattctggtgtcggacatgagaagctgataaatgcattcgtcgagcgggcaggtctttgtcgcggacattgcgcatcccgtattcatgaggaactgcgtgttgcgctcctcctgtccgggaatagggtttatgattatcatcggcagtccctttacgaggctttcgcttgtggtaagtccgccgggttttgtgataatgcagtcggaggcgtccattattgtgtagatgtagttgacgaatcccgtgacgaatatcttatgtctcgattccgcggcgattttgtcgacttcggctttggcttcggcattgtttccgcagacgcagatgagctggaaatctcgctccatgtcgaccatatctatttttttgacgttctccgcgatgttgccgtagcccattgagccgcccatgagcaggaatgtggacaggtttttgttcagtccgagcttttcccgcgcttcttccttggtgagcttctccgagaacgacggctttatcgggattccgagggggagaatctgctcagtcttaaaacccttgcggattccctgaatgttcaggagcttgtcgggggtgacaacgtaatcgttatgcgtgcagtcctcccagtacgggtggaacgtgaaatcggtgaggatgcccacggtgcggttttttatcattttcttcgttttcatctcgtcgaggaggattcccgcgaaaggatgggtgaagactacagcgtcgtatgcatcggaatttataaaccttgcgagctcgtccgacatggcatatttgaagagattcaggcttttttcgttcggttttctcttctccgcgagggagtagccgactttatacgcgtattttgccttttcggtgacaaggagatatccttcggagatgattttcgcaagctccggcgagacgtaatcgaacgtatctacgatggagcaatagctatcgagggattcaagctccgttttgagggctttagcagtcgagttatgaccttcccccgcggttacggagagtatcagaaaattcatactttagctttcctgcctttctttttgttttccatggacagcccgattttgccgagcttttttcctatattaaaatattcgccgtgggagtagacgagaagacctgcgcgctcgaggtggagtttgcctgtgttatcgagcaggtcctcatcgagggagacggagacgatatccgccataaaaacgtcatgcgagccggatttgaccttatcgaagaccttacactcgagcgccatggggcagttttcgatggtaggcgcgctgactttttcggatgggattagtgtaagtccggtttttgcggctttatcgaccttttttccggtgactgtgccgcaatagtcaacgacttcgacaagggacgcgggggtaaggttgacgacgaactcgccggttgagtctattatgccgtag

SEQ ID NO: 1280 - DNA, 5956 bp, Unknown
  16S sequences of unknown bacteria
cgcggcagccgggggccgtgggcgccgcggggcgggccgggggagacggattctgccgtgggacgggccgagggagacatggccaggcggccgcggttccccctcgccgccctccatgccggccgcggggcgaaacgacccgagggggacattccccgagttcgcccgtgtcgccctcgctggctctcgcgccagacgcggcgcgagaggtgccaagggatacgggccctagcccgcgcctgtctcccttgcgggcttccgcgccaggcgtggcacgaaacgggccgagggagagcgggagcgtctcctccgcgccctcctgcggcggccggatgcggcggatgccacgggatggcccgagggggacggattctggcatgaaacggtccgagggcgacggattcgggcctcgaagcgtctcccttgctgcctcccgtggcacctgggggccagcccccaatcacataaccttcgtcttggagagctgctcgtgcgagaagttgttgaacttgataatcggctttctgatgaccaggcccagcagcagcgagaacgtgccgagcgacaccacgataaacgccagactctgcacgagctccatgccgtagattcccgccacgcacgcctgcagcgccttcatgccatacacgaacggcaaaaacgggtagagcacctcgtagatgccgccggacatctcgatggggaaaattccgcccgatcccgctacctgcacgacgagcaagataaccgacagcgccttgccaacgtttccgaacgagaccgtgagcgtgtagacgaagaacgcgaagacctgcccgatcacgaccccgctcagcacgaacagcaccgggtgcacgcactggacctgcaggaaaaacacatcgcccaggcacacgaaaaggctttgcccaaacgagagcagcgagaagatgccgtagcgcccgaaatactcctcagatggcttgatgcccggatacatttcccgtcgcccctgcccgaggttgacctgcagcatcgcgacgaggatgaccgcgccaacccacagcgacagcagcgtatagaacggaatcatcatcgagccattgttcgcgatgggatagaccgcgttgcgctcgatcttgaccggcgcggacagatacgtcgacaaactcgacgcatcgtcgccgatgatctttttgaccgtctcgatatcgcccgacgccaatgccttgtccaagtcgtccttcgcctgcttgagatcggataccgcgccgtcgagttgtgatgccgtctcgttcaaggtgccctgcgcggcgacgagcgagttgccgagcgagtccgtcgcggtcgtcaggctggcaaccgtcgcgtcaatcttgcctgcgaggtccgtcgaataccccgacacctggtcgagcgaggccgacagctcctcgatggcgcctttcacatccgactcgtactgcgactgcagcgtcgtgatctcggagcgcgcctgctcgatgagctgcctggtctcgtcgcgcttggcatcgctttctccagatgcctggtcgatggcgtccgcatactcgacaagactcgcggaaagctgccgctgcgtctcggcagacgagcgcatctgcgagatgacgccatcgaggcgtccatcggtattgacggtctggagcgtgtccgccatctggtcgtacgcctgcgcagaatcgctcacgtcgccggaaagctgccgcaggtccttcgaggagaggtccgcgatatcgccgacggcgtcgtaggcggcatccgcatgctgcgagatggaatcgaacgactgcgcgctcttgtcgatggcctcgttgaccgcctgcgtcagcccatcgagcgacttggagctctcgtcgagatcctgccgcgccgagtcggtcgccttcgagacggcatcggaggccgatccggaatcggacagcatcttttccgacgaggccacgagcgagttcgtggaagacacgagcgaggaaatcgagcggatctgcccgctcacgttgcccacatcggaaatcgcgttcgcgagcgacgagtcgagccgcgtggtatagttcttgaagctgtcgctgtccacatactgcgacaggtcggacatcgtgttgagggcaatctcggtcacggtcgaggtgaactgcttgcgaatctcttcctggatctggtttgcccccgcatcggtcaggcgcggcgcgatggggttcgccttctcgttcatgtagtagatgatgtcggaatgcgtcacgtcgtccgagaacaccgacatcatgtcgcggctgaacgagctgggaatgacgatggcggcatagtactcgcccgacttcacgccctcgatcgcgtcgtcttcgtcgacgaacttccagtcgaacgacttgttggcgcgcagcgacgagacgaccgcctcgcctgccttgacgcgaattggcacgaggtcgccccggtagccctcgtcgctgttggcgacggccaccttgaggccctgggtgttgccgtacggatcccagctcgcgaggtcgttgaaccacgcgtacatggcgggcacgagcacgagcccgacgagcacgatgacgccgatgatattgcggacgccgagctgaacgtcgtcgcggaatacgcgcaagatgtttctcacgagcgccctcccctctcatcggcaccttcgtcagatggcgtgcccggggcgtcatcggccgcgtggcctcgccgcgccgcatcgtcgagctcgtcttctgacatggccttggccgcaagctcgtcgaggctgatgcgccacgaacgccaggagcgcatgttctcgcgcgtcttctcggcatggttggccgagaaatcgcggtggtcgatgggcacgtggtccatcatgtcgttgacgagctcgtcgcctttgagcgcgctcatgcgcagctggttttcgaagttgtcgcgcatgaactcggtgaagatcataagaccgtcgatgacgacgaccgtgagcacgaacaccacgagcaggatgatcttcgcgttttgatgcgtgtggaacagcgacgaggcgacgatgacgagcaacggcagcaagaacacgaggaactgcccggcgccgacaaggcgcgggtacatgcggttgaagccgaccatgcgcttgatgagcaggtcgtggtagtgctcgttggcgagcagtgccttgacgacattgcgcacgcggtaacgcgggcgcgtccttccctggttttccgtgatcatgaacgtcgtgcgctcgaggcggttgtcgaacagcgcgttgaggttgagcagatagggcctcagcagcaggccgagtgcaagcgcgacgagggcgaacacgacgaggatgccgagattttccacatagacgccgtcgtacatgccgcccaccgcctcgcgcatcgcgttgatgccgtacgtgaacggcagaagcgggtgcacgccttggaaaaacggcggcatgacctcgatgggatacatgcccgacgagccggggatctgcatgatcagcaagatgacggcgagagccttgccgatgtgcctgaacagcatggccaggcagaacacgatgttgacgaacgtgaagctcgtgaacaggccggcgagcacgaacagcccggggttctcgacgcccatgccgagcgcgacgcacccgacgcagatgatgagcgcctggatggcggacatgatcgcgaacagcagccagcgcccgaagtactcctgcgtcgccgtcatgttctcgaagccctctttgtccacctcgagcttgaagatggcgatcagcatgaagcagccgatccagatggcgaggttgcagtagaacggggcgacggccgcgccgtagtgctcaagcgggtagagcttctccgtcgtgagcgtgaccggcgacttcatgaaatcgccgacgcgcgtgggctcgaggcccagcaccgaagaaagcccctcgagctccgctgactggatgatgccgtggaggtccgtgatggtcgaatccacgtgatcgcgcgtgcccttgatggacgtgctggcgtccgtgagcgagccttgcgcctgcttgagcgtgctgtcgacgttggacagcagatcttgcagctgtttgatcttgggagtgagggtctgcgtcgcagaagacagcgaggaaagcgaccccgcgaggctgtctgccgtgctcgagataccgggctgaatctgggtggtgtaggccgtgccggcatcctgcacgttcttcgtgccctgctgcacgtcgtcgttgaggtcgtcgatcgcctgcgatgcctcgcctgtcgccttcgcgatgtccgagctcacctgcgtaagcgagctcgccgtgttgcgcagattctcgttttgcttcttgagcagctcgatggtcgagtcgatggttgcctgcgcgtcgtctggcagcccggtcttcgagccctcgagctgcgtgatgagcgcgttgttggcatcgatcagcgcgtcgatgcgatcggttgcggcagagaccgagccctgggcctcgtctgctgccttggccaggttcgaggcagagctcgccacctgcgcagaagtcttgcccagcgccacgcccgtgtcgacgatcgcggtggaaagcgagttgccgaattcgcccgattctttcctgagctgggccaagtcggtgctgccctgctcgagcgcgttcgagacgttcggaacgccctgcgacagcgcgccgagcgtgacctgcgcgctgatcaccgtcgtgcgccaggtgtcgatggagtccgaagcgccgtccagggcatctgccgtctgcgtgaggagcttgctcgcgttggcgagcttcgcctgcacgtcggcgtccttctggtcgaggctgtcgaccgagtcttccgccccgctcttgagggcccctgcgaccttttgcgccacggtgtccgagaacgtctggttgatctgcttttctatggtgcccgcggccgtgtcggcgaccttgaccgccgtcgacccgcgcttctcgttgacgtagtactcgacggtggggttcttggcatcccccgtcagcacgctcgcgaagtcctcggaaaacgagctgggaatgacgaaggcggcgtagtacttccccgaccgcacgccgtcgagcgcgtcgtctttggagacgaactgccatgcgagcatatcgttttccttgagcgtgtcgaccatctggtcgccgatctgcaagtcccccagggtggacgaggaatagccctcgtcctcgttggcgacggcgatgcgcatggtgcccgtgttgtcgtacgggtcccagttggcataggtgcagtaccacgcgtacagcgccggaagcagcgccataccgagcacgacgccgattgccaccggcgtcttcacgatgcgcttcacgtcgcgccagaatatcttgagaacggtcgtcaagtggtcgtgcggctcctctcaaaaattgacttatcggtcaaaaacagattctgggcactttacccttcgtgcatccccaatgcaatgacagctcggcaacatccacgaaaacccctgccagaaccagcgttctgccttcggcctgcgcccgctacaattctttggccacgtgcgagagcagctcgcgcgcgatggcgcgcttggagcaggtcggaagctccaccaccccgtcgcgctcgacgaaccagacgtggttgtcgacggtgcccatccccagcgcctcgctcgagacgtcgtttgccacgacgagatcggcgttcttcttgacgagctttgccttggcgtagtcgagcgggtcgcccgtctcggcggcgaacgcgaccacgtaggtgtcctgcttgtccgcggcaagcgtcgcggcgatgtccgggttggggacaagcgtcagctcgaggtcgtcgccgtcgtgcttgatctttttctgcgcgacctcggccggacgccagtcgctcaccgccgcgacgaatacggcgaggtccgccttcttgaacggctcctcgcatgcggagagcatctcgcg

SEQ ID NO: 1281 - DNA, 1544 bp, Unknown
  16S sequences of unknown bacteria
tcgagctcgccatgacgccgcccttcttgaccgcgtcgttgagcagcgcgagcgccgccgtcgtgcccgggccgccgacctgccccacgccgatggactcgatgatgtctgccacggaatcgccgcgggcgggagtcggcgcgagcgagaggtcgaggatgcccttttggtaccccaggcgctttgccgcctcgcgcgcgatgagctcgcccgcacgggtaatcttgaaggttgtcgccttgatggcctcggcgacttccatgatcgaggcgtccttgggcatgctgtcgatgaccgcgtgcacgacacccggaccggaaacgccgacgttgatgaccgcgtccccctgccatgaaggggttgtcctgcaccatgttgcagaagatgacgagcttggcgcatgcgattgagtcgcggtcggccgtgacctcggcgcactcgcgcacgacctgcgccatgcgcagcaccgcatccatgttgatgccggcgcgcgtcgagccgacgttgacgctcgagcagacgttgtccgtgacggaaagcgcgtgcgggatgctgtcgatcaggcgtcggtcgctatcactcgcgcccttttggacgagcgcggtaaagccgcccacgaagttgaccccaacttccttggaggcattgtcgagcgcgatggcgatgggcgtcaggtcctccgccttggtcgcgccgcagatctctgcgatgggcgtgacggcgatgcgcttgtggatgatcgggataccgtactcgcgctcgagctgctcggccgtgggcacgagcttctcggccgccatggtcaggcggtcgtagacgcgctgcgccatgacgttgatgtcctcgtgaacgcagctgcgcaggttcaacccgagggtgatcgtgcggatgtcgaggtgatcttgcgtcaccatctggatggtctctacaacgtgttctggttcaagcgccacggctgctccttcgttgacgactacgctatgcgaattctatacgatatccaaaagggcggcggcatcgattgcgccggtcacctgccagctgcgctcggccgtgaactccacgcgcagcagcggagctggcgggcatgccgagcacatcgcatctaccgctctctatgcgtcgatgctacttgagcgaccacagcttgtcgaagctctgcaccatcttgtcggtgaccggaccgcccttgccctcgcagccgatgatgccgaactcgtcgctcacgtggaagatctctgcgctttcgaggtcggccggcgtcaggtgcgcatccacgatctgcaggccaaacgcctgcgcgaggtcgcgtacgagcgtgtcggccgcatggcggatgggctgcgggaagatcgagagctcgtcgccgcgggcaacccacacgctgcccgcaaggtcgctgccgtcgagttcgtcgcccacccactcgaggtcgtcgatggtgaacgtcggggcctcgcgctgcggttcgagctggatatcgatgtccgcatcggggtcgatggagaacacgagcacgccgtctggcagctcgaacagcttct

SEQ ID NO: 1282 - DNA, 19849 bp, Unknown
  16S sequences of unknown bacteria
gtggtattggcggagcataacaaccgactgccgcctgtggcggattaaaggagggcgttatggcgccgcggtcaaagaaaactcgcgctccaagcgattattttctgtgtgttccgcaagagtagggagtgcagtccgaaaatccgtgattttcgagcgaacggcattcccgtccaaaatcgtgtcgactttttcgacacgattttaattgtcccctccgtaatatttaaccgtaactataagcgccgtgggaaatattattacgcccgcaaagcccaaaagctttatgcctataaacattgaaagcagtgtaaaaagcggatttattcccatttgactgccgattattttaggctcggcaaaattccttataacggttattaccgcatacagcacaagtaaccctatgccgagcgcggtattttcaaataacagctcggctattccccatggtatcagcacggtgccggtaccgagaaccggcagaatatcgatgaccgcaatcaaaaggcccagtaaaagcgcatatttcacccttaaaacaagaaaaccgataaaaagctctgaaaaggtcaaaagcattaaaaacgcatatccctttaaaagcttaaaaacgctgccgaccaaaatatttttgattttaacgcagttttcatatgtcctcttacctataacccctccgacaaattttgaaagtcccctgaaatcggcagcgatgtagcaccccgccgccaccgatacaatgcagctgatcaaaaaggacggcgcgcgtcttaccgcagcccccgcaaaggaagataccgccccgcccgcagccgaagccgcacgggctaaaaagccgttccacagcgtatcggcggcagagccgaattcatcgggcagccttttaaaaagcgcgtcaaaattatttcgcagggaggaaagcattttccccatatcacccgctcttacggataattcccgcataattccgcccgctgccgtcgtaaatccgagcacggcgaaaaacaaagccgccgccagcaacgcaaaaaccgcagccgccagcaacgccgcggatattttggaattaagccgtgttttacccgaaatataataagccggcttttgtaccgcccaggctataagtccgccgattataaacggcataaggtatttcagcaaaaaccggcacacaataaatacgattgcccctaccgttacaatgtatgccgcagtaattaaaaagttctttttcgcccgctcatccaaatgaaaacaccgccctgcaataacttttatataatttttacatttatgtcggaaggataatttttttgttgcttttgcgccgctgccgtactataatagaatacaacagttcgcgtgtggaggacaattatggataaaagctatctgcttatcgaccccgatatcctgccgccggtcttcgcgggagttatccgtgcgaaggagctgcttgcggagggaaaggtatcaagcacggcgcaggcggtaaaggaagcgggtatttcaagaacagccttttataagtataaggattttgttttcaaatattcgggctcgggcggcaatacattaagtcttaacgctgctctttccgaccgtgcgggagttttttcggcgctgaccgccgctctgtatgactgtggcgcgaacattataaccgtttcgcaggggctgccggaaaacggcaaggcaaatgtatcccttactgtcagcataggctctgaaatcggcgcggacggacttataaaccgtttgcttgaaaccgacggcgttatatcaatcaaaagaatagacggaggcaaaaaatgatcaatgttgcaataatgggacacggcgttgtaggctcgggaaccgccgaaatactgataaaccacccggagcgtgccgaaaaggcggctcataccgcggtcaatgttaaatatatacttgacctccgcgatttcccggggctttcctacagcgataaattcgttaaggattttaacatcatacttaatgatgacagcgtaaaggtggtagccgaggttatgggcggaattaatcccgcttacgatttcgttaaaaaatgccttaaaaagggcaaaagcgtcgttacctccaataaggagcttgttgcggcaaagggcgccgagcttttaaaaatcgcggcggaaaataacgctaatttcctgtttgaagcaagcgtgggaggcggcattccggtattaagaccgatatcccaatgccttgccgcaaacgaaataaccgaaatttccggaattttaaacggaacgaccaactacattttaaataaaatgatagtagagaatatggattttgattccgctcttgcgctcgcgcagaaaaagggctttgccgagaaaaatccggcagcggatatcgaagggcatgacgcctgccgcaagatctgcattttggcggctctcgccttcggcaaacatgtttatccggaacaagtgaagaccgagggtataaccgatattacgcttgacgacgcagaatatgccgacagcttcggctgcacgatcaagcttatagggcatgccaagaggctcggaaacggcaaaatcaccgcctctgtccgccccacgcttgtcagccgcgactgcattctttcggacgtcaacggcgtgtttaacgccattatgataaagggcgacgaaaccggcaatgttatgttctacggcaagggcgcaggaaaggaagccactgccagcgcggtcgttgcggatattctcgactgcgtaaagcacattgatacccgcaaatatgtttcatgggaagagggcagcgcagattatgtggataattgctcagatgaaccggtaaggcttttcgtgcttctgtcgggcgatgattttgacggacttgtttcagaggttgaaaacgctttcccgggtgtttcgtgcatcaaaaacaaattccgaaatgaaacagcgttcttaacaaatgcggaaaagccgagcgaaacgcttaaaaagcttgccgcctttaaaaatatcagatcccgtaaaattttaaatactatgatttaaccgaggaggttcacccgatgtctttaatcgtaaaaaaattcggcggttcgtctgtcgcgaacgccgaaagagtcttcaatgttgcaaatattataaccgaggactataaaaagggcaacgatattgtggttgtggtctccgcccagggcgatacaaccgacgagcttatagaaaaagcaaaggaaataaatcccgacggcggctctaaaagagagcttgatatgcttttatcggcaggcgagcagatgtctatagcgctgcttgccatggcaattgagaagctcggcttccccgttatttccctgctcggctggcaggcgggctttgcaaccgattcaaaccacggaatcgcgcgaatcaaaaaggttaatgcagagcgcatacgcaatgaaatttcaaaacgcaatatagtgattgtggcgggctttcagggtcttaataaatacgatgatataaccaccctcggccgcggcggatcggacacaagcgccgtagctatagccgcttcgatgaaggcggatgtctgccagatatacaccgatgttgacggcgtttacaccgccgacccgagaaaggttcccacggcgcgcaaaatggatgaaatagcctacgacgaaatgcttgagcttgcgacgctcggcgcgcaggtacttaacaaccgctcggttgaaatggctaaaaaatacaatgttgagcttgaggtgctttcaagtcttgaaagaaagcccggcactatcgtaaaggagactgttaaaatggaaaagacacttataagaggcgttgccaaggataccaatgttgccacaatttccgttatcggacttaaggatacccccggagttgcctttaagatcttcaacaagctggcacagcataaaatcaatgtcgatataattctccagtcggtcggcagagatgccacaaaggacatcaccttcaccgtgccgcttgatgatggcaagaccgccgtatctgccattgaaggaatgaaagacagccttaattacaaggaagtaacgatcgacgaatcgatagccaaggtttcagttgtgggtgcgggaatggaaagccacccgggcgttgcctcaaaaatgttcgaggcgctttatgacgccggcataaacatccgcatgatatccacaagtgaaattaagatttcggtgcttatagacgcagaggacgccgaccgcgccgtaagagtagttcacgacgcatttatattctgacagagccgaaataatgcgaaatttgccgcacagcaaaagcagcagcctgtaccatcggtcaagccgacggtgcaggctgtttttttataaattatgcatttacaaggcttaatactgttattccagctcaaacgcgccggtataaagctgatagtatttgcccttttcctcaataagctttttgtggctgccgcgttctataattctgccgtggtcaagcaccataataacatctgaattctgaacggtggaaagcctgtgggcgataacaaataccgttctgccctgcatgagcctatccatacccttttgaactatcgcctcggtgcgggtatcaatgcttgaggtcgcctcgtcgagtatcataacgggcggatctgcaaccgccgcgcgggcaatcgatatcagctgccgctgcccctgcgataaaccgctgccgtcgccctttaataccgtattatagccctcgggcagcatttctataaagccgtgcgcattggctagctttgccgcggctatgcactcctcgtcggttgcgtcaagtctgccgaagcggatattatccataacagtacccgtaaacaggtttacatcctgcaaaacaatgcccaaagaccggcgtaaatcggctttctttatcttgttgatatttatgccgtcgtatcttatcttaccgtccgcaatatcgtagaaacggtttataaggttggtaattgtggttttgcccgcgcccgtagcgcccacaaaggctattttctgcccgggttccgcaaaaatatcgatattatgaagcactattttatcggggacatagccgaaatcaacatcaaacagccgcacatcccccataaggcgggtatatgtgaccgagccatcatgatgaggatgccgccatgcccaaacgcctgtgcgtttttcgctttcggttatattgccgttttcgtcaatatttgcgtttacaagcgtaacatagccgtcgtccgcttcgggcttttcatccataagctcgaatatacgctctgtgcccgccatagccataaccaccgagtttatctgctgcgaaacctggcttatgctcatggtaaactgacgcgtcatattaaggaacggcaccaccaccgccaccgaaatcgcctgccccgaaagagaaaggttgggcgctttggcaataatcagaatgccgccgataaaggctataagcacatacagaatattgccgatattgcccatgataggcatcagtatatttgcaaaaatatttgcgctttcggcgtctttaaacagctgctcgtttattttgtcgaaatcctttttgctttcttcctcatggcagaatacctgaacgaccttttgcccgttcatcatttcctcaatatagccctcaaccacacctatcgccttttgctgccttacaaaataacgcgcgctgttgccgcctattttttttgttaccatagtcatggcaaaaacgccgagcagcaccaccagggtcatccaaacgcttaaaaacaacatatagcaaagcagcgccgcaattgttaaaaatgaggttaatagctgcggtatgctttgggatattaactggcgcagggtatcaatatcgttggtgtagtagctcattatatcgccgtgggtatgcgtatcaaaatactttatgggcaggctctgcatgctgccgaacatattttggcgcattttatctaaaaagccctgtgtaaccacagccatcagctgcgagtaaataaaggtggtaataacgcccagggcgtaaaagcctatcatcagtcctattacctgcataagccttcccgaaacggaattgaagcccgtatttattccgtcccctataaccagcaaaagctgatttaagaagagtgaagaaaccgttcccgcaagcgcgctcaataaaatacacactgccactataatgagataggtcttataatatttgaaaagaaatttaaaaagtcttaaaagcgtgcctttggcgtttttagccttaggtccgcccttgaatcctctcggtcccggcattattcttcacctgccttattctgcgaatagtatacttctttgtaaatttcattgctctcaagcaattcgtcatgcgtgcctacggcattgattctgccgtcctccataaccacaactcggtctgcatcctgcacggatgaaatacgctgtgctataataatctttgtggtatcgggtatttcggttgcaagcgcgtttcttataagcgcgtcggtcttggtatcaacagcgcttgtggagtcatcgaaaataattattttcggctttttaagcagtgcgcgcgctatgcaaaggcgctgcttctgtccgcccgaaacattcgtgccgccctgctcaatgtgggtatcatacccgtcgggcagggtatttataaattcatccgcctgtgcgagcttacatacacgcaccagctcctcatctgtcgcgttcatatcgccccagcgaagattatctttaatagtgccagagaaaagcacatttttctgcagaaccaccgaaacggcgttgcgcagcgtttcaatgtcgtaatccttaacattgctgccgccgacaagcacctcgccctcggttgcgtcataaaggcgtgaaataagctgaataagcgatgatttactgctgcctgtgccgcctataatgcctatggtctcgcccgattttatgtgcaggtcaatatcggtaagggcgtatttctccgctcccgcatgatatttaaaggaaacgccgttaaaatcaatgctgccgtccggcacgtctgttttgggattctcggggtttttaacggtgctttcctcggtcaaaacctcgcagatacgctgtatggacgcgtttgaaatcgttatcataacaaaaatcattgaaagcatcataaggcttgataaaatctgcataccgtaggtgaacatacttgacagcgcaccaacgcccatttcgcttgcgccgctgtttataataagctttgcgccgacatacgaaactattatcattgccatatacattgcaatctgcataacagggctgttaagggctacaagtctttctgcctttgtaaagtctgcgcagacctcttcggacgccttgccgaatttatttttctcgtaatcctcgcgcacaaaggattttacgacccgcatacccttaacattttcctgaatcgaattgttaaggttatcgtactttttaaatacgctttggaagagcggcatagctttttttattataaggaacagtgcaaaggctaaaaagggcacaagcgccacataaacggtagataactgcggacacattttaaacgccattatcattgcgaaaatgaacatcataggcgagcgcaccgctatgcgtattatcatcatatatgccatttgtacgtttgaaatatcggtcgtaagacgggtcacaagactggaggtcgaaaatttatcgatattggtaaaagaaaaatcctgaaccttgtaaaacagatcatgccgcagattttttgcaaacccgcaggaagccgtggcgcaggtctttccggccatagccccgaaaaacagggaaacgaacgccagtaaaatcagcataaagccgtattttaatatgagcgacatatccgtgccgttctgtatgtggtctataagctttgcaatataaaaaggaataacacactcaactataacctcaatagaaactaatatcggggttaaaattgagggctttttgtattcccttatactgcgcataagtgtttttatcatattgtctctcctattcttccatattgtttttaagcttttcggtaatgcggaaaaaagcttcaagctcttcatcggtcagcccttttctcagccttttttcccgcgcggcaatatccctgcatatcgctgtatgagtttttatcgccttatccgtcagcacgatttttttaagtctcgcgtcgttttcaacgctcacacgcttaatataaccgtccttttccataagctttaacatattgcttgcggttgaacgccggattgaaaatttttcttcaaaatccttttggaaaatatccctgtcgcggttttcgtaaaaataatttatcgcccagccgtgcaccctgccgttaggcttcggatccatagccgcaatattcttttcgacatcccgccttataaggtttgaaagcgtgcgtatctcaaatccgatatcccgttcggaaggcatattatcacctcaaaaagcaatttgttagtttgctaaccattatatcacaattatcccgtttgtcaacaggataatattgaattttttgttaacttcggtttgccgattcagcgcagctcttccacaaagctcaaaagctccgggaagccgccgtgcgggtaagcggagatatccttgttgtccttattaagcagacaatcggtaagcagaaataccttcattccgagcgtttcggctaccatatcctcgttcacatcatttccgaccataaggcattcctcggcgttcatatgaagtctttcgagaatttcctcataatatttcgggttcggcttgcagtagtgcgaattttcataggtggtgtaaagcagaaaatcgtttttatcaagccccgcccactcaatgcggctttccgtggctgcggcagggaaaatcgggttggttgcaagcacaagcgcaaatccctttgccttaagcgcggcaaccgtttcggcggcggcagggtcaaagccgcagtccgcctttacatctgaaaattccttgcagtagtactcgtcaaacatcggcttatccgcagcggttttttcttcgccgtaaatttcggaaaatttgttccaaaacgcctcttcgttagtaattccgccgttgtttttcaccattgccgccgtgcccgcccaaacgctttttataagtttttcgggttcgtagccgcgcggcgccgccttcataacgaggcgcttgaaatagccttgggtgaatttctccatatccatagggagcagagtcccgtccaaatcgaataatatatttttaatcatttaattttatcctttgttataattatctttttttgagcaatactgtttttgaggtgatttaaaatgcaattaacacaaaaagaaacttcccttttaaaggatcttaaaacacaggaaaagctttgtgccgagaaatacgaaaagtattcggcagaggcgcttgatccgcagctgaagaccctgttttcgggcattgcggataccgaacggcaccaccttagcatgcttgaacaaatagagggcggctcagcccccgcaaccgcaggcggcagcaaagctcagcccggattttccgccgcttattccgttgccgataccgatgcaaaaaagcacgacagctatctttgcaccgatgttctcacaatggaaaagcatgcttcgcacctttacgacacctgtatttttgaattcacgcaggaaagcctgcgaaatgttttaaacagcattcaaaaggaagagcagggtcacggcaaagcaatttacgactatatgtcggcaaacagtatgtattcttaataataaggctcccctgtgtaaggggagctggcagccgaatggctggctgaggagttgttacaggctgaatacccctcagtctcgttccactcgacagccactgacggaggtgctcccctctgtttcggcaaagccgaaaagaagggagccttttttataatcttcttattatctcattattctgcgagatgaggtgtcccacagcgtagatcaggaaaagaattattatcgagagcacaatgcccacaataaatcccccgaccgccacaacggcaaaaatcttatcgagcataataagcacggcggcaaccgcagcaaaaaccaaaagtatcatgagcgccactataaaggatatcgccttgattattttatctaggtgcttgaaaactccgtttccgtaattttcggtcactgcctttaggctgctttttgttctgggcactgttgaggagcttatatcctcaaagccaccgtcactgtaaatttcgtcattcattttggggtactcctttcggtttataccttttctacgccgattgttaccttttcgccgttaatatcccaatccttggtgtagcctgcggcgtcagccgactcaaccgagtccgcaagcgtatctccggcgatgtccgctttcttcaaaacggcaatatcggtcaccctttcactgccggacacggtcaccttaatatggtcggtaacattaaagcctgcctctttgcgcatggtctgaattttgcttatcagctcgcgcacaaagccctcttcaataagctcttttgtaagggtggtatcaattgcgacggtgattccgcggtcgcttacggtgtagaaaccgtccttttgcttagcctctatcagcaggtcttcggtttcaagggtcacttcgcccgacggcagcgataaaacaagctttccgtttttatcaagctcttttttagccgccgtgccgtcaagctctgacagcaccgttcttatctcgtttaactgcttgccgaacttaggacctacggttttaagctgcggcttgaactgataggttacaaagtcatctaccttatcggtaaagcttacgttctttatattaagctcatcacggataatatcgctataaaagctgtcaagctctccgtcaagcttaacatacatagtagcaaggggctggcggtttttaagcgatgagccgtttctggcggctctgcccaaaacaactatttcgagcaccttatccattttatcctcaagctctttatctatcgccttttcgtccacggtcggaaaagcgcagaggtgtatgctctcgggtgccgatttatccacgctgcgaacaaggttctgataaatgctctcggtcataaacggaatcatgggcgccgccgccttagcggtagtaacaagtgcggtgtaaagggtcatatacgccgcaattttgtcttcgggcaagccctgaacccaatatctctctctgccgcggcggacataccagttactcatatcatccacaaattcctgcaaggctcttgccgcttcaggtatgcggtagttattcaggttttcgtcaaccgcctttaccattgagttgagctttgataaaagccatttatccataacggtgagcttgcagtctgcaagagaatactttgtggggtcaaattcgtcaatattggcgtaaagcacatagaaggcgtaggtgttccaaagcgtgcccataaacttgcgctgaccctcggttaccgccttatcgtggaaacggtttggcagccacggggctgaattggtatagaaataccagcggatagcatccgcaccgaatttttccagcgcctcaaacgggtcaaccgcgttgccctttgatttgctcatcttctgcccgttttcatcctgtacatgacccaaaactataacgtttttatagggcgccttgttgaaaataagggtggaaattgcaagcagcgaatagaaccagccgcgggtttgatcgaccgcctcggaaataaagtccgccgggaactgcgattcaaacagctccttgttttcaaagggataatggtgctgcgcaaacggcattgagcccgaatcgaaccagcagtctataacctcgggcactctgtgcatctgcttgccgcagtgggggcactttatggtcaccgcgtcgatatacgggcggtgcagctcaatattatcggggcagttatccgacatttcctttaattccgcaatactgcctacagagtgcatatgcccgcactcgcactgccagatattaagcggagtaccccaatagcggttgcgggaaattccccagtcctgaacatttttaagccaatcgccgaaacgccctttgcctatgctttcgggtatccagttgatggtatcgttattgcggataagatcatcgcgcacatcggtcatttttataaaccacgattcgcgtgcatagtagataagcggggtatcgcagcgccagcaataggggtaatcgtgctcgaacttcggtgcgtcgaaaaggagtcccttttcgtccagatcctttaaaacaagcggatctgctttctttacgaatatgcccgcatacggggtctgctcggtaagatttccctttccgtcaacaaactgaacaaacggcaggtcgtagcgcctgcccacctttgcgtcgtcctcaccgaacgcgggggctatatgaactatgccggtaccgtcggtcatggtaacgtaggtgtcgcaggtaatataatgaccctttttattctgcttttcgcaaacgggctttacgcaatcgaaaagcggctcatattctttatattcaagctcgctgcccttgtattcttcaataatctcataagcgggcttatcttctgttgccagcttgcccagcaccttatcaagcagtgcctttgccatatagtaggtatagccgtctgccgcttttaccttgcagtaggtttcttcgggatttacgcaaagcgccacatttgagggcagtgtccacggtgtggtggtccacgcaaggaagtatgcgtcctcccccacaaccctaaagcgaactactgcgctgcgctctttaacatttttatagccctgcgccacctcgtgcgaggaaagcggagtgccgcagcgggggcaataaggcacaattttaaagcccttatataaaagacccttttcgtatatctttttaagcgcccaccattccgattctataaaattattatcataggtaacataggggtgctccatatccgcccaaaacccgacggtctttgagaaatcctcccacatacccttgtatttccaaacgctttccttgcagtgctcgataaagggttcaagaccgtactgctctatctgctccttgccgtcaagccccaaaagcttttcaacctcaagctccacaggcagaccgtgggtatcccaccctgcctttctcggaaccatatagcccttcatggtgcggtagcgcggaatcatatcctttataacacgggtaagcacatgacctatatgcggcttaccgttagcggtgggcgggccgtcatagaatacatatggcttatcaccctcgcgctcggctatgcttttttcaaatatattttcgtcttcccaaaatttttcaacctttttttcttcctccacgaagttgaggttcggggatatgctcttgtacactgtttttttctcctttcaaaataaaaagacttcgacccataacaggacgaagtccaaaaaacttcaaaccacccattacggcagacagaaaatctgcgttccccctaacggcggaataccggagcggcttactttgaaaaatttcagccgtcagctctggagtgataccggtcttatgcatttcccgggcttgcaccgcccccgggtcgctgaaaaacgcttttttaaaaaccgcggtctccgtcttagcttttaaagtgtttttattaacttaattttcctttgccgaaggaatctgctgctttaatgcggcgcgggtctttcttacctcgcctaaattagcggtaagaccttcatcggcgcggcgcataatatcatccacaaaatcctgcgcggccttgcgcatttcgcggctcttctgctgtgaggtggcaattatttcagccgccttctgctgcgccagctttacaatttcctcctgcgcggtcatagcctttgcgcgctcctctgcattacggataatgccgtccgcctcgcgctttgcattggtaataatatcggcgcggtcggcaacaatgccctttgcctgcttaatttctgccggaatattaaggcggatatcgtcaaccaccgcgcggagcttttcaatatctaccacggtttttttgccggggatcttgattccgctgtccagcacctcgtcaaactgctcaagtaattcgtcaagtgtcattttttattcctccgtagtatcctttttaataaaaatcctgttcattatatccgcccttataacctcgggaacaaagcttgatatatctccgcccatgccggcaatctgcttcaccatgcttgagcttaaatacatattctgcgtagccgttgttaaaaacagagtttcaacctgcggattcagctttttattggtaagcgccatctgaaattcgtattcaaaatcagacattgcgcgaagacccttaattatcgcattggcatttttgcttgcggcataatcggcaagcaggccgtcatgatgctcaacctcaacattttgaaggtcgggaatacacttttttatcatattcacgcgctcttcgggggtaaaggagcaatgctttgcaccgttggatgccaccacgactataagcttatcaaacattttggcggcacgtgttataatatcaagatggccgtaggttaccgggtcaaagctgccgggacaaaccgcaatcctctcattcatacgcccgcctcctttcggtaaagggttacaagcaccttgccgtagcggtagactttggcaattttaaacccgccgatttcttcatccaactttacctcgggcggatgctcgcagactatgacgccgtaatcgctcataagcggcaaaacagctttaaccgccggcattaaaagccctgccgaatacggcggatcgagaaagacaatatcaaatgtatcgcggcaggcggcggcaaacgccgcataatccgagcgcactgcctttgctttatccgaaaaagcggtgctgtcaatatttttccgcaccaggtttaaggactcttccgacgcatcaacaaatgtgcagccttccgcaccgcggctgagtgcctcaagccctaactgacccgagcccgcaaaaaggtcgagcacgcgcctgccctcaatatcaaactgcagcgcgctgaaaataccttccttaacgcgttcgggagtagggcgcacatcgcgtccctccggggcggcaagccttcttcctcttgccgttcctgttataattcgcattagtatcaccgataagtgtaataggttaaaatataacctttattattatcacaccaaagcataccttttgtcaatagtttttttcaaaaaggcgcattttcgtgaccgattatatgccgcgccgcatgctttacagcctttcgaccttacaatccgtataataatatgtgagtatctccctaaaatcgctgccctgctttgccatataattcgcgccgtactggctcatacccacaccgtgaccgtagccaagcaccgtaaacacaaaattcccatctgcatacttaacgctgaaattaagcgaccgcagattgaaaatactgcgtattttgccgcctgttatctcattgccgcataccgacaccgttaaaacagagccggagtcggtgcgctcgggctcgccgaagtatgctgcggggtcgcccgacagggtgtactcgctccccaattttcttttgagctcctccgcagagacgcttacttcgcttgcgtaatcgggtgaaagcttatcccccgggcttgaaaccgcctttaaatacggaagctcgccgccccatatatcgcggctgtcctctgtttttcccgacgatatcgcatgatagaccgcagttatcggctcgccgttataagtaacagcaagatttttaacatcaccgacggctttctcgagcttttttgagtattcgtcatatttatctccccatcgttttttcgcctcggactttgttatgtagctttgatccaccgtataatcggttgtaatatcgtagcttttatccttattatcggctctgcggcggcatgccagcgtgtaggctgctaccgcctgcgccttgagcgcctcgttctcataaagcgcgggcatttcggcggcaagcaccccgaatatatattcgtccgccgtcatgacgctcacggtatcggtctgcatatcacatacgcggaaggtatcgttcttttcgcggttgtccgtttttacattaaaaagcctcacggcagcggcagccgtgctttttccaccgacggtctttaccccgcaaagcggaaaaataaacatagcggataatatcaaaaaccccgagcacagtatttttttcatagcgatcctcatattcccataattttattgacatttagccacggcagcggtaaaattataccgtatcctattttaaaatatgataatattaagcaataaatgtctgtttacggagtgtgaccgatgaaatacgaaaaaatccttctgttttcctcaattgcgctgcccgccgttgtgctgatgcgctttttgcagctttttttcacggtggatgtaaaaaccggctttttcaaatcggaatatgtggacgcggggcgctgccttttggttctgattgccctcggctgcgcggctgtggcggtgctctgcttaacctcgcacagaaatcccgagaatccgccgaaaaaaaaccttgtgacggcggttttttcctttatcaccgcagccgttaccgcaattgaaatattttcggaatcctttgccggtacggtaatgcgttggcagtcctcacttttaatgcttatggggcttgccgccgccgcctttttcgttgcttacggcataagcctgatttccgatttcacgctgccgccgatttccgcggtaataccggttttttattttataatcaaggtgatatgcgttttcacctcggtttcctcgctcgcgcttataaccgataatattctcatgctcgcggcatactgcacgctgctgttcttcttcctgtgcttcggaaagctttataacggaatcgaccgcgaatacaatttcagaaagctgcaggcatcgggctttgcctcggtactgctctgccttacgcagtctgtaccgcacattatattcaacctctcgaacggaggggcttaccgccacacctctaacatatccaacatttcacttttggcatacggtctttttaccgcggcgtttacccttgcccatttttcgcttaaaaatacttcggcaggtgaccaaaaatgagaatgcgcaagaaaaaacacctggaggaaaggcttgagaatatttcagagctgctttttataagcgaccttgaggacagaaacttcaataatgcggcaagcaatcccgaatatatcgattttgataagctcttcggcagaaccgcgccgcacattctcgaaataggctgcggtaagggcggctttgcggtggaatttgcaaaaagaaatcccgaagccgatattatcgccgttgaaaaggacgcgaatgttatagtcgcggcgtgcgaggcagcaaaaacagccggagttaataacctctattttataaagtgcgcggcggaatatctgccgaaatatatcactccgcacagcatagaacgcatttttcttaatttcagctgcccgtttccgaaaaacaagtatgccgtccaccgccttacccaccgtcggtttttatcgatctacaaatcgcttatgaagcctcgtgccgaaattcaccagaagaccgacaatatgcatttctttgaattttcgcttgaggagcttaccgccgcgggctttgcgcttaaaaatatctcgctcgatctgcacgcaagcggctttgaaggaaatatagaaacggaatacgagcataaatttgccgccctcggtcagccgatctatcggctcgaggcgtatttacccgagggagctttataaaaatgaccgactttcatattgaaaaaataaccgaccgctgcgccgaattcggtgtaaaaatcgacagagagattacagagcgccttaatctatacggcaatctgctgcttgaatggaacgagaaaataaatctcactgcaataacagcgcccgaggacgtgctttacaagcatttttacgactgcattctgtttttcaaggctgtaacacctgataaaaatgccgaaataatcgatgtgggcacaggagcgggcttccccggaacggtgcttaagattatacgccccgatttaaaaataacccttcttgacagtcttaacaaacgccttttatttttaaacgaggtgatatcacagctcggtcttcagggcatttacacggtgcatatgcgcgcagaggatgcgggcagggcgcccgcgcaccgcgaaaaatacgatattgcctgtgcgcgcgcagtagcctcgcttccggcacttatggaatactgcctgccgcttgtaaaaaagggaggcagctttattgctatgaagggcgcctccgccgcagaggaaaaggctttaagccttaaagccgccggcattttaggcgctgcggaacccactattatatgcgaaactctcaccggaaatgagcaaagagcctttgttatttcaaaaaagatatcgcaaaccccgacaaaatacccccgcaagccctccgatatttcaaaaaagccgctttaatgcggctttttttgttgtaaagaggcgttttttcccgacctgtttttctttacaaaccgaaaaaatgtatttacaatgagaagcagaaagggcaaaggaggaatttgatgtacaccctatccgataaaaagcttataatgctgcgaccgaaggatataaagccgtcatccgcggtgccacggcgcgaatttgacgaatatgagctgaagcttttgaccgacagtattcaggcaagcggaataatagagccgctggcggtaaggcggcttcagggcggcggatatgcacttataaccggcgaaaggcggctgcgtgccgcactgcgcgcgggactccggcgcgtgccgtgcatagtgcataaaaccgatgaggagaccgccgcgctttatgcggtgaccgaaaatttacagcggagccgattaaacgcctttgaggaggcggaaagcataaaccgtttgataaccgaatacgggctttcccaatccgaggcggcggcaaggctcggaatcgctcaatccaccctttcaaacaagctgagacttttaaggctgtccgacggtgttcagagcagaataatatcctccggactttccgaacgctatgcgcgcgcgcttttgcggctgccggaggaaaggcggcaggaggcgcttgaccgcataattgccgatgagcttactctgaaacagacggaggaatacatattcgatcttttgaaccccgaggacgagccgtgcgaagcgtccgaggagccgatcagaaaggccgctataggcgatgcaaggctgtttgcaaacagtcttgcaaagcttgtgaccacactgcgcagctccggcatagaagccgtttccaaaaagtatgaaaatgataaatacattgaatacagagtccgtattccgaaggcggcgtccgccgccgagcgctgcaggcagttaaaaatttgttgagcttccccgccctgcgtttcccctgcgcagggcacgcccgacagtttttaaataatgtctactgaataattgcattagcaaatgcaattatataaaatcgagttaaaatctcgattttatgggtcaaaacctttgttttgaccgtcagtatacattgattgtcgcctgattttaaaaagaatcaaaatgtgattctttttaaagtgc

SEQ ID NO: 1283 - DNA, 32759 bp, Unknown
  16S sequences of unknown bacteria
cgctcaggtctcatcctttttttcttcactgtccaatatgtattgtagcgctacacccgctgcccaacccccgatgggccgcctcttgacagtgcttttccatccatagtacaataggatgttgtactatgtattatcgctgggaagagaggattttgacccgcatgagcgaagccaccctgagcgcggaggcgctgaaacagattcagaagcggcgcacgttcgccattatcagccacccggacgccggcaagaccactttgaccgaaaaactgctgctctacggcggcgccatccgccaggccggcagcgtcaaggcccgcaaggccgaacgtcacgcgaccagcgactggatggaaatcgaaaagcagcgcggcatcagcgtgacctccagcgccatgcagtttgaatacgacggctaccgcatcaacatcctggatacccccggccaccaggacttcagcgaggatacctaccgcgtgctggtggcggcggatgcggcggtgatgctcatcgacgcggccaagggcgtggaggagcagaccatcaagctcttcaaggtctgccgcctgcgcaacattcccatctttacctttgtcaacaagatggaccgcgccagcaaggacccctttgccctgatggaggagctggagcaggtgctgggcatccgctcctgcccgatgaactggcctatcggcgtggacggcgattttcagggcgtgtaccagcgcgacagcgggaacgtgctgctctattccggcggcaaccatggcatgagcatggccgagcaggtgagcgtaaagctgggcagccccgaggccgagaccgcgctggccaagcactatctggaccgcctgcacgaggaaatcgagcttctggatgtggcgggcgatccctttgacaagcaggctgtgctggagggccggctcacgccgctgttcttcggctctgcggttaccaactttggcgtggagccgtttttggaggcgtttttgtccatcacgccgccaccgttgccccgcatgtccgatatcggagagattgcgcccaccgagccgtatttctccggcttcatcttcaagattcaggccaacatgaaccccgcccaccgcgaccgtctggcctttgtgcgcgtggtcagcggcgagttccagaagggcatgacggtttaccattccggcacggacaagcagatccagctcaagcagccacagcagttcatggccgatgagcgcgaggccgtcgaaaacgcctatgcgggcgatatcatcggcctgtttgatcccggcttcttccacctgggcgacgcgctctcctccggccctaagctgcacttttcctccatcccggtgtttgcgcccgagcacttcgcccgcgtgcgtcccgaggacagcatgaagcgcaagcagtttttgaagggcattcttcagctggccgaagaaggcgccatccagaccttccgccgcaccgaaacgggccgtgaggattttctggtaggcgtggtgggcgtgctgcaattcgaggtgctggagcaccgcctcaagaccgagtacggcgtaaccatgctcatggaccgcctgcccttccgctacgtgcgctgggtgaccaaatcgcccgtgcccgtggaaaagctcaagctgacctccaccagcggccgcgccttcgactcggaggagcgcgaggtgctgctgtttgaaaacgaatggtccatccgtctggcgatggaaaataacgaaggattggagctggccgaaacggccgtgcgcagcgcatatgcatgatttgtacctggtttccccgctggcgggggtgcctcccgcggacgacgacagcatcccaggcatccccaaccaataccagcaatagaaggaaagaggcagtttatgattcgtaacgatatccgcaacatcgccatcatcgcccacgttgaccatggcaagactaccttggtggatgaaatgctcaagcagggcggcgttttccgtgaaaaccagcaggtggccgagcgtgtcatggactccggcgatatcgagcgtgagcgcggcattaccattctggccaagaacacggccgtgcattacaagtccaccaagatcaacatcgtcgacactcccggccatgccgatttcggcggcgaagtggagcgcgtgctcaaaatggtggacggcgtgctgctgctggtggacagctttgaagggcccatgccccagacccgcttcgtgctgaaaaaggcgctggcactgaagctgccggtcatcgtggtaatcaataaggtggatcgtccggatgcacgctgcgacgaagtggtggacgaggtgctggacctgttcatcgagctgggcgcggatgaaaccgcgctggaccgtcccatcgtctatgccagcgcccgtctgggcaccgccacgctggatctgagccagcccggcgaggacctgcgcccgctgtttgacacgattctggaatatatccccgcgcccgagggtgaactggaaggccctgcgcaggtgctgatctccaccatcgattacaatgattatgtgggccgcatcggcattggccgcatcagccgcggcaccctctcggagggcatgaccgtcatcaaaaccaactatgatacccaaaaggtatcccagccgcttcgactcaccagcctgtatacctttgacggcctcaagcgcatccccgccaaggaggcctccatgggcgacatcgtggccatgagcggcattgaggatatcggcatcggcgataccgtgtgcgcgcccgagcaggtggaggccctgcccttcgtgagcatcaccgagccgaccgtcaccatgaccttctcggtcaacaacagcccctttgcgggccgcgagggcgaatacgtcaccagccgccacctgcgcgcccgtctcatgcgcgagcttcagaccgacgtgtccctgcgcgtgaacgagaccgacagccccgacgcattcgaggtgcgcggccgcggcgaactgcacctgtccatcctgattgaaaacatgcgccgtcaggggtacgagttccaggtgtccaagccccaggtgctctataaggaaatcgacggcgtccgctgtgaacccatcgagcgcatggtggccgatgtgccgcaggcctatgcgggcgcggtgattgagaagatcggtcgccgccgtggcgtgatggagagcatgcatggcctggaccgcgtgcgcctggagttcctgattccctcgcgcggcctgttcggctaccgctccgagttcatgaccgatacgcgcggcgaaggaatcatgtccagcgtgtttgaaaagtacgagccggtcaagggcgatatccctcaccgcaacgtaggcgctctggtatgctttgaagatggcgaggctaccagctacgggctgttctacgcccaggagcgcggcacgctgttcatcgggccgcaaacgcccgtatacaagggcatgatctgcggccagaactcccgccccgacgacctggtggtcaacgtatgcaagcagaagcacgtgaccaacatgcgcaacgcctccgccagtgaggacagcctccgtctggtcagcgttcatcccctcacgctggaggagtgcctcgaatttattgacgacgacgagctgctggagatcactcccaagtccctgcgcatgcgcaagcgcgtgctctcccacgaggagcgcgcccgcgccgctcaccgcgccaagggctgatccttcccgcgcctgtggcgcaggcctcaaagaaggaggtttgttttacacatgaacacgtttcggaagctatgtgcgctgattctgtccctgtgcctgctcgcggcggtgctgtccccggcgctggcggaggagactgccggcgacgaggtgacccgctccgacttttcgctttccctgctgatgcacgcggacggatttcccaatgacggcgcggcgcattatgccgactgggaagcctttctttccaagctgagcctggagggcgtcatcgacgtacagcgctttctgaccaatgtcagccgcgtgtattttgacggcgggctctgcctcaacggcaaaatgaccctgcccttcgtctacgacggctaccacagctaccgctatgtgcgggccgacgcgctgcgtggcgacagcatccatttccaaatgcacaacttctttgagttcatgctcaagggatattactacatgggcctgcccacacagctcatcgccctgccgctttatcctgaagccagctactacctcggcaccagctactaccagcccattgccgaggcggtggcgggcgagggcgaccgcaccgtgagttacgccgagctctacgagctgtgcgaaaccctggacctgatcgtcaacgacgactgggactatgagcgcgcctacttctattttacctgcctgctcaccgatttgggcgcatcggacctggcgctgcaaaagctgggatacctggaggactggctcgcgttcatggacccggaggagaaggggctgttcatcaccgatgatggcgtttcccagacctacaccctggggaacacgcaggtgtttacccataccagagacgcctccggcgaacgcttcaccctttgcctgccggactccgacggctatgagctgaccgccgcctacgaaaacaccggagcggagatccacgggagcctctgcatcaggctggagggagcggagcgcctgaccctgaatgtggatgtggacggcctgcccgtgaatggcgcgctcagcgcccagggatcggccaccatcgcctttggcggcgagtgcttctaccagccgcccaccccggtttctttcgcttaccgttacagccgcgacgccgcagcgttgccctacgccatgaccctggaagtagactggctgcatccccaaacgcaaaagcccgctctcacgctcgcctatcaggcggatatggaacagctgcccgccagcaccatggtggagcgcgtctacgacaatcagaacgatttcttccatctcaacgagagtttcatggaggaatacaagcagctctacctgcccacgctggccctgtcggccgttcctattctggtggaaatgcccgcgggcgtcatcagcgatatcatgggcttcctgtacgaaaccggctttctggctttcctgggcatcgaatgacggagggacacaagtgcaagacaaacctttggaaaaaaagagccagagcccgctctaccagcagctgatggcccgcctgaaaaacgacatcctggccggggtttatccctccggggcgcgtattcccagcgagcagcttctgtgcgaaacctacggcgtaagccgcgtgaccgtgcgcaaagccatgctggacctggtgcaggagggcctgctggtgcgccgtcaggggaagggcacctttgtggcggatgagcgcatccagcgcgacctgctgcaaatcaccagcttttcggcagcctgccgccagaacgggcattgtgccggcaccaaagtgatcagcgccgggctggaggaagcctctcaggaggacgtcgagcacctgggcgtggcgcccggcgggcaggtggtggaaatctgccgcctgcgtctgtgtgatggagagcccgtgatgctggagttcaaccgctttccggatcgctacgcctttttgctcgacgaggagctggacggttcgctctatgacctgctcaggcagcgcggcattgtgcccacctctgcggtgcatgatatctcgctggggcatgccacgccgatggtcagccgccaccttgggaccgcgcagggcgacgcgctgctgcttttgaacgaactggtgatggaccagcacggccagcccctgcattccagccggcaatggattcgcggcgacaagtacaccttccgcatctgaaaggggaaacgattccgatgagcagttccaaatttgccctcttcgtggacctggaaaactgcggcgccaaggtggatacgctgctttccgtgctggaaaaggtcaagatccgcggggacatcctgctggggaaggtgtacggctataccgaccagtacagcgacctcaaggaggtcctgctctccaacaccttcaccgtggtgcccagcctgcgctacggcatcagccagaaaaacaacgcagatatcctgctggtgatcgacgcgctggaggtggctttcaccaatccgctgatcgacagcttctgcatcgtctccggtgacagcgattatacgccgctggtgggccggctcaagagcatgggcaagttcgtgctgggcatcagccgttcggcggcggccagcaacattttcatcaatgcctgcaatgaatttcagttcctggaaaacgtgggcgggcgcacccgcaagcccacgggcaagaaaaaggcctccgccgacaaggagcccctggacgagcaggagctcaacaaggccctttgcggcattctggaggagcagaccgacaaggacgagctctatgccagcgagctcaagggcatccttttgcgcctgcggcccgatttcaacgaaaagtcctacggctgcaccacgtttctcaagctcctggacaagctgagcaagcagttcggcgccctgcatatccgcagcgacaatttcaacgtcatggtctccctcgcgcagagcagcaaggaaagcgccccggagatgaacaaggaaaactggcgcgccctcatccgcgagcagctcgcccgctacaaggaggacggcttcgaacgcatcaaccccagcatcctcaaggccgatatccaggccagcttccccggcttttccgaaaaggcgctgggattcaagcgcttcagcgacatgctcaaggccatggaaaaggaaggcctgattaccgtggagctggatgatcagaagaatatgctcatcaaggtgagctgacagggaggaagccgttatgcctgaaggattcgcgcgcattgccgcagtcagcctgcccgttcatctgggcgatgtagaggccaacgaacgggagattatgctcgctctggaacgcctccggacccagggcgttcaggcggcggtgttcccggaattgtgcctgaccggctatacgttaggtgacctgcttttacacggcctggtacaggaccgcgcctgggcggcgctcaagcggcttaaggcccatacggacggactcaccgccgtggtgggcctgcccttctgccatgaaggccgtctgtacaactgcgccgcggtgctggcgaatggtgaaatttgggcgcttgtgcccaaaacctacctgcccaatggcaatgagttttatgaaacccgctggtttgccagcggagcgggcgtgcacgaaaccgtatcgcgcgacggcctcacattccctctgagcgcggatacgctgtttgagatgggcggcttcgtctttggcgtggagctgtgcgaggacctttgggtgcccctgccgcccagctctcacctggcggtggagggcgcagacctgattctcaaccccagcgcctccaacgcgctggctgccaagcacgcctaccgccgcggcctgctctcgcagcaaagcggccgactctacgcgggctatgcctatgcgggcgcgggctttggcgaaagcaccagcgatatggtgtttgacggctataccggcgtctttgaaaacgggcgcgccctgagcgagggggagcgcttttccatgtcgggaagcctggccgtggcggacgtggacatcgggcggctgcgctatcagcgccaacgcaacggaagcttccatcagatgccgcgtctgacacgcgacatccagcggctcacgcttgggccggcgcatgatgcgcccctgccgctgatgcggccgctggaacccctgccctttgtgcccttcggcgcggaggcgggtgagcggctggaggaaatcgccggcatccagtgtatgggccttgaaacgcggctgcatgccgtccatggccgcacggtggtggtgggcgtatccggagggctggattccacgttggcgctgctggtggcggtgcgcgcgtttgacgcgctgggtctggaccgcagcggcatccatgccatcaccatgccgggcatgggtacgggcgggcgcacccactccaacgcgcagaagctcatggaggcgctgggcgtaacggcgctggaaattccaatcgagaaggcggtacggcagcatttcctcgacatcggacaggacgaaaacgtgcacgacgtgacctatgaaaacagtcaggcccgcgaacgtacccagattttgatggactatgccaacaaagtgggcggcatcgtgctgggcaccggcgacctgagcgaggcggcgcttggcttttgcacctacaatggcgatcacatgagcatgtacaacgtcaactgctccgtgcccaaaacgctggtgaaaagcctggtgggctatctgagccggtgctttgacgagacggtggccgccatctgccgggacgtgatcgacacccccatcagcccggagctgctgcccacctcacagggagaactccagcagcgcaccgaggacattctgggcgactatgccctgcacgattttttcctctaccatctgatggacagcggcgcgtcggccgggaagctgaagatgctggccatgcaggcgtttcatggcgtatacgacgaagcgcgcgtggaggcccagctgaaaaccttcctcaggcgcttctttgcccagcagttcaagcgcaactgcgtgcccgacggccccaaggtggggtcggtcagcctcagcccgcgcggcgactggcgcatgcccagcgatatgcaagccggcatgtggctggatttctaacccctccgcccgatatacgaaagggagaaccctgcattgagtaccacgcgtaccgcacgcttcgttcaaaacacgctttccaccgcgctctaccagctcacggccatggtgatggggtttattacgccccggctgatgatcctttactacggttcggagatcaacgggctgatcgtatcggtcacggagtttctcacctattttaagatgctggaagccggactggccgcctcggtcaacgtggcgctttatgagccgctggcccggcgcgatcatcaggccgtcagcgggatcgcgtcggcggcgcgcctgttttacaacgcggccggctggatgtttacggggctgacggtggccttcaccatcgcctatcccttctttgtgccggtgcgggatctgaacggcctgcccgtaagccacctgagcgtgatggtgctcattttggccatgggcctgtcgggcatgctggagttttttaccatggcgcgctaccgcgtgctcatcgccgccgaccagcgcacctatgtggtttcgctcgcttcgatgagctcgctcatgctgtccaccgcgctgatcgtggtgttgccctacctgggcatggatgtgatcgtggtgcggctggcagcctcgctgaccattctggtgcggtcggtgctcctgtcgcgctatgccaagaagcactatccctacgtggacccgcatgcgccgcccaaccgcgccgccctctccacccgctgggatgcgctgtccgtggagctgaccaatgtgttccagcagggcgcgggcgccatcctgggcacggtggtcacgcgtgacgcgggcctgctgagcgtatatggcgtgtatcacatggtcacggtagggctgtggggcatcctgaagatgggcaccacaggcatcaattccatcttcggaaacctcctggtcagtgggcgcaaaaccgcatttcagcgggcgtaccgcgattttgaatgcctgtattacatgctggtgagcattctcttcggtgcggcggccgtgctgatcgtgccctttgtgacgctctacacccacggcgtgacggacgccgccaactacgatgcgccgcttcttggcatgctcatcatcgccgaggcggtcaccaaccatgccaaaatgcccatggacctgatgattaccaccagcggcaagttccgcgaggtacggtcccactgcttctggcagatcgcgctgaccgtggtgtgcggcacgggactgggccttctgctgatgccctatggcaccatgcgcgcgctgtgcggcatcgtggcgggcgtgtgcgtgggtaacctggcacgcacggtgttccagctgcgattcattcccaaagaggtgacgggtattgcctggcaaaagacggcctggcgcatcgtgcgcatgttcgtaacgacggtcctcatcgcggccccgtgccttttgctggtggacccgccgcagcgctttttctcctgggccatgtatggtgtgatgctggtgctctatgcttcggcagtcacgctggccgtcacctggctgttcgaccgcaaggccctgcgctcgctgctggagcgtctcaccttcatgctgcggcacatcggtcgctgaccgaaaaggaggcgctggcatgccgcgctacgagctgatcatctccccggcgctggacggccgcacggtgcgccaggcggctatgggcggcctgcacctgagcggcggacagttcaagcgcgctaagtttcatggcgcgctgctgctggacggcatgcccgtgctggcggaccgacgcgtgcgtaccggcgagcgcctgtgcgtggatgtgcccgaagccgctttgcccccgcccgaaccctttgcgctcgccctgcgcgtcccttacgaggatgcctatttctggatgatcgacaaacccgcgccgcttccctcctccagctcatataaaaaagagggccccacgctggagaatgccctctatgcctatgcgggctgccccgaaggctttgtgtaccggcccgtcaaccggctggacaaggggaccagcgggctgatgctggctgcgcgcaccgcgcacgcgcagcacctgctgcaacgccttttgcacggatcggaattcatccgagaatacctggccgtggtcgagggcgcgccgccccagacggagggcgtgatcgacctgccgatcggcaaggcggacggcgcgaccatccgtcgcgaagtgcgcgcggacggaaagcccgcacgtacctattaccgcgtgctggaaaccctcggagggcgcagtttgctccgactccggctggacaccggccgtacccatcagatccgcgtacatctctccgcgctgggctgccccgtagcgggcgattttctttacggaaccgagctggacagccttcccggacgctttgccctgcacagcgcgctggtgcggctgcgccatcccgtgaccggggaatggatcgagcgggaaagccccctgccatcggagctttcggtcctgctgagacgggaataagcaccgtttacgcaagggtcttgtcgcgggccagcttgtcgctgccctggaagataaccacgtctcgccggatgaattcacatttctccagcatatgctgcatgcgcagattgggaaggccgtatcagcgctgagactcctggttctccgcggcaggcacagccgctcgttcagggcgctaggctgcggccgctgaactacgacccaaggaccatgtgttgcaccaccgcatgcggtttcagccttcgatgacgtcataggccggctcgccatcaaagtccacgcacatatgcccagcgatggctccgtccagcttgaggacaaatccctttccttcctgaatctcctggcggaggggctctggttcggggcaatcatccggtctactgaacgaagccctgctcgctttgaaatgccctgcccttccggataatcgacctgcaccccagaagttggacaaggaagccaacgaatggggtgcagaaatctatgggtaaagtatcgttcagtgaggaactaaaattagaggttgttcagtatgtgctggaaggacatacgcattaaagaagcatcagagaaattttgtggatcctgtacgccgattgaaaaatgggtgaacctgcataagttttatgacgccataggacttttaagccgaaatctgggaggcaggcaaggttgagccaaatttgctggcaagaaatttccatgcagaaaggccaaatcagaaatgggtaaccgacgcgaccgagttttccctgtttgggagcaagctttatctctcgcctgtgcttgacctgttcaatggtgaaatcatccgttatgccatcagcgaacgcgccaattaccgtcagttggatgagatgctggatgagacttcttccgactcccggatagcagcggactaatcttccattcggatcagggggacaatatcaaaacgcccgctatcaaaaaaggctgttggaaaaaggcattcgacaaagtatgtccagaaaagggaactgtctggatgcggttatggaagacttctttggcctgttaaaattcaaattgctttacctgcggacatttcaatcctaaaacgagttttatcaggaactcatcgtttctcttgtctggtgaagcaatctttcatgagcctttttccccttgacggttcacttttatttttattccctgcatcctcgtatacttttgcttcatacgataaacctcctgttgcaggttgtttcttacattctacaacaggaggtctcttttttcatggcccgtttaaccgggtacagtctggtccgtacgccttgcatcgggtttttgttagacaaaaagaccgttgactcgattttgtcaacggtctggggaagtgaagtacctctttactttgcggaaaggctccctcaaagcctaacgctttaggtagagaaaattacttcacgaaaggattgtagatcacttcaccggtttccagatcacggctgaagtgcttggcatagtcccagcacagacggccaaattcctgatacaggccatgcggcagatagtcagtgatgttcaggccgaccatggggataccgtcctcgttgtacaaataccacgtgcggttcatgtactcattgttcaggaacgtttcggtgtacgcatcaccacggaagccggacatcggataggtttcgaagtcatattcgatattttccatgccgttgagagttaggtattcattgatgcggttctgataagaagtattgatgtgttccggctcgtaaggatcatccgggatcggagtagccgcaaagccatcgacaccaccgtaaccgcagaaatcataagttgcagtggtgaagaagatgggcatatccacatcgtctgtctttacaacttcgtccggggtattaaagatagctgccgcattcggacaagcagccgcaaagatcctggcgttgccgttgatggcatgcaatgtagcgccgccgcccatagagtagccggtgacatatacacggctaggatccagcgccgggtatttctccaagaaatattctaccacggcaggcaggacatcctgaccaacggtgaacatttcgccatggatcggcgcaatcatcgcaaagcgctcttcgccagccagtaccatgaatcccatctcatccaggaactgcagcgggtcgtcaccgccgccatggagcatcagccacatcggcacagagtgttcaggagcagtgccgtttttgacttcctcaggtaccacttcataccaagtatcaatataagctccagtctgggcaggacgtccgaacaggccagtggttccctcaggaatgctgtaatccttgaaggtatccatacccacaaactcttcgatcacgagtccatcagcggtcttatagtcgaagaatgcattacgggcaccgagcgaatacggagcagaattccagttgccgctagtgaagtccagagaataggtatgcagccccggcagaacaactggcacgcgcatggtcttaatcagcaggttgtagtagccataattgatctcagccgccagatcgacggcgtcggtgtattttaccataaccttctgaagcgggagctcctggttaaagtagcactcaacatccttcacatagctgtaacgttcggtctcattgacttcctgatacttggtcaaggcggtcttggaggggtttaccatatataccgggacaacgccggcgacatcgtggatgcgatccatattgcctccgatgaggatcataccggcaaggcgagtcacatcatcaaaagtcggcgcgatgaagttgttgatgaaggtcgcgccaccatcgataccgatcacataacgatacgtggtgccaccatagtaggcaccttcggcgcatgtaaacgtctggccatcgactgtgacggtaccgcctaaattgcagctggcagtctgcatcagatagtaagcacgggcatcgacattggagaaggtttcgcctgcagggttcaccagaataatgctacctttggcttcttcgataatgtctatcaggcctaaagactccagataagccttcgcagcttccttgttttcaaactttgtatccgtgtaaacctggagcacggtgttcttgcggtaaccggcactggtcgcggaccagcgggcggcggaacgatagatataggtggtaccagctgggtactccgctagacaggggtcagagacataagagctgcccagctctgccgacattgctacagggccgtttatacaagcctcttcaaaggtttcaaaggttgacgggttgctggaaaactggacctgcgcaagggagatattcgccgttatgcacaggcagaacaccaaaaccagacaaagtagttttttcacaagaattcctccttttatgtatgttgctattcaacatcatcgaatcgccagtgtttctcccgcccccctttccctgaaaaacaggcaactccatcaaattgaattcgaataataataacaacaggaaccgtataaatacactttgattacgttatggttctctcatttattccattttatgtatacattgttttgtctcctttctgtcttatattatttccccaaagccaccctgagtacaggtattgctgagctcagtgccaagtccttatgtcagcaactaacgaacataaggattatacacaatttctcccgtagtcagatcacggctgtagtgtttcaagaaatcccacaccatatttgcatactgcggatatagacaatgcacgatgtcatcgataaacgtcaatccaaccatcggtacgccctgatcgtcggtgaaataccaggtatgcatggtgtacgcacccagcttggattccttgtaaccatccgctgcaaaaccggatgtcggatacttctcaaagtctgccgcaggcagcggctcaaggtcattgagaagcttgcaggtgctgagcagattatagaattcttccacaatattcttggtgtcagggtccacatttttcggactgtcatactcagaggtcgaaataataaggggaacgttcacgttggcaaatttcgcgacctgttcctcggtgggcgctacgccggcaatacccgcctggggatatgcagctgcaaaaagttccggcgcaccgaagattgcttcaaaagatgccatgcatcccatggagtatcctgtcacgtatacacgagaagcgtccagtgccggataagtttccagcatatacttcaccagttgcggcaatacctgtgaaagtacggactggccgttcgtcgcggttgtgtgcaaagaacctttttctggcgcaacgattgccagacgctctttgccagccagctccagaaaaccctggccatccacatattgacgcggatcatcgccaccgccatgcaacgccagaatcagaggaattgagccttccttcgccgtaccattcacgatttcttccggaaggtactcataccaagtctgcagatactcgccagcctcggtcttgatatccgaaaaacgatcatcaatgcggacgaactcgtagatgccatccatagtcacaccgttaatcagcgcattgcgcggatccagagaatacggcgcagaatcagcaccgtagccctgatagggtgtagaagccgtaaacaaaccgcgttccatctcctggccacgcatagccttgatgaacaggttgtagtaagcatcctgaataatggccttcgcatcaggctctgcaatgttcattgaaacgaccttgcgtaccggatatgcctgattgtaagctgtcttcttattgccttcgatcagtatcgcatcggtctcatttgcctcttcatattttgcgatcacagactcgggggcatttaccagataaaccggcacaatgtccgctacctctctgatgcgttccatattgcccccaatcagcaacataccagcaatgcggctcacatagtcgaaggtgctggcaacatagttgttgaggaacgttgcaccttgccccagtccgatcacatacaggtagccatagccaccataataggccgcatctacataagttacctgctcgccatcctgaataccggactcattaatgctaaacaaagcagtttgcaacgcatagtaatgcttctgatccatcgcagtaaaaccctgctcaggatcactaggggttactagaatcacgctgccgcgggcttcctcgatgatgtcaatgagccccagatccttcagataggtcagagcatcatctttcgtcgcaaaagactcgtccgaataaaccaccagattggtatttatacggactgcagcattgcggccatacatgtcagcgctacggtaaacgtaggtagtgtctcctggatagtctgccatcacaggatgtgacacatacgtgccattgctcaggtagggctgcattgccgccggagcattggcgcgaacctctgtcatggtttcgaatgtggaagcattgccgagatttcccgtgtaattcagcgcaaaagcgctgttggagaaacaggcagtcaacacgagtaacagcaccagcatcagtgtcatttgtttcttcatattgcttcttcccttccaactttgactgtcatttacaaaacaaccttcgagttcacggtatttcggtcttacatgctgatgaatggccaattcgtcagcttttttcattcctgccgattgatttgcaaatctttatggcgattataacaaggatatttttttgctgcaatagacgtacgctgaatcaacgtcggagtctactctattaaaatcaaacttaaatttgaaagaatttttcattgtcataacagcataatatccttcttttttaaaatgaaaatgaagtcgtcgatctgcagtctattggaacaccaaacgctcgaggtctttaccacgacgaaagggaaggcatatcccccagaccatcgataaaggaccaactccactaaggaagagtttcccaaaggatacatgaaagaagagcgcaccgtccttgcaaagcatttcatgttccatacaacagtgatgaaaaagaactgcttgtatatgctacggattccgagcgtgcaggtatagcgcagaccatgtggctctttgacttctatcaagaactgttcaatgattttcttgtatcaggcgtagttgcgtttgcccttgaccgtcttcgcaaatgcatctgcctgcttcccgtttcatttgtgttctaccgaatctctccggccatctgtcataggtctacttgcccggcagtcctcttcgctggctttgttcaattcttcaaacatatcttggatgcttgctccattacaaccgttttcttcttgaacttattggtcttagactagacatggggaaatgcgtatatagaatttctttttacaggtcttttttatgacttctcagagtatctcgtagaagaactgcctgaaatgttgtttccctgaaataggcgcttccgatctgtttagcatgccgctctgtcccgttttttctcaaattaaaaaggaccgttgacttaaattggtcaacggtctgaggaagcggtcgctattgcgcggacaattccttcttattccattttggctccgggtgcggtttattcctcatccggccatttgagcgggtattcctccacggcgtaatccaggcgcttgccgttttcgcgcagcgtacgcaggacgacctcaatgctgctgtcatcggtgtagggggtgggggcgaagtcattgtaatccgtgcggctggatatacggcagggaatgatcttgaaggcctcgctggtcgcctcgccgtcgcgcaggcgcatgcggatctgaaagaggaaggtggtcatgtcgctgggcttgttgttgcccgcaaaggagaaattgcccagcgaatagcagatatacttgccgttgtagtactcaatggggttgatgcggtggctatggtggcccacgaccaggtcggcgcccgcgtccacggtggcgcggcccagacggacctggttgtcgttgggatagtagtctttctccgcgccccagtgatagctgacgatcacgatatcgcagccctgatcgcggagggcctggatatcgccgggcaccttcgcaatcaactcgtcatgccgccccccgaaggtctggtaggccaggctgccgatcttgacgcccttgacggtgaggatggcaggctcaccctcgctggcgtagggaatcccggcggccagcagggtcttcttggtttcctcaagaccgctgtcgcccatatccagcacgtggttgttttccagcgacaccgtatccacgccgcccgcgggcagcatgtccacatagctgggatcggcgcggaaaaggaactcgttccccgtcttgtcggggttgcggccctcggtggtgagcgtgccttcgaagttgaccatggtcaggtcgtccgccagcagaatgtcgcgcacattgcggaagggaaaattgatgtcgcccttctgcttctccaattccttttcaaagatggaggtcccgctggactgcacgttggagccgatggtcatgtcaccggcaaacgtcatggtgagcagaatggacccgtccgcctcgtacacgggcaagctggggtccaccgtcggctccggcgttacctccggctccggggtctcgcccacaacaacctcgccgttttcgtcaaagatcgtgatggaaacctcctccgtgtccccctccgaaagggcggtcaggcacagggtcaggcacatcaggagcatgagggcgagggagaagcgtttgttcttgggaatcattcggccacctccgggttctggtcagaaaggaattacagggacgccacaaagtccgccatgcggtcgagcgcctcggtgagcttggcaatgccggtggcatagctgcaacgaatgtagccttcgccgctggcgccgaaggccgtgccgggcacggtgacgaccttcttttcgcgcaggagccgctggcagaagtcctcgctgctcaggccggtcttttgaatgccggggaacacgtagaacgcacccaacggctcaaagcagctcaagcccatgtcgcggaaggactccaccatcagccggcggcgctggttgtagctttcgcgcatggaaaccacgtccgcatagccgtcctcccggccctgccgcagcgcctcttccgcagctacctggccttgtcggggcgcgcagaggatggtgtactggtgaatcttgcacatcacatcggtaaaggcggcgggcgcgcacagataacccatgcgccagccggtcatggcaaaggccttgctgaagccgttgagcacgatggtacgctcgtgcatgccgggcaggctggcgatgctggtatggccttcctcggtgtaggtcagctcggaatagatctcgtcgctgatcacgatcaggtcgttttccacaaacacgtcgcgcaggcgttccagcagcgggcggtccagcaccgcgccggtggggttgttgggatagggcaaaatcacggccttggtgcggggtgtcacggcggcggccagcgcttcaggcatcagggcgaaaccgttctgttcgctggtgggcacgggcacgggcacgccgcctgcaaacaccacgcccggcgcatagctgacgtaactgggttcggggatgagcacctcatcgccggggttcatcagcacgcgcaggctcagatcaatgccctcgctggcgccaaccgtgaccagaatttctttcccgggatcataggtcaggtggtagcggccctgcatgtagcgggcgatttcctcgcgcaggctcagcagtccccagttgctggtataggcggtttcgccgtccaggaggctgttgatggccgcattgcggatgtgatagggcgtaacgaagtccggctcacccacgcccagcgagatcgcgccgggcatggtggcggccacgtcgaagaacttgcggatgccgctcttgggcaccgccagaatggtctggttcaggtagcgcgaaggttcgaagctcacgccgtcaccaccagcctcttatcgccatcattgccttcaaagatgacgccgtcgcttttgtagcgcttgagcacgaaatgcgtggccgtgcccgtgacggtttccagcgtgctgagcttggtgctgacaaagaaggccagctccttgagggtatgcgcctccaccagcagcagaaggtcgtaggccccgctcatgagatagaccgatttgacctcgtcgaaacggtagatgcgctcggcgatggcgtcaaagccctggtcgcgctgcggggtgacacgcacctcgatcatggcctccacgcgctcgcggtccgtcttgtcccagttgatgacgggcgcgtagcgcaggatgatgccgctgcgctccatgtcgtcgatcacggtcgctacggtctcaacggtagagccggtcatcactgccaatttctccaagggcaggcggcaatcctcctgaagcagatgtaacagttgcatttgcaggctttgcatgggaaacctccttataagcgcacagcgcctggcggtgcgttgcgctgaatcagctgaatgcgaaggaaatactcagaacaggccggtgatttcgccctgctcgtccacatcgatgccaagggcggcgggaaccttgggcaagccgggcatggcgatgatgctgcccgcaaacgccaccacgaatcccgcaccggcgctgagccgtgccgagcgaatggtgagggtatatccctccggcgcgcccaggcgggaggcgtcgtcgctcatggaatactgcgtcttggcgatacacacggggcagctggcatatccgtcagcctccagctgcgccaggtccttgagggcctgcggcgcgaagctcacctccgcggcatgatagatgcgggtagccaccgcgcggattttgtccttgagcgggacctcgtcgggataggtgtagctgggaaccggcgcggggttggcgtcggcagcttcgcaaaccagctttgccagctccgtggtccccttgccgccctcggcccagccgttgcagggagcgcaggccacaccctgctccgcaagctgagcggcgaccagatccagctcctccgccgtatcggtggcgaagcggttgagcgccaccaccacaggggtctgccatacctggcggatatttttcacatggctgagcaggttggccataccggccttgagcgcttcggggttgggctgggcataggtgcccttggcggccccgccgtggtgcttgagcgcgcgcaccgtggccaccagtacgatcacgttgggccacaggccgttcatgcggcatttgatatccaggaacttttccgcgcccagatccgcgccgaagcccgcctccgtcaccgtatagtcggacatccgcagcgccagccgggtggcggctacgctgttgcagccgtgcgcgatgttggcgaagggtccgccatgcatcaggcagggggtgtgaccgatggtctggatgaggttggggctgaacgcgtcgcgcagaagcgccgtcatcgcccccgccgcgcctacttcgcccgccgtgaccggcgcgccctgatacgtgcgcgcgaccacgatgcgccccagacgcgccttgaggtccttgaggtcggaagcgagacagaaggtggccatgacctcgctggcggcggtgatgtcgaagccgtcctcgcgcggggtgccgttctgcgtgccgcccaggccctgcacgatgtggcgcagctgccggtcattgacatccaggcaatggcggaagcacacccgccggggatcaatgcccagggcgttgccctgctgaatgtggttatccaccatggcgcacagcaggttgttggccgcggtgatggcgtgcaggtcgccggtaaagtgcaggttgatgctctccatgggcaccacctgggcatagccgccgcccgtcgcgccgcccttcatgccaaacaccgggcccagcgacggctcgcgcagggccagcatggcgtttttgccgatacagcgcatgccgtcggccagggcgacggacacggtggttttgccctcacccgcaggggtggggttgatggccgtgaccagcaccagctttgcgcgctgcggcaaatccgcatatgcgcgctggtcgatcttggctacataacgtccgtagggagaaacggtctccggcagaaagcccgcggtccgggcgatgttttcaatgggttccagctttgcttcgcgcgcgatttccaagtccgtcgccatattgtgcacgcacctttctgcacatcgaaagtaaggaaagaagaaacagcttgccaccgcaagcgaatactatcagtatacccgaaaatggcagccctttcaagggggcggggatcccgggcgccggcgccctcctttgttggcaaaagccgtccccggcacccgggcgtgtgcccgcgcaggagacggctgtatctatgggattgtcaggccctgggttcctccgcaccggcgctgccgcgggccagcgccatcgcggccgcaaaaccgagggcaaaggtgaccaggctgatcaggatcatgagccagctgacaccggtcatgtccgtgcgcagaaggatcgccacgggcgaagccaccaccagtcccagcacggcgcaataggtctgcgtggggaagcgggacaatagccactcgatcagcttcgccacgccaaagatacccagcaccacgcccacacagaagggcgccagcatcagaaccggaccgcccatggcggcaaagtccagtcccaatacagcgtttttcagggtgtccacggcgttgagcacgggatgataataacccagcagcatcagcaccatgctgcccgatacgccggggatgatcatcgtggcagccgcaaccgcgcccatcaccagcagaatgaccatctgccctacatccaccgtgatggtgtcggggttggatacgtcgccggtgagcgccatggcgatgatgcccgcgaagaacaacacgaacaccccgatggaaacgccgcccagctttttatgccggatcttggccagcagcgggttgagtccgcccaggatgaggccgatgaaggtggtggaggtaggcaagggatagttggcgaaaaggaatttgagcaggctggccagcgccacgatgccgagcagcatgcccacagcgtaggggagcagggttttcacgctctgcctgaactcgctgaaaaggtgggtgatgcagtgaatcagcgtgtcataaatccccattgacaccatcatcgtgccgccggacacgccggggatgatgtttgccacaccgatgaccacgccgcgcagaacctgattgatcagtttcattcgctgtgatcttcctttcaaaaaatgggatgcgtcccagtgtatcacctttctgccggagcgtcaacgcccgggcccgaacggttccacaggccgtactgcgcctcatttttcagagcactgagcatgctttcctttaaattgggataccgcttgcagaggaaggacagcagatccttcatctcctggcgcttggtatggccattggcgggacagggatttttgataacgggcaggtccagctctcgccgcatgtggatgatgtgcttttccggcacatagatcagcggacggatgaccgtcagattgctgcggctcatgtaggagcagggatggaaggtgtgcagacgcccctcgaaaatcacgctcatcatcagcgtctccagcgcgtcctcacggtgatggcccagcgccagcttgttcaggcccctgtcggtacacatgtcgcacagcatgccgcggcgcatcttggcgcacagcgcgcagggattggggtccttgcgccattcaaagagaatctcgtaaatctcggtatgacggatgacgatgggcacatccagctcgcggcacagcgcctcgatggcggaggtatccggttgttcccggcccatggtcagcatcagggccgtcatggtaaagtcgtgatggcgtacgtagcggtacagcgccagcgcgcgcaagagcagcaggctgtccttccctccgctcacacccacgccgatgcgatcgcccggctgaatcatatgaaagtcctcatccgcgcggcggatgcatcccagtgttgttttcacatttcctcccgtggggtcacacctacgtatacggtatccgccttggcgggataggtgtcgctgctgaccttttcgcggccggtttccacaccgtccacataggtgatcagataggcgtccaccttgtagccctcgcggcccttgatggttttggtttcatccacataagtcacgtaggtggcgtcctcgtcttccttcatgatggcttcctccggctttgggataacctcgacggtttccgtcaccagctcgtaggtggtgccgttgagggacgggccgtagaggcgcacctcgcactgaaggttctttctgcccgaaccgatgacatgcgccgccagatacaccgtgccgccggattcgttgcggaaggaaaagtcgatctcgcggccgcgggtgtcgctgacggtggcatccttgccgtattccgtgtagctgacggccatggaatgcggctcacggctgaggatggtcatgccgccctggatagccgccagatacaccgtggtgctggcctggcatacgccaccgccccacccccactgctcggtcccgtaggcatattcgatggcgggcaaaaagccggtactgaagttgcggggaccgacggtgtcgttgaagctgaacttgctgccgttgggaatgctcattccgttgatcttggcaaaggcgatacggatgttttcggtgcggtcctcggtggaggcgctggaaatcggcgtggtggcgcggtagcgcagctccacggtcttttgcagatcggccacggtcacgttgggcgcgatggtctcgggctcaagcagcacctcgccgctttccagattctgcaccatctgcaggatgcgctcgcgcacggcggtggtgtccagccgctggccgtagacctcctgctggaaggtgaagggattggcgctgtcatcgggattaaagctgacaatataggcgtcgctgggcgcacgataggcagcggtttccagcgtctgcaagatctcgtcgatgggggcggtattcgcgctctgctgagcgctgaaaaaggcgttctgggtgttctgggccgcttcgatctcttccttcagctggaagatgtccttgcgttcctcgccgtctacatcatggccgatggcccatgcagcattcaacgcagccgtgggatcaaaggagatgcccagcgtctgggcggtgatgtccttgtactgcccgttggcgttgcgcaggcgcacataccagccgttttgcttctggttcacatggtcccagaccagttggctcccctccgcccaggtcaggccggagaggtcgatgccgtccacgctcacgttgtccagaaacacgttgagatacgggcgcacatcgctctgaattttccagatgtagccgtacacacccgcaccggccagcaggatcagcaccaacaacaccttgatgagctgccatttgaggctgcgctttttgcacggtttcctgccctttccgccggcgtcccgcggcgtccggggcggctgagggccccgcggcggcggggaggcgcgccgcttctgcggctggacgggctgggcctggccgggcgcgggcacataccagttgccttgcgcatcgtaatagccgctctttgtctgccccggctggggacggtatccctggttatacatcctgctgctccttttgcaagtggtctatcggcgcggccagatccaccgccgccatcagcgcggcaatgtcgcgctccaaggtacgccagccgcagggcaggcggcccatgcgggcgcgtgtgcccgcgtcgccatgataatcgcttccgccggtcaccagcagcccttcctcccgtgccagggcgtccagcagccgcgctccgcgccgtccggcagagggatgatacgcctccacacccctgaggccgcgggccttccattcccgaatgagcgcgtaaagggtttcccgttccagctccaggcgcatggggtgcgccagcaccacaaccagtcccatgccgctcagtgccgccaccgtatcgccggtgggaagggatgcgcgcggcacatatccgggccgcccctcggacaggtagcgatcaaaggcctgatgcacgtcgcgcgcctggccgctttccaccagtgcgcgcgcaaaatgggcacggcccacgctgggaatgtccggaagcgcacgcatcttgggcgttacggtcaggcctgcttccgccagccgatccagaatgcgcccggcgcgcatccggcgctccgcggatacgccggccagaaacgccgccagaggtgcgtttcgcccactggcgccataggccagcagatgcgtgcgtccgccggggccggtgctgatctccacgccgggaatcagcgtgagcaagggctggccgcgcgatgcacgtgcccggttttcctcccggacggcccgtgccatggcgtccagcccatccaccgtatcatggtcgcacagcgccagatgcgtgatgcccaggcggccggcgatggcacaaagctgctccggggttttcagcccgtcggaataactgctgtgcacatgcaggtccgcccggctcacggcttcattccccgtccttgggttccacaaagggatcgccatcctcttgcgcatcctgggtggcaaagccgggggtcaccgcgccatcggtctgcgcatccggcgtgggatcggcctgcgcttcgctggagggctgcatcttttccacatcggtcatgggcggaagcggctcgccccgcatcacgcactcaaagtccgcgcgggtcagcgtgtcgcgttccaacagcgcctcggccacggcgacgagcttatccatatgatccttgagcagcttgcaggcgcgtgcgtagcactcgtccagcaggcgcttgacctcctgatcgatcgcggcggcgctctgctcgctgtactcgcggctctgaccgaactccatgcccacgaagacctcctggtcgctgcccaggtacatggtgccgatggaatcgctcatgccgaactgcgtcaccatccggcggcacagctcggtagcgcgcttgatgtcgctggaagcgccggtgtagatatcatcgagcgatacatgctcggccgcgtgtccgcccagcgccatggtgaccatgcccagcagggcggtgcggctgtagttgtcgttttcttcgctgggcaggctgagcgtatagccgcccgcctggccgcgcggcacgatggtgaccagatgcacgtcgtcgcattcaggcaggagattggcaatcaccgcatgaccggcttcatgataggcggtggtcttgcggtcacgcggggttaccttgtggctgcgcttttcgggacccatctgcacgcggctcaccgcgtccaccagatcctgctggctgatctttttcttcttgcggcgcacggccaaaatggcgccttcattcatcacgttttccagatcggcgccgctggaatagggcatgcgcttggcgatgttctccagatcgacgtccttttccagcgccttgccgcggctgtgcaccttgaggatatccacgcgtccttccaaatccggatagtttacggtcacctgccggtcgaagcggccgggacgcagcagggcggggtcgaggatatcgcggcggttggtggccgccatgacgatgacgccttcgttcatcgtaaagccgtccatctccaccagcagctggttgagggtctgctcgcgctcgtcgtgcccgccgcccaggcccgcgccgcgatggcggcccacggcgtcgatctcatcgataaagacgatggaaggcgcggccttcttggcctggtcaaacagatcgcgcacgcggctggcgcccacgcccacaaacatctccacaaaatccgagccggagatggaaaagaagggcgcgttggcctcgccggccacggccttggccagcagcgttttgcccgtgcccggagggcccaccagcagcacgcccttgggaatgcgcgcgcccatatcggtgtaagccttggggtttttgaggaaatcgaccatttcctgaagctcttccttttcctccttggccccggccacatccttgaaggtgatgggatttttggagggatcgctcatgcgggcacggctcttgccaaaattcatgaccttgctgttgccgccgccctggcgcgccatgatgaagtaccaggccgccatggtgatgacgatcatcaggataaagggcaaaaactccatataccacggcgtgaccacaggcgcgcggtactctaccgtgaagggcagatcacttacgctgacctcgtccagcgattttccctgggcggtggcggtcatctgccggacggtatcgataaagtccgatccgatggtggtttcaaagtcgtagccgcgctcgggaaaatccgcatcggatacggtgccgttgcggtagaggcccaccagcgacgtgccgcgaatggccaccgctttcacgttatcctcacggatggcggtgagcagctcgggatattcgatgcggcggctgacggattggcccagtcctccgttgagggccacggcgatcaggataaacgcggcgaccagcgccacatagcccatcattcctcgttggttctttttcaaaatgaaagtcctccttgcgttcagggcgttttcccgcgtcttggggaatggcaaaccagcgtcgggacacgccgaaaccattatagcataggatggccccattgtactacaaaggattttcgtaaaatataggaaggagcgaaatccgggacctccgaccaccttttttggcgtgaatgcaaaacaggcggaaaaaagtgcttgacattttcctcgccatcccctataataactttcgcactgattgcagtggggaattgtgtaatggcagcacctacgactctgactcgtattgtctaggttcgaatcctagttccccagccaggctccatggtcaagcggttaagacgtcgccctctcaaggcgaaatcaggggttcgattccccttggagctaccagtgcgaaagcggatctatcggtttgaaccgataggtccgtttctctattttctatgtccgcgccgcctgcggacagaaccagcgccttttttgccggaggcaaagcgatgaacttttccctgaatctccccacctggtttccccttgcgccaaaggtgcaggccggagcggccgatgcgcctgacgagaaggacgcatccccgcgttccgccggtctggggcccatcaccggccgggacctgagtgacctcggcagccttgtcaagcccttcgtgcgcgatccgttcaaccgcctgcgcccgcctttttcgcgcgaggcggccgagctgtcgctggagctggccagcatggcttacacgctggatctggaaccgtggacggaggcggggtggaacgatttttccatccagatcgacgatgacctgcagagcggcctgacccgcaggagcagcgcggacggcgagcgcatgcgcgcgctgatcaatgccctcaaggtgcgccgcgccaaggccgccctgcgcgagcgcaaccccgtgtctcaggtgatgagcgccctgcgccagcgggagcgcagcgataccatcaaggcggtgtgcatgatgcaccccctgccggaaggccggttcctgctggccatcggctttatgggtaccggcaagcgcttttacgactggatttccaacttccgcttcaccacggaggaagggttccacaaggggttttatcagctgtgcacctattttgagcagggcgcggaaagcatcgtctttcccgccacggcaaaggcgctgggcctggaaaagctcaccctgggcgaggtgctttccgagatgaagagcctgagcagccgcttccgcctgtggatggccggtcacagccagggtgcggcggtcatgcaggtgttctgccaccggctgatgaccgactggggcgtgcttgcgcagaatatgacgggctatggcttcgcttcgcccactgtggccacgggacgcctggtgcaggacccggccgcctatccgctctatcacatcctcaacagcgacgacatggtgccccgcatgggcgcgctgctgcacctggggctgtgcctggaatatccggccgacgatgatttccgggagcgctgctatgatctgagccccctgcccgccgatgtggcggcgcgtctggcgctggccccctatcagcgggccatggtcaacacgccctccatccttttgtacagcacggcatttctgcagtgcgtggcagaggaaaagggcgaggagggcctcaacagcctgctggaccgcaagtgggcggtgcctgccgtggaccgtatgctccaggcagccggaggcaaggccatgaacctgcttgaccgcctggttgaaaacgcacagaacggccatgccgcgctcaccggccaacccatggatgagcaggcccttgccgccctgcgggaccgcatgcggcccgtggtgcatgcctttcccttccggcggctgatgggagccgtgctggcttactgcataccgccgcaccgcttggtgcgccatcagcaggatggcgcctacgcggtgatcgtcagggaggggctggaccgcctgcggccgtttatctggatgaacaatggagaagctctgcccgccaagcgctatgggcgtctgaccctgtgcgcacgaaagacggaggtggcgcaccagcacgcagtccgcgccgtgcaggcagcccgcaggcgcggcatgggcgtgcgccgaacgggactgaccgcccgcagggccggggcccggcgctgaagattcggaagcttcaggcatccaggtcccacagcgcgttttcatagtccttgacaaaataccgcagatgggttcgtccttttgcgagaacggtatgcccctcagcttcgagccgtttcctctgctcctcaaggccgcccggatagttggcgttgagttctccaccggctttcaacgtccgccagtagggcgttttgttctcctgccgctggtggctggcccaggctgccatggaaacgaagatccccgctgtgatggggtcggtaaagtccgccccgtttttcctggccagatgcgcccggatgtgaccgacggtcagcagcttgccccgcggcacggaccgcatgatttcgtcatacacaaggggcggtgcgaaatacattttttccccgccgtacttttggatgacggccgggtcggtgatgatctgaattttgggcatgtccgtatccctgtgaagcatggcgttaaaatccttggtttcctcttttgccatttttctcgcctcctgcagcgcaagcatagcatcccgcagccgcctttgcaatgagacggttttaaaaaagtttcctgcacagtgggtacaaatctccgcggctgtttcctctggcgcacccggctgttttgcggtataatgacacggttccccatcaaagagtcggcgcgccgcgccggaaggagctacgcatgaagatatccaagcaggacgcgcttacctggttccgcttttttgccgagctgccggaggatgaggaccttttgccccatcagcaggaaatcgcctgggcggtgttttcgcagattgaggaggcggtggatgaccgtttccgccggctgaaggcgcagatcagagggctcaagacgatcggagggcgcaccttcttcgtcggagatgagcgccgcttttccgcagggtgccgctcctgcctcacgggcacgggcctgagcgccgtgcgcaagaccaacaagtgcaacctgcaatgcaaattctgctatgactacggcgtgatggaccagctcccgcccgtgggcgagggcatgtgggaaatcggcggcacgaaattccgggcggaggacatcgatctgcttttgtccattcagcaaaagccgactggcatttcgtatgtgtatctggaaccgtttatggagatcgaggaatatggccccatcatccgccgtttccacgaggcgggcgtgcatcagcacatgtacaccaacggcactttggccaatgagcagaacctgtccgagctgggccgtgcaggcctgaacgagctgcgcttcaacctgggcgcgtccggctgtgcggacagcgtgatcgaggccatgcgcgtcgccaagcggtacattccctttgtgggcgtggagacgcccatgaccccggagctctatgaaaccttcctgcgcaagaaggacgccattcttgccacggggatcgacttcatcaacctggcggagctgcatctcaaccccaacaacctcgccaactactggggcgagaacctctacctgtgccgccggggatacgtatcgcccgtgtggagccgggagctgacgcttaagctgatgaagcaggcggatgaggagggctg

SEQ ID NO: 1284 - DNA, 2008 bp, Unknown
  16S sequences of unknown bacteria
aaggaagccgtcatgccgttcgggcgcttcccgggcgcagacaccatcctggggcccgagatgaagtcgacgggcgaggtcatgggcatcggcggcgacttcccgtcggcttatgccaagacgcagctcgccatcgactactcgcttcccaagagcggcaaggtcttcatctcggtgtgcgaccgcgagaagcgcaacatcgtcccgatcgcgcatgcgctgcaggacctcggcttccagatcgtctcgaccggcggcacagggcgcctgctcaaggccaacggcctcaaggtcgagatcacgcgcaagatgcaggaacagcgccccaacatcggcgacctcatcgccaacggagagatcgacctgctcatcaacatcccgttcgggcaggagacgcgtggcgacagctaccacctgcgcagcgcagcggtgcgctacggcatctgctacgtgaccacgctcgcgggcgccaacgccatggcgcaggcgatatcggcagttcaagaggggcgtctcgagcctgtggccctgcaggacctgccccagaaggatatgtagctcatggctgagaagttccaggaaacgggcgcggtcctcaaaaacgagcgcatcgccgacggcatgttctggctgcaggtgaaagcgccggaaatcgcgcgccacgcgcgccccgggcagttcgtccacgtgcgcgtgaccggcccgtccgtgcaatttctgcgtatgcccttcgccgtctacgacgtgacgggggaggcaggcgtcgtcgacatctgctatcaggtgcttggcgagggcacccggcagctctccggtctttcttgcggcgacgagctcgacttgatcgggcccatcggcaacggctggagcgtgccgtccggtaccaagcacgcgctcatgatcgcgggcggcgtcggcgcccccgcactcaacctactcggcaggcagatggcagctgacggcatcgtggtcgatgccgtcatgggcgcgctgaacaaggagcgcctgtgctgcgtcgaccatctcgagcaggccgtgacggcaagcggcggtacgctccacatcacgaccgacgacggcagcgttggcacgaagggcttcgtcaccgcggtaagcgacgggctcatcgcctcgggcgcctacgactacgtcgccatctgcgggccgttgcccatggagagaaacgccgcgcgcccggcgctcgagaacggcgtgccctgccaggtctcgatggaaaagctcatggcatgcggcgtgggcgcgtgcctgtcgtgcgtcgttgacacggtcgcggggcgcaagcgctgctgtgtcgacgggccggtcttcgatgccgcggaggtgatctggtagccatgaaaacgcaaggcaatcccgaatgcgcgccccaggcccccgacctttcggtcaatttgggcgggctgctcatgaaaaacccggtcacggtggcatcgggtaccttcggcgccggccaggagtacgctgacttcttcgacgtctcccgcctgggcgccatcaccacgaaaggcgtgtcgagtgagccgtgggccggcaacgacgcgccgcgcatcgccgagacgccgtctggcatgctcaactcgatcggcctgcagaaccccggcgtcgaggcgttctgccaaaaccaggtcaagttcctcgagcggcaggacacggcggtcatcgtcaacgtctcggggcactcgatccccgattacgtgcacgtcatcgagcgcctcgagcaagaatcctgcatcgatgcctacgaggtcaacatctcgtgtcccaacgtggacgcgggcggcatgacgtttggcgtcgaccccgtcatggcggctaaggtcacgtccgcgtgccgcgaggcgacgcagcgtccgctgctcgtcaagctgagccccaacgtcaccgacatcgcagagatcgcccgcgcggtggaatcggccggtgctgatgccgtgagcctcatcaacacgctgctcggcatggccatcgacatccgccgccgcaagcc

SEQ ID NO: 1285 - DNA, 32759 bp, Unknown
  16S sequences of unknown bacteria
ccccgcccccgccgtacacgccgccggggacgattaaaccgcgaaagggcttcggttccacaattcgcaatagtcgccttgcggcgctacgcttgcgccatttcaacaaggaaaggagtacgcccatgtacgccatttggaaaatcaccgcgcatcccacggtggatttcgccgcggaagagctgaaaaaatacctccgcatgatgatgccgcgctgtggggaaatccccatcgcttacggccgcgctgcgacagacggcctgcgcatcggcctgatgcaggatttcgcgctggacgtttccgacgcgcaagatcccgcgctggacgacatcgtctatatcgaaacccaggaaacgggcggcatcatcgcgggttccaatcccggagccacgctgatcgccgtgtaccgctatctacgcctgtgcggctgccgctggctgtttcccggcgtggacggcgaatggatccccatgatcgagggccttcccaggctttcctatcgcaaaatggcggattaccgctaccgcggccaatgcaacgaaggagcggaataccagcaggacatgctggaaaccatcgatttttcgcccaaaattggcatgaacacctacatgatcgaattcgataacccctacgcctattacaaaaactactacaatcacaccttaagcacctgccgcgagcccgaacccgtcgataccgacaccgtgctgcaatggaagcggcagtgcgaagtggaaatccagaaacgcggcctgcacttgcacgatatggggcacggctggacggcggaaccctttggcatcagcagcctggaaggctggaaagcggcgaagcccgaggatttgcctgcggagagcctccagtatctggcgctcacggaaggcgcgcggcagccgttccagggggtacccctcaacaccaacatctgcatgtccaaccccgccgcgcggcgcattgtggcaaattacgttgccgattacgcccagacgcagaacaacgtggatttcctgcacatctggctggcggacaattccaacaaccactgcgaatgcgaggcctgccagcaaaaggatacctctgattggtacgtcatcctgctcaacgagatcgacgcggagctcaccgcccgcggcctggacacgcacctagtctttatcgtatatgtggataccttctggccgcccaagcaagaggcgatccacaacccagcccgcttcaccatgctctacgcgcccatcacccgcctatataccgaaacctatggcgaaaaggcggatatcgccaaggtgacgccctaccagcgcaaccacaacgcgcttccccagggcatggcagaatgcctgggctatctggacgcctggaaaaaagtctggcccggcgattgcttctgctatgaataccatttctggcggcaccagtacttcgaccccagcgggctctatttggccaagctgctctacgacgacattcaggcgttgcgaaaacacggcctgaacggcatcgtggaggacggctcgcagcgcagctttttccccacaggcttcgcctattatgtctatggggaaacgctgttcgacgcgcaggtttccttcgagtccctggtggaagactatttcagccacgccttcggcagcgcttggcgcgaggccctaaaatacctgcaaagcgtctgcgaacgcctggattacgcctatctctacggcctgaaatccgccgacccggccaagggcgcgcactacgccccggaatacgcgcaaaaggccgccgaagtgctggccatcaccacgcgcttcgcgcccaccgcggagcgcgaaatgcgccaaaagtaccgcgccgcaaccgtgtcttggcaattgctgcgctatttcttggaatatgccgctggaatcgccaaaatggtcatccctctcgccaacggcgatgtggaattggccaaaaaagaaaaggcgcgcttggttgacgccttctcgcaccacgaaatttatatcgaacggtattacgaccattgcctcgccagccgcgtgctggaagagatggtcagataaaaccgttttgcgtgaaacgccgcggggccgtcccaaatgagggcggcccccgcttgtcaaaatcccagcttacctgtgtatgcatgcgctttcccaaagtgtacgccagcggcgccgcaacttgatgttcctatgccgccagcgtcttgcccagtgcttccagggcgctcagcgcctcatcgtcaggggcttcctggcaaatcacgctatcgcaggccaaagaaatacctgccgccgcgcaatccgcttcccaattgcgcatccattcgccatccccccagccataagagccaaacagcgccacctttttgtccgcaaggccatccttcacggcctcaaacatcggcaaaaattcgctgtcctccaattcttccgtgcccatagatgggcagccgaaagcaattgcctcgtactccgccagcttttccggcccaaactccgccgccgtgaagagcgcgccgcccgaagcctgcgccacagcctccgccatggcctgtgtgttgcccgtgcccgaccaatataccactgctaccttacccacaccaatctctccttttttccatgatttagatttccatgatttagagcgtttggggcgttttatcccctatcgttccctacgcagccttcttcgcacaaacggttaaacgcgaaagagaaaaaccgtcctgaaacctgcgcaagtaaacatccgtgcatttgcgataacgcgcaaatatttccctggccgcatccgcgttggaataaaccttccaatagccgctaagcaggcaattccgcccggcactgcgaataaactcctgtacgtccgagagcggatagcccaaaaacacgcctatttcatggggaaacgaccctgccgctgccactcgctcgcgaaggtgcgcaagcgcctcctctggagaaaagcgttgatatccccactgccgcaaaaacgcgcgcacttcttcccgctggagttcttggaaaagcgtacttgtccgataaagatacaacagcgcccgctgtgcgtccgtgcgcagcaaagcgagcgccacgcctttgggcaacaacacggcgttcagcatctgcatttcttcttccagcaccctcaactcggccaacgccacattgaacaagcttcccagcttcagccccgcaagcgtgggcgcgccgtgcgcgacaatggctctctccagcatttctgcctccatagttagtttattctaactcaaactccaaacaatgcgcactcttgcaagtgcgcgttccccatgctccatcagttagtttttactaaccaatggcattataccccaactctcctctcttgtcaatactcacacgatatttaacaaaacacacgcccttctttgaagacaacagaaggggcgcttgcgcagcgcccccgtccaccagcttgccaaaagaatatccaccctcacagcgcctgatacagcgaacaaatgatgtccttgcaccgttcttcaccaatggcgccgctatcgagcgaaagatgataattctgcgccatcccccaatcgcggcccgtgtagcgcttgtagtacaggcggcggcgcttgtccttatcttccagacgcttttcgatgggcgtttccgaattgccatatagcttgagcacatgctgggcgcgcgtttgcatattcgcgtggataaaaacgttcaggcaatcggtgcgatccatcaggataaaatcggcgcagcggcccacgatcaaacaggggcccttttccgccagttccaaaatgaccttgcgctgaatggcccacaaaaaatcgtccgccgaaatcatattcggcatgcccgggccgccgcgctgggagagcgcataggccagccaattggaagtggacgcgtattcccctttttgttcaacaaactcctcggcatagccggtttccgtggccacctggcgcacgagttccttgtcgtaatacgcgatgcccagtttatcggccaccgccttggcaatggagcgcccgccgctgccgaattcgcggctgatcgtgataatcttcataacaatccctccattcacccatattttaacatagaaaaagccaaaaatcaagccgtcacgcgcaaaaccagcatcgcagcgcgttccaaaaatggcttcctttcttccagaaacgccatgcaaattctgcgcatagcaaaaaatgttgcactcgcatttgggattttatgtaaatttaaattcataaattccccatacgtgctataataaaaaagcaaggccacaaaaccgcggttccaggccgctgacacgttttgtagaaaggtggaagattccccatgacagaaaagcaaaagcaaatcgtccaaaatatcgacgcgtaccggcagcaaattttggaggcggagcgctggctttgggcgcacccccaaaccggctacaccgaatgggaagcgcatgaatacttggcggaaaagttcgcggcgctgggctatgcgctgcactgcgcgggagacattcccggcttttatgccgacattgaaaccggcaaacctggccccaaactgtgcatcatgggcgagctggacgcgttggatatcgcaaaccatcccgaatccgtaaacggcatggcgcattgttgcgggcaccacgcccaaggggccgcgctgctgggcgtggccgccgcgctccaagcgccgggcgcgctcgaggggctttgcggcggcatccggctgatggccgtgcccgcggaagaaatgatccagttggctttccgcgaagaattgcgaaaaaaaggcgtgattcactatctgggcggcaaagtggaatttttataccggggctatttcgacggcgtagatctcgctctgatggtgcacggcggcaattgtggaaaaaacatcgatttttcctgcggcttgggttcgaatggctgcgtagccaaaaccattcgctacaagggcaaatccgcgcacgcgggcggcgcgccgcaaaacggcgtcaacgcgcaatacgccgccatgttgggcctgcaggcctgcaatgccctgcgcgaaaccttccccgacggggattccatccgcttccaccccatcatgatgggcgtcaactgcgctgtgaacatcattcccgatgaaatgcgcatcgaaagctatgtgcgcgccagaaccatcgaagccattgtgcgcgaaaacaaaaaggtcaaccgcgctctggcgggcggcgctctggccatgggcgcgggcgtggaactgcacgaccggcccggctatttcccggaataccacgaccccgcttacatgaagctggtggaacagtgctgccgcgacctggttggggaggaacacgtgtccttcaatcccacgggttggagcacgggttcttcggattttggcgatctcaccgccgtcatgcccggcgtgcagttcacggccaccggcgccgcgggcacggggcacggcatcgattaccgcgtggcggatgccgaccggctttgctgcaattcggccaaagcgcagctttttgtggccgacgcgcttttaagcgatggcgcaaagcgcgcccaggagatcatcgccggataccagcccaagtatccctccattcaagcatacttcgcggcggtggacgccatgttcctcgacaaagacgccgtgcaatacgacgccaacggaaacgccaccctggattaccaaaattgttagagccagcctgagcgagttgtccacgattgcacttttgccccatttctgttataatggaaggggatattggaaagaacaagggggatctgctatggcagccatgatggacgcgctggtgaaaaccgcgcctggcaagggcttgacgcttacaaaggttcccgtgcccacgccgggatacggagaggtgctcatccgcatccgcaaaaccgcgatttgcggcacggatttgcatatttacaattgggacgcttggagtcaaaagaatatcgtgccgccgctggtgatcggccatgaatacgtgggcgtgatcgaagcgctgggcgaaggtgtggaaggccttgcgcccggccagcgcgtgagcggcgaaggccacatcacctgcggccattgccgcaattgccgcggcggcaacgcccaatggtgcaaatacaccaagggcgtgggcgtaaaccgcgacggcgctttcgcgcaattcttgtgcctgcccgccaagaacgtcgtgccaatggacgaggatttgcccgaagaagtcgtcgccttcttcgacgcctatgggaacgctacgcacaccgcgctggaattcgacgtggtgggcgaggacgtgctggtcacgggcgcgggccccatcggcattatggccgccgccatctgcaaaaagaacggcgcgcgccaggtcatcatcacggacatgaacgaataccgcctggaactggcgcgcaaaatgggcttgttcgccatcaacatcggcgccagcgacctgggcgaagtgatgcgcgaacaccacatggtggaagggttcgacgtgggcctggaaatgagcggcagcgatgccgcgctgcaccaattgctcgacaatatgcgcaacggcggcaaaatcgcgctgctgggcatcttctcgcgcgacgccaagatcgactggaaccaggtgatcttcaaggggctcaccatccagggcatctacggccgcaaaatgtacgaaacctggtacaaaatggcggccatggtgcaaagcggcctggatctcaccccgctgattacgcaccgtttccattacaccgaatttgagaagggctttgaagccatgaacacgggcaagagcggcaaagtcattctgtcctgggaggattgagccatgaaagaagcgctgcgcattttcgcggatgaactcgcggccatcgaggccgccggcaccaaaaaggacgaacgcgtcatcaccacgccccaatccgcgcgcatcgataccacgcgcgcgaagcacgtgctgaacctgtgcgcgaacaactatctgggcctttcggacaacgccgagctgatcgccgccgccaaggccagctacgaccaatggggcttcggcctttccagcgtgcgcttcatctgcggcacgcaatcgatccacaagcagctagaacaaaagctatccgagttcttgcgcatggacgacgccatcctctattcctcttgtttcgacgcgaacggcggcctgttcgaaaccttgctcggcccggaggacgccatcctttccgacgaactaaaccacgcctccatcatcgatggcgtgcgcctgtgcaaggcgaagcgcctgcgctaccgcaacaacgacatggccgacctgcgcgaaaagctcctcgaggcgaaggacgcccgcatcaagctgatcgccaccgacggcgtgttctccatggacggctttatcgccaacctgcccgccatttgcgatttggccgacgaattcggcgcgctggtgatggtggacgatagccacgccgtgggctttatgggcgcgcacgggcgcggcacgccggaatacgcaggcgtggaaggccgcatcgacattttgaccggcaccttcggcaaggcgctgggcggcgcaagcggcggttacacggcggcgcgcaaggaaatcgtcgatctgctgcggcagaagtcccgcccctatctgttctccaataccgtggcccccgccatctgcgcggccacgctgcgcacgatcgagctgctcaccgaaagcaccgccctgcgcgataagctgcacgagaacaccgcctatttccgcgcgcaactggccaaagaaggattcgacgtgccggagagcacgcatcccatcgtgcccgtgatgctctacgacgcgcacgtcgcccaggagttcgccgcgcgcatgctggaaaaaggcgtgtacgtggtgtccttcagctatcccgtagtgcccaaggataaggcccgcatccgcacgcaggtgagcgccgcgcattccaaggaagacctggatttcgccgtgcgctgtttcgccgaagtgaaaaaggaaatggggatctaaaaaagcgccgccaaactgacgccgccaccaaaggcgtattcccctccctcccgcgcatatactctgccgacgggagggatttttcatgcagcagaatccgcgcatcaaagtgcacacatcgattgcgccgtccaacgaggcggtgaaaacggacaagaagatacgctggcgcgttctgccgcaggcgcgcgggcagagcgcacagcgcaagcgcatcgcgcggcgggcgcgcgccgcgcagcggacccggacaaggcacacgctctccgagcgcctattgcgcaacacggcggtggcctgcgcgctgatcctggtggccatggccatcacgagcatcgacgcgccctggagccaaaaggccgcggacggcatccggcaagcgctcaccatgaacgtggaactggacgagcagatcggcgggttgcaattcgtgcaacggctgatgccggaatcggcgctggtgttctggaacctggaatccggcgcgcaaacgcccgtattgggcgaaattgcccacgaatacagcgcgcaacagccctggcgggaatacgccaccgaaaccgacgcgcccgtgcgcgccgccatggacggcatcgtggccgccgtgggcgaaaacgccagcggcgaatggacggccatggtcaaccacgcggacggcttgcaaaccatctacgccttcatggcggaagcggacgtgcgcgtgggcgaagaactgctggcaggctccatcctcgggcgttcttccggccggctctactttgaggcgcgcgacaacgggaccgccatcgatcccggcgaggttttgccgcaatgaagtggcaggcgcacggcatcgcgttccaagtccatccggcgctagtgctgatgggcgccgtcgccctgtggctgggcgagggcgaaacgctgatcgcctttgccccggcgctgctgctgcacgaagccgcgcacctggcggcggcccacatcctgggcatccgggtggagtccatcgaactgatgccctttggcgcggctgtgcgcatggaaaacttgtggcgcatccgcgccgggcaactcgcggccgtcgcgctggccgggccggcgatgaatctggccatcctgctctcttgcgccgcgctcgcctgggcacgcgttctgcccgatgcctgggcggtgctgtgcatcaaggccaacgccagcattctgctcttcaaccttctgcccgccctgccgctggatggcgggcgggcgcttttcggggcgctgaaccggccgcgcgccggcgtgtgggcgggccgcgcgctggcctgtgcgctctgcgtcctgtgcgttgcgggaatcgtctggcaacgccgcgtaaacctcacctttctcttttgcgcggcatacctgtttgcttccggcgaaaaggaattggcacaagcgcaaagcgcgccgctcatgagcctttacagccgctggggggaactttgcagcaaagacgcgttgcccgtgcgcgccatcgccgtgccggcggacattttggccgtgcaggcgcttggccaacttcgcgcgcgccgcgtgcatctgctgtgcgtattcgacgcccacatgcgcctgctcggcacgctggatgaagcggccctgcggcgctggctggaaggcgacgggcaggcgaccgccgccagcgccctgcgccgcgaacgcgcggcgcgggacggcgaatttttttctccccttcgtacacaataaaccgattgcgcaagcggcgattttctggtatagtatgcggggaggtggtctcactatgaaaaaagtactgctgtggtttctcctcgcgatcctgtcgttctccgctttcggcgtgcaggcggaagagcgcgaaaccgtagaactaaccgattttgcccagcgcacggtgcaagcgcccctgcatccgcaatgtgtggtggcgctgtccgcctccatcgccgaggcatggttgcaggcgggcggcgctttgcgtggcgcgacggaagacgcttttgaacaactgggtttggcggaggatgtccaaatcgtcggcaccatcaaggagcccaacgccgaagtggtgctctcgctcgcgcccgatctcgtgctaatcaccgacgatatcgccagccacgcttcgctcatcgaaacgctcgaagcggtgggcattgccagctacgcggtttcgctggacacgctggaagattacgtgcgcgccatgacggatttcacccgtctgacgggccgggatgatttatacgaacaaaatgtcacggccgtcaccgaggaaatcgaccaattgctcagccgcctgccggagaatgcggccgcgcccacggcgctgtttttgcgcgcgttctccacgggcgtaaaggtcaaggcgcgcgaccacgtcgtatgcgatattttggcggacatcggcgcggacaacgtggcggcgggcaaccccgcgctggaagagttgagcctggaggccatcgtcgccgcggatccgcaattcctctttgtggttaccatgggctccgatgaggaaaaagcgctcgccgccttcgatgccctgctcgcttccaaccccgcgtggggcacgctcaccgccgtacaggaaggccgggtttacgtgctcccgcgcgaattgttccactacaagcccaacgcccgctgggccgaagcctacaaatacctgctggccatcctctatccggatctctacgccagcccggcaagcgatgaagcggcatagcgcgcgctggtgcgcgctggccgcgctattggccgcgctggccgcgtgctttgccatttcgctgtgcgcgggcgcttcgggcatgagcgcgcggcgcgtgtgggaattgctgcgcggaactgccggggacgcggccgaggcgggcatcctctttcacatccgcatgccgcgcgccttcgccgcctgcctgtgcggcgcggcgctggccacatcgggcttgctgctgcaaaccgcgctgggaaacggcctcgcctcgcccggcaccatcggcgtgaactccggcgcgggctttgccgtggtgctcgcggcggtgctgtttccgccagcgccgctttcgcgcgtggcggcggcctttgtgggcgcaatgctcaccgcgcttatggtctatggcctagcgtgcaaaacgggggcttcgcggctcaccatcgtcatggcggggctcgcgctctccagcctgctttccgccgccagcgacgcgctcgtgaccctatggcccgacgcgctgctcgaccgctccacgttttccatcggcggcttcggcagcgtgacgatggcgtccgtacaaaccatcgcgccctttatcggcgtgggattgctggcggcgtttttgctcgcgcccggcctcaatttgctgctgctgggcgatgaaaccgcccgctccctgggcctcaacgcccgcgcttgccgctttatggccatcgtttgcgcggctctattggctgccgccgcggtgagcattggcgggctgctcagctttctcggcttgctcgcgccccacatggcgcgctttctggtggggaacgacgcgcgctggcaagtccctctgagcgcgctgggcggcgccatcctgctattggtatgcgacacgctcgcgcgcacactcttcgcgccctatgaattgcccgtgggcatcctgctctcgtttttgggcgtgccgtttttcctcggcttgcttttcacccgcaaaaggcggggcgagctgtagcgcgcatccaccgaatgttcatcgtgttttcacaggatgccacaacttcgcgattgcattgccatgtgctttacgttatactatatgccgtaatgaatgtgacaaaatggaggtgcgtttatgtactttttgaaagaatccaaagtatccctcatcatcagcgcgctcacgttcatcgtgctggggctggtgctgtgcatctggccgcaaaccgccatgaatttcatctgcatcgtggcgggcgcagcgctgctcatcggcggcgcgtggcaaatcatcgcctacctgcgcggcaaagctgccgcggggctggctcccggttcgttcgtcagcggcgtatttgaaatgctgtttggcctggtgctggtttttcggccgcaagtggtgcaggcggcagtgccgctgctgttgtccgtgctgctattggtggacagcatcgtgaaattgcaaatttccatcgatctcaagcgcgcgggctatgggcactggtggcaatcgctccttgccagcctggtgatcggcgtggcggctttcatcttcatcctggatcccatttccagcgccgcttccatcgtgattctcatcggcgtggctttcctggtgaacggcgtttccgacctgtggatcacgctctatgtcagccgcaaaattcgcgatttgctcgaaaaatagttgcaatccgccgcccggttgcccgccacagccaaatcgtggcaggaaccgggcggctttgcgtcgaaatacttgcggtgaaagatcctgaaaatatccgcgaggttagcatgaaagttttgattttgtcctgcaacacgggccaggggcacaatgccgcgggccaggcgttgtatgaagaattccaggcgcgcggcgtggaatgcgcgtttttggacgcgctctccctctcgaacgacgccgtttccaacgccatcagcggcgcttatgtggcgaccgtgcaaaaagcgccccacctcttcggcgggctatataaggtgggcgataaaatcagctcggaccgccataaatctcccatttacctcatgaacatcgcgcaaaccggcgcgctaaaagaatacatcgccctccacggcatcaccacggtggtcacgccgcacctgtttcccgcggaaatgctcacgcacctgcggcgcaggcacgctctcgaagccaagtgtttttccgtggccaccgactacacctgcattcccttctgggaagaaacggaaatggacggctatatcgtgccgcacgaagacctgctctacgaatatgtggagcgcggcctgccggtggaactgttgcttccgctgggaattcccgcgtccgaacgattctcccagcccatgcgcacgcaggaagcccgcgatctgctgggcttgccgcaagaccagcccatttttctggtaatgaccggcagcatgggctatggcggcgcggcccgcatcgcgcgggacctggccgcgcagatggaaagcgcgctcgtactggtgctcgccgggcgcaacgcgcaactcaaaggcgcgatcgattccctgcgccatccccgcatccgcgccatcgccttcaccgatcaggtgccagcctacatgcgcgcggcggatgtggtgctcaccaagcccggcggactttccagcacggaagccgccgtgcgcaacgtgccgctcgtgctcaccgaccccattcccggctgtgaaaccaaaaacgcagccttcttcgaatcccacggcatggcgcgcctggccaggagcgaaaacgccgcggcctgcgccatttccctggccaaggacgccgtggccatcgaggctatgcttgccgcgcagcgaaagaccatccacgcccatgccgcgcgcgatagcgtcgattttatcctcgcgcgcggggaataggcggtgcattttatgagcatcacggccaatcaagtcctgcaatttcgcttgcgcgcgcaccatctggatagaaagcgcccgctttcccgcctggaagatgtggccggcgcctgtgggctgcaaaattctccgcccggcgcgtgggaaaccgcgctgtttttccggctggaaggttgcacccgcgcacacctggaaagcgcgctataccaggaaaagcgccttttgcaagcgtggagctatcgcggcgcacccgtggtatttcccgcgactcaaagcgcggttttcctctccgcccttgccgcgcacgaaggcgaagcgccgtggatctacacgcgcggcatctctttggcgctggacgcgctccagctggattttgaaacattgctggcgcatgcggtacaggccgccgcgttgctcgacaaccgcgccatcgtgcgcaaagaagcgctggaccgcgcgctggcccaagccatcgaacccgatttgcctgcttcccgcctggcggcctggcgcgcgccttccatgtacgataccaaaggcggtgggcaaacggttggcgaagccgcggtatcgttccttctacgtccctgctctttcctggggcgcgtcgtttttggcgagcggcaaggcgcatgcccgacctttactagctaccgaaactggctgggccgcgaattgacggacatacccgatgcctcccaggcgttggcgcgcaaattcctgcattgttatgggcccactacgccaggcgcgctggaaacctggctgggctgttcgccccggcaagcaaagcgcatttggcattccgttgaagacgaaatagagccggttctgctcaacgacaagcgccactacatccttgcgcaggaccaagccgctttggccgtcccagcggatgatgccggaaccatccgtctgcttggcccgcacgacccatatttggacgcgcgggaccgcgaactcctcctgccggacgccgcgcagcgcaagcggatctggaaaaccgtcggcaatcccggcgtgattttgaaagatggcaaaattgccggtcagtggacagcaaaatcccagtcccatcaaatgagcgcgacctattccctgtttgagccctgttccaccgcacaaatcgcggccatccagcaggaaatcgaagcgtacgcgtctttccgcggtctgcagctggcaaccctgtccgaagtatgaacggcggcccgtcgcctattgctccaaatgccaaaaattcctggcggcgctctccgcaaagaaagcgccgccagaaacaaaaccatccattctttttttaagcgcccgccgccaattcctctttcagcatctgcgcggctcgctgcgccgcgccgctttcctgggccgcaccctgggcgaaatccggcttgccgccgcccttgcccacctggcgcaggagctgatccatgcggccaggcgcgctttgcgcgcgggcaaagagcaaattgccgcccgaagattcgagcagcgcatagtccgctcgctccaagaggcgggcagccaggctgcgtagcgcctccatatccccttccactgtcgcggccacaatgcggtatccttttgcctcttccgcggggagcgcgtccgccgcgtccagcaggcgctgggcgttggcctgtttgagcgcgtattcggcttccttcaagtgttcgcccatctgccgcaccaattcgggcaggcgatccactgaagtggaaaggccgagcgccagttcctccgtgatggcatagcggcggcggtaatcgcgcactgcccggttgccgcacaaaaaggccagccgcatcttgccccggctggggcgcgcgtccacgattttcaccagtccaatgtcccccgtgcgcgcgggatgcgtaccgccgcagggcaccagttcatagccgccgatgtccaccacgcgcacattttccttcacatcgccgcgcttacgcaggggcagcgcgtccacgtcctcgggaaaatagcaatggatgggcagattttgctgaatgtgcgcgttcacatcgtcttccacgcgcgcaatgtcctccggcgaaaggcgcatgcggccatcgggcagttccacgtcgatggtggaaacctctgcgccgatgtgcaagccaatcgtgaatccatcaaaaaagcggtacacagcgttggcgatcatgtgctcgcccgcgtgctgctgcatatggtcgaaccggcgcggccaatcgatgcggccatgcacgcgctcgccttcccgcagcgttccttccaccgtgtgccagacctcgcccgccacggattccacgtccgtcacgcgcgcctcgcccaaatagccggtgtcaaacggctgcccgccagaggtgggatagaaggccgagcgatccagccgcacccggttcccctgcacttcgagcacctgcgcgtcaaactccgtcaaatacgaatccgcgtaatacagcctatccgtcatcttgccttaccccaatattcccaaatgttccagcaggatcttcgcgccgatcagaatcaaaatgacgccgccgcaaatctccgcctttttctcaaaccggtcgccaaacacattgccgatcttcacccccgcgaacgagagcgcaaaggtaatcgcgccgatggaagccacggcgggcacaatctgcacgcgcaggaaagcgaatgtcacgcccacggccaatgcgtcgatgctggtggccacggccagcggcagcatcgcccggaaggacaaggaagcgtcgttgctccccgcctcttccccgccggaaagcgcctcatggagcattttcgcgccgatgagcgccagcaggacaaacgcgatccaatgatcgaccgaggtgatgtattcgcggaactgcacgcccagaaaatagccgatcagcggcataatggcctgaaacgcgccaaaatacagccccacaacggcgcactgacgccagcgcaaattgcgcaaagagaggcctttgcacaccgctacggcaaacgcgtccatggaaaggccgatcgctgtcacaaccaattcccacgcgcccatttagcgttcctcccgatcgtaattgacgccgcatcccttgggttgcatgcgttccggccgcaaccggatggaggtgatcaccagcacgatggccgtcaccaggaagggcatcatcgaaaacagcggatcgctgatgccgcgcatgaacgcgggcttatagaactgcaccacgcgcagcgcgccgaacgccagcgaacccaatagcgcccggtaaggactccaactggcaaaaatcaccagcgccacggcaatccagcccaagccgcccacgcaatcctggatccacatgccgctgcaagtgatgaacgccacatacgcgccgcccaggccgcagacgccgccgcccacaaggatatgcgcatacttatagagggtaacgttcacgcccgccgcgtctgccgccgcgggattttcgccaatggcccgcaggttgagccccacgcgcgtgtgattcagatacaggcccatggccaccgcgatgacgatgcccagatacacaaaaatgttggtatcaaagagcatggggcccaggacggggatctccttgagcagcgggatgcccgcgttggtgatccgcgccatcaattcgtcggaaacctttgccgtctgagagggcgaattgagcacgatattttccccaataaagttggccaaacccgtgccaaagatggtgagcgtgaggcccgtgacattctggttggccttgagcgtgacggtgagcaccgcgtagatcagcgcgcccagcgcgccgcccgcaaacgccagcagcagcatgaggagcacgcttccggcataatacccgcccacgaagccaaaaatcgcgcccatatacatcatgccttccacaccgaggttcagattgccgcccttttccgtgaggatttcccccagcgtgccatacagcagcggcatgcccgcgggaatggccgccgcaaggaagctcaaaaagtaagaaactgcctcgctcattccaccttgccccccttaaagcccacaaagcgcaaccggtagcggatgaagaactcgctacccagcacaaagaacaggatgatgccctggaacacttccgccgcggcgggcgcgatgttatacagcgattggatggtatcgctgcccttggtgaggatgcagaacagcaccgtgaccaccatcatggcgaggggattcaggtttgccagccaagcgacggtgatggccgtgaagcccacattgttcgccacggattccgtgagcgttttgtccgcgccggaagcctggagcatgcccgccaagcccgccaggcccgcggaaaggaacatcgtgcgcaccacgatctttttcacattcatgccggcatagcgcgcggtattctcattttcgcccaccacggtcaactcatagccttgcttggtgcagcgcaaataccaatagacgagcgctaccaaagccagcgccacaatccagccgatgtgtacgccgaacaccatgggcagttgcgcctgcgaggaaaaccgggcgattttggggaatcccatgcccgccgggtctttccatgcgccctgcgcgagcgcctgaatggtgtaaaacgccacgtagttcagcattagggtaaacagcgtttcgttcgtgccaaatttggccttgaaataggcgggaatcgcgccatacaggccgccggcgataaagcctaccgccgccatcacgagcaggagcagcacgcgcggcatatcatcgtgatacagcgccacatagctggcggcaatggcgcccacgccaatttgcccctccgcgccgatgttccaaaagcgcattttgaaggcgagcgtcaccgccagggaggtaatcaagagcggaatgcacagccgggcggtcatgcgcagcgcggtggtggtgccgacggcgccttccaccaaagagacatacacttctatcggattgaaacccagcgccaggaagaataggccgcccaccaccagggccaacaccaccgccgccagccgcaacagcatggcgcgcaggcggtttgcatcgtccgcgcgcttgatggcgcgcacgggaatttgccacttacgcatgggcaagcacctcctccagcggctggccggtcatcatcaggccaagctgttctttggttacatcctgcgcatggacaatgcccgttacccggccgccgcacagcaccaggatgcggtcgcacaattccagcagcacatccaggtcttcgccaatgaatagcaccgccacgcccttttccttctgctcgttgagaagctgataaatcgtcatagaagaatgaatgtccagcccgcgcacgggatacgccgtgatcagcacgctggggttggaagagatctcgcggccaagcagcaccttttgcgcgttcccgcccgaaagcaagcgcacggggctattcaggccaggcgtgtagacgttgagcttttccaccacttcttccgccagctttttggccgggcggcggtccagcccaacgcccttgcgggcgcaataggacttgagcagcatgttatccacaatgttcatggagggcaaaagacccatgccaaagcgatcctcgggaatgaagctcatatgtacgcccattttgatgatgtcgcgcgcgctgtgcccggcgatatccaccccatccaccaggatcgcgccgcggctgggcgccatcaagcccgcgatcgtctcgcacaactcccgctgcccgctgccggacaccccggccacgcccaggatttccccgcgtgcaatggcaaagctcacatcgctgagcacggccactttgtccgcgttgagcacgctcaagcggtgtacatccagcacattgccgccgcgctgcggttcggggcgatggatggaaaggtcgatggattcccccaccatgcgctcaatcaaatcgcggatctggatttcgctcgtgaccacggtgcccatggagcggcccttgcgcaagatggacacccggtcggaaatttccatcacctcgttcagcttatgcgtgatgatgatgatggcacaaccgtctttcttcatgcggcgcaaaatggcaaacaggcgatcgatttcctgcggggtaagcacggcggtgggttcatccaaaatcaaagtgcgtgcgccgcggtacagcaccttcatgatttccaccatttgcttttcacccacggaaagggaataaatcttgcgatcgggatcgatgtgcagggcgaaacgctgggagagttcgcgaattttcgcgtccacctgcttgcgcgagccgccccgcgtgcccagcacaatattatcgcgcacggtgagcacatccaccaacttaaaatgctgatggatcatgccaacgcccaaggcaatcgcgtcgtgcggggactggatgtccacccgctcgccgcgaatataaatttcgcctttatccggccggtagaggcccatcagcatgttcatcagcgtcgttttgccagaaccattttcgcccaaaagcgaaagtatttcgccttcgcgcaccgtcagatccacatccgaattggccacgacgttgccaaaagactttgtaagtcctttcagctcgatcgcgggcgcggctgtgtgctccacgcgcaatccctgcctttctttcttcatttccctttgtgaattactttctattatagcattttacgtgggcgcacgtcatgaatattgtgaaaaaatcgcgatttttatcgagaaaaaagtggctgcgcgcggggaatcccccgcgttacagccaccggttgtgccgaaaaatcacaatttccaccaccacaatgaccacgcttagcgcaatcaccactggatacccataggcccaatgcaactccggcatgtaggcgaaattcatgccataccagcccaccagcagcgtgagcggcaaaaaaatggcggaaatcacggccagcatggtcattacgcgactctgccgcacgccaatctgcgtttgatacatctcgcgaatgtgcagcaaatcctcgcgcaacgactccacatgctgcaaaaaccgctccgcgcgatccgacagatagccaaaagccaggcggtcttcttcctgaatcaaagggctcgtgctggcgcgcagggactcgcccatgctggaaagctgatcgtaacaggcgtgcagcgccaccaaatccctgcgccagacaatgagccgctcataaaaccggttcggcaaactcgccagcagttcttcctccatggcggaaagattttcctccacgctttgcaaaaaaatggcgtcttcatccgtccaagcatggagcaacgcgcagaaaaagcctgccaagctcaagtccagcgcaaagcggctctctttcatgcgctccagttgcccaaccagcacactctcttcgccaatcaagcaaagccgcccttcttccaagcaaaaaccgcagcgcaactttccctccacgtgcgcatgcttcacgggcaaacaaagcgtgcccagcagataggaaccgaacatttgcgccttgcaatatgccatctgcgaaaggaattgcatcatggccttgcgatgcgccacgcctttgatgtgctcgcggaattcttccagggaaaccaccgtcacccgtttggcgctttcttcgcccctatcgccggcatacagcgtttcgcccagcacatactgtttcatcgccatccctccgcctcacagcatatcacatttgccgccgcaagacaaggggcgcgccaaaaagctttggtacaaaactatcgcgtgcattcggccgcggggttgttgacggtcttttcctccggaatcgcccctgccaggcgcaaagccagccgggcggacgccgggccaaccagttcatacagcaccgcggaagaaaggatgattaccgaaagcaacgagccaagttccggcgacagcatgcgctccgccagagccgccaggccgatagaaacgcccgcctgcggaatcagcgccagtcccaggcaattgcgcacctcgggcgtctcgtgcgccaataccgcgcccacgcgcgcgccgaggcacttgcccgcaatccgcgccacgaaatacgccacgccaatcgcgcccacgctcgcgagcatcggtacgttcagccgcatgccgctgagcacaaaaaagagcgtgagcaccggcggcgtgaagcgatccaccttcttaaacaaggtctgcttgcgggaaaggttcgcgtgcatcgcgccaaaaaccatgcaggcaagcagcggggaaacgtccaccgccgcgcaggcgcccgccaagcccatgagcatgatgaccaccagcagcaaccggttgtaatccgaagtcacgcgctgcatgagccatttgagcacaaaggccaacgcgccgcccaccaagatggccgccacattgtacgccagcggcagcagaatatcctgcgcgcgcaccgcgccgctgccctccgtcatgcccgccaccgtagcgcaaacgctgaaggcgatcaaggccaccgcgtcgtccagcgccaccacttgcaaaacggtatccacaaaatggcccttcgccttgtattgcttgatggtcatcagcgtggaagccggcgcagtcgccgaggcaatcgcgcccagcagcagcgaaaaatccaggggcagcccaaagagcagcatggttcccgtcaccgccgcggccgcggccagcgcttccagcaccgtgaccaccaccacccgcacgccgctggctttcagcctgctccacttgaagaatttgcccacgccaaaggcgataaaagccagcgccgcatccgtgagaaacgacatggcttccaccgtttgcgcgtcgattagctttaggcaatgcggcccgatcaaaatcccggccaagatgtatcccgtaacattgggcaagcgcaagcgcttggcaatgcgcgacaggcaaaacgccgccagcagcgtgattgcaagatcaattaacacttgcgccgtatagttcaattccattgccaatcctcctcccacaactgcacaagcgaaaaaattcccttgatttgctcttgattataggctcaaaatgtggtaaaatcaaattataatttccatgcgccttataaatcgttttaataccacctgagcaatggaggaaattggcttgatcgatcccaaaattcgcacgctagtaacgctcaatgatttgggctcttataccaaaactgccgaagcgctctcccttacgcagcccgccatcagccaccacatcaagctgctggagcaggaattcggcatttccatcttcgtaaaaggcaagcgaaagctcaagcccacgcccgaaggtctcattctgctcaaatttgcgcaccgcgccatcgcgctttcccaaaaagtgcaccaggaaatcgaggattaccgccgcgaagcgcgcagcctcaccgtaggcatcacgcccacggcgagcgacatcctggtgccccaggtactggctgcgtactgtaaccagcacccccaagtgcggatccaaatcgtccgcagtacgataaaaaaaattgataacatgcttcgattttatgaaattgactttgctatcgtggatggcatgatcaagaacagcaccagtcgctccatccttttgggcacggattacctttgcctcgtcgtcgctccagggcatccttttgcccagcggcaaagcgtcacgctggaagagatacggcaggaaaagctggtgctccgccccaaaagcgctgaaacccgcaaattgttcgaaggctacctttacagccacgggtatgccctcgcggatttccacgtgatgatggaaatcgatagcgtttccaccatcaaggatattgtggcagccaacctgggcatcagcatcatcagccacagcgtgtgtcgggaagaagagcgccggggcgagttggtggtcgttcccatcgaaaactgccgcatgctgcgcgaaatcaacctggtctatccggaagattttccctacccggaaatgctgcaggaactgcgcgcagaatacgaaaagcgccagtaagccgcgctccaggccgcgcgtagttcggcgcgctgtgtccatgccccgcatgaaaacatggtttcgggcatgggcacattttctgtctgtttccgcctttctatctgtgatttcctcttccatccccagccatttcgtggtataatctttgctaagcaaagcgcttccggcccaatgaccggcgctttcccgccgccggcttcggtttgctttgcccttgctttccagaagaaaagccggtacttttcttgcggcaaatgaggcatgcggcaggcaaaccaccgcaaagccgccggatttcctcaaaagggcggttcccttcttttttcgcaaacggatctttttgtgaggaagtgaaatgcatgacgggcacagtggccattgccgggaatatgatcctggacaacatcaaatttatcgattcctacccctctttgctggaactggccgccattcgcggtttgcgccgcgagttgggcggcgcggtgtgcaacgtagggcgctccctagcgcgcctggacgcctccattcccattcaggccgtgggctgggtgggggaagacgaggcgggcgattacctgctagcggagctgcgccggtttccctccatcgacgtatcccacgtccagcgcggcgacgtaacctccttcagcgatgtgatgaccgtgcgcgccacgggcgaacgcacgtttttcacctataaaggggcggacaaccgcctgacgccggaagatttccccacggaaaacatctctcttttgcacgtgggctatgcgctgctgctcgatcagctggacgcgcccgacgcgtgctacggcacgcaaatggcgcgcgcgctcgcccaagcgcaagcgcgcggtacgcgcaccgtgctggacgtggtgagcgaaaccgtcgaccgctatcaaaccatcgtgccccacgcgctgaaatacgcggacgatttgtgcgtgaacgaaaacgaagcgggccggatcgcgggcctcaacctgcgcgaaggcagcgttttgcgcgcggaacgcctgcgcgaagcgtgcgcccgcttaaagcgcatgggcgtgcgccgctgggtggtgatccacatgcccgagttggcctgcggactggatgaaaacggcacatatgtggaagcgggcacgctgcgcctgccggaagggttcatcaaaagttccgttggcgcgggcgacgcctttgcggcgggtattctttacgcgatttaccgcggcctgcccctggcggaagcgctgcgcgtggccaacgccacagccgcctgttcgctgggcggcgaggattccaattgcggcgtgcggcccgccagcgaagccatgaaactctacgaccaaatggaggtgcgaaaatgaagcgcagtgaaatcaacgccgcgctccgctgggcggaggagcgcctgcgcgaagcgaacatttcccttcccccattcgcgcgctgggattgcgcaacgtggcgggaaaaccaggcgcgcacgcaagtcattcgcgaagtgatgctcggctgggacattacggattttggcatgggcgacttcgcgcgcgtgggcgccgtgctctatacgctgcgcaacggcgtagttgggcggcccggttttggcgcgccctacgccgagaaatacatcgtgctggccgaaggccagcgcctgccctgccattaccacgcggtgaaaaccgaggacatcatcaaccgctgcggcgggcaaatggccatgcgcctgtacaaccgcaagccggatggcggcgtggatgagagcagcgacgtcaccgtgttcctcgacgacatgccgcgcaccgtgcatgcgggcgaggaattcctcatcgcgccaggcagcagcgtgcggctcacgccttatatgtatcatattttcggcgcgaaagagggctatggcccgctcgtcgcgggcgaagtttcctccatcaacgacgacaacaccgacaactacttctccgagccggtaaagcgctttgccgacatcgaggaagacgagcccatttaccgcccgctttgcggagaatacgaggcgctgttgctatgaaaaccgcagtgatgtatggcgcgggccgcatcggccggggactggtcggcgcgctgctcgcggaatccgggtatgaagtggtgtttgtcgatattttgccggaactggtcgcgcgcctgaacgaaacgcaccgctacgccattttctatgtggacaaaaacgagcaaatcaccgtttccggcgtgcgtgcggtggatgggcgcgatcaagaggcggtcgcggcggaaatcgcgcacgcggaattcgtctgcacctcggtgaaggcggaaaacctgcccgccatcgcgccatttctggccgcgggtctaaagcaacgcctcgcgcgcggcgcggggccgctcaacatcctcatttgcgaaaacctgatggattcttccaagcgcatgacggaactgctctcccccttgctctcggcccaggaaatgcaaaatgtgggcctggtggaaaccaccatcgaccgcatcgtgcccgagcagaccgatcccgccgtcatccgcacggaaagctattgccacctgcccatggatggcgacgccttcctggggccggttcccgccatcgcgcacacggaattggtttcgcccttccattcctgcacagagcgcaagctctatatgctcaatatggcgcacgccacttgcgcgtatctgggcacgctgcgcggcgtcacactcattcccgaggccatggccatcgaagccattcgtcgcacagtgaccggcgcgctggcggaaagcgcccaggctctcgccaaaaaatatcccgccatcgccagcgccaccttcgattacgcgcaaatcattccccagcgctttgccaaccccgccctggcagacacctgcgcacgcgtgggcgcggacattccccgcaagctctcccgcaacgaccgcctcatcggcgcggcgtgcaacgtgctcgagcaaggcggcacgccgaatcacatcgccgtgggcatcgccgccgggttgctgtgcgatttgcgctctggcggcgcagccctggaaagtgcgcctgcccgcctgtgccagctaagcggcctaagcgcggagcatcccgtctgccaaataacgctacaggcgctgcacgagcttgccgcctccctttaacccaaaataaaacgcgccaaagcggttggcctttcccgctttggcgcgacccttaccgtggcaacttcttgccgcatttgccgcaataagcaaaatccttttccaccgccgcgccgcaataggggcaatagcccgcggcgccgctcgcggattccgttctttcttcttccgcgccaaagcgctcgttcagcgggtcgggttcctccccctcctccgtgatatcgaaggcagaaaaacggtttttgctcccggcatttttgaaattgtacaccgcctgaaccacgccgacgaggatgaacaacacgccaaacagcggaaaaaatcccggcgcgcccatttgcgcggcgctcagcgtccacacgatgccgaatacaatcgcaatcacggcgccaattccgcccatcatcgatgggccgcgccccggcttcacgctcctcatacctacctcttcccgagccgctatggcggcgctcattcttcttccacaaactcgctttcgatcaccgcgggaccacggcgcgtccgcaagcttgtccacttccagcgcagccagccaaccccggccactagcaacgtcgcaaccgcctcaaaaagcgcgcccaaaatcgatagaattctcccaatcatactgctttcttcgcctttctggttttgaaggcagtatatcacattccggctcgctccgcaaaccttttccgcccagcgatacgctttggccgctcaatcgtctcaaatggcgcgcctgcgcctcaccattcgccagcttcttccaccatatgcgccccaatttggtacagcaagcgaatggcttccgcctggcacgcggccggcatgtggcgaagcaacatatgcgcctcaaaggtaaaatcgccgtcatacccaatctcccgcaacgctgccaaaatcggcggccagtctatgctgccgaagaaggggggcatatgctcatcagtcgctccgtggttgtccgcaatgtgcaacgcatgcagccgtccgcccagttcgcgcagggatgcggactgatcctgcccagcgagatgggcatgccctgtatcccagcaagcgcccacgttgggcatgccgaccgcctcaatgagccggcaaagctggcccgccgtggtgaatccatgcttggccgcgctcatgttctccagcgccaagcccacgccaaattgctgggcatacgccgccaggccgcggaaatacgcggcgttttcctcgatcattctatccaggctatccgcttcttcccaatccgggcgctggctcggatgcagcaccacccacgggatgcccagcatacccgaaccttcaatggagcgacgaatctgctcttcatggggattttccggctcgtaagcataaaaattgtatacatgcgcatgcgcttgcgtaaaggtcagccccatgcgccgggccgccgcgccgattccttccacccagcgccgccaatccggctgcttgaagggagacttctcgctgtggctccaatcccaaaaattcatgtccacatggcggaatcctccgtccgccgcgcggcgcatctgctcttgcacgctggcttgaaactcagaatcaaaaaacacgttgatggatgtacaggctttcatcgcacttcgctcctttgtaccgtttttgctgccatccgctttccagataagcgtagtataccatgcgcgacgaagttcgtcaagccgcacaaatactttgaaagcaaaaccattgcccaatttgattgacaggttcctccagatatagtatactgctcatagaaaaacgactctgagtcgaaaaaaggagggaattgtgcaaatgtgcaagccagcggaacggttttcacgaaaaggacgccgtaaagtgcattggcaaatgcttacactgtttgtggttcttgccgtgcttagcggttgccaggcttcgcacggcacggaagtcatgtccatagaggaaaaatcctgcgcagaaatcggcgccgtgctaaaggaattcggtatcaacggaatcaccgaggaaataacgcaagaattggagcagtcattgtcccacttacccccggacatactcctgagcaaaacggctacgctccttatgtcgctggaggatgatcccgcagccaatggcgtatacagctttgacatggaagtcccatgcgaagataccatgtacacggaatttctccgcagcgtatccgcccttagcaagggcgagttggtatttgaaaacatcgaggaggataccagcgccgtcaattgggaggaaggaaccggttccagaaccgtacactttgactggcaaggcaaatcatacaccctggaagcgcagatgcaatacgactggttcgatatagaagtcgccaaccagctcaatgaaattctcctggcttccggcagcgaaaagaggctgtattttacgacagatggctatcagtcatgcattgtcttctactgcaccccggaatgggccaaggcttttgccgccgcaacggaattgcccctgacggattgcgttgagatgtaaccgcgcttacaggagccgcaacattatgcaacagggaggactatatgaaaattgcccttgcgtcggcgcgaaccgtcgaccaggatattgcccacaacctctcgcagctggaacgctatacgaaagaagcgaaagcagcgggcgctgaccttgtttgctttggcgaagcgtttctgcaaggctttaacgcgctctcgtggcagtataaaatcgataaaacgatagcgttgacgacttcttcggcggaatttgcgcacatccagtctttgacaaagaaaaccggcattgacgttttatttggatacaacgagttggaagacaacgctatctattcctcctgcgccctgattgctgatggcaagatcgctcacaactaccgccgtatttcaagaggttggaaagagtacgtcaaaacggatgaacactacaaagaaggttcattggtcgaagtttttgactataaaggcaaaaaatgcgttgtcgctctgtgcggcgatctatgggagtatcccgaaagatttgccatcggtgaagatctgcttttgtggcccgtatatgtgtgctggacaaaagaagaatgggaaagcggcggcaaaatcgaatatgcccagcaagcaaagctatgttgcgaaaatactttgtacatcaattctatctgtgagggagatgcctttggcggcgccgctcagttcctcagcggcgcgattcaaaaagaactgccggtttttcgggaaggattgttatatgtagagatttgaacgcatgcgccatggcgaatgcgcttttcgatgcggaggtagaaggatgccgagattgagcgaaaaggaaattgacgccattaccaacaacttctactcttgtttttgcgggatacatctatcggaagcagcaagcggtatatcgtttgtgtgctccgcttcccgaaatgatgtgcttaaaggctttggttgcaagtattccatttatgtactggtcaaagaagatgcgtgcattgtttcttatgcgccaaaatacgccagcttttcaaggaattacaagaggccggcgttattgatattttgacggcaatacatgctcgctttgccatcaagaaaatgcaactgatgaaattcaaacatgaacgcgtgaaggaatatgggaacgcacgggtgctgaagaaagcggattaccctttgtatgaggaatttttccgttcaacctctccaaccgccgatccgaccgggtggttgcaggaatattttgaggagaaagtccaaaaagaatatttcacgggatattttgtgaatgacaaattggtatctgtttgcgacgcgccggatatgccatatatggaagatacaattcagcataccgggattgtcacattaaaaagcgagcggagaaaaggatacgccaaatgtaccgcggcattggcggcccaccatttaatagaaaatggcgtttgtccgcaatgggaatgccgtgcggaaaacacggcgtccatcgctttggcagaatccattggctatgaaaagtatggcgtagcatacattctggaagaataaccccgtttgccgcacgaatagaacgcattgctcaacgcgtccgttcgtgcggcaaacctgcgtatcaacgaaggacatccgcgccaggggaacccaaaaggccagcccgggcttgacggatgtttcacagcggattgcgcgaaggttcgcctgccttgcggggatactgcgcgggggttttctgcgctttttgcaccaccaccagcgtgtgcgcccaatcccggccggggatgggcgcgggcaggatctgcgcgctcgcgccgccgagcgtgcgcagcgcgttctgcgcggcggccacttcttccgcggcggacgggcctttataggcgatgaggcggccggagcgcttgagcgcgggcagggccaattccgccagcacgcccacgggcgcgaccgcgcgggccgtggccacgtcgaagcgttcgcggttcgcgcgcgcgaagtcctccatgcgcgcgtgtacggcctcggcgttgaggcgcaattcggcgatggcctcgttcaaaaaggccacgcgcttgcccagcgaatccaccagcacaaagcgggtttcctcgcccgcgagcacgcacagggggatgcccgggaagcccgcgccgctgcccacgtccagcgcggccttcgcgccttgcaaaagcccctgcgccagcggcgcgagcgaatccagatagttgcggtccacagcctcgcaggcttccgcgtccacgcgcgtcaggttcatgcgcgcgttggccgcgagcagctttccctgaaagcgcgcgagggtttccagcatgggtgcgcgatagggcacgcccatggcggaaagcccctgggccaaccggtcgatgaattccgcattcatgcgcgttcctccctgcggcgcagtttttccaaatacaccatgagcacgctcacatcgcccggcgaaacgcccggcacgcgcgccgcctgtcccagcgagcggggccgcgcggcggccagcttttgccgcgcctcgatgcgcaggccgtccatggcgagatagtccaaatcctcgggcagcaggtgttcttccatgcggcggaagcgctcgatttccgcctgctggcgctcgatatagccgccgtatttgatggtgatttccacctgctcggccacatcgctcgtgagctccggcgcgcccggcaaatccctgagcgaagcgtccggccgcttgagcgcctcgaacaacgccggagatttgcggatctgcttaagcgccgcttccgtggccgctttcttttgcagcatgcgctcgtaacgctcccggctggccagcccggcgcggtagccgatttccgtcaggcgcaagtccgcgttgtcctgccgcagcagcaggcggtattccgcgcgcgaggtcatcatgcggtagggctcgtccacgcccttggtcaccagatcgtccaccatcacgccgatgtacgcgtccgcccggcccaggatcacgctttcgcgcccttcgagatacatggccgcgttgatgcccgcgtaaatgccctgcgcggcggcttcctcatagccgctggtgccgttgatctgcccggcgaagaacagccctgcgatgtgcttggccgccagcgcgctgttgagggcggtggggtcgatacaatcgtattcgatggcgtaggccaggcgcaaaatgtccgcgtgctccaatccggggatcgtgcggtacatttcatattgcacgtcctcgggcagggaggtggaaacgccctggatgtaccattccacggtgctgaggccttccggttccaggaacacgggatggcgcgttttgtccgcgaagcgcacgactttgtcctcgatggaggggcagtagcgcgcgcccgtggcatgcaccgtgcccttgtacatgggcgcgcggtgcaggttccggcggatgatttcgtgcgtttcctcggtggtgtaggtcagatagcacagggccttgttctgcggcggctcgtc

SEQ ID NO: 1286 - DNA, 32759 bp, Unknown
  16S sequences of unknown bacteria
cagttttgctgacttttatttgtttcccttattactttggttcgttacatcttttttcttgtaactcgtctcttgacttgggtttaatttctctcttatcaactgttcagttttcaaggatcactttgttactttgttaattcttttttgctgttctcgctgacagcttgattataatactatacttataattaaaagtcaataggtttttttactttttttcaaaaaaatcttaaaaccagtcaacattcgtctttttatccaaaatcttattctgtatttcattcatctgcactgacaaaagcgcccattcgtcataggtgataccgtccgcaaaccctctgattatcatgtttttcaaatattctatcgcttcatcggactcatagactcctttttcccagtttctgtatattgttaatatttccttttccaaaagctgcgctttttccgattctgttaaaaatatgtcgttttcaacaaagcctcttactatagccatttttgctttttcaatatattcctcgcgcccttcaatcattatgtcggacgaatttagataaatgcttatattttctcccgaaatgtatatctccctgtcggaaacataattgaacatttttttcattttagcattcaacatctttacgggtatggaatagaacttcgacggtattttctttaccgtttttatgtccgcctttgccaacgatattattatttcatccattacatatatattgccttttcccgcaacccccatactcatacttttcgccttcgtatgtctgagcattcttttacatcttattacaggcgtacatacaagcataaccgccattgccaaaccgagccttattacgcttatatatcctcccaaaatcgaaagaatcattctttttttgtcttttctgtctattcccgtaattattgtctctataaaacctactgccggtggtattgccgcaaggcataatacataaactattcttttcaatgccttcgtaaccgacctttcgggaatgtatccgacaaatattgtaaacatagccggaaaagcctttgccgcaacacagtatatccacacaaaggataaaagtatcattatatagaaccatactttgttcttatctttaatctctccgaaaaatatatttgtagcccagccgaatatcgttattactattttaataaaaaatcgtataagcagaagtaccgcaaaatcaaccaaaagcagtaacggcatataatcactcccttttaaaaggataattatattatacatttattctttactcaattacaatatctgcccttaaacgaattttatacaaaaaatgacttctgttttaatggaaataaagatatttttattcaatgttcttattgacttgatacctaccaaaaggtatatacttatatatagaataatacaaaggaggaatttcaatgtactgtgtaagaaaagttaccgatgatttatattgggtaggcgcaaatgaccatcgtcttgctctttttgagaatatccatccgataccacgcggagtatcatataactcctatctgctcttggacgaaaagaacgtattgtttgatgctgtagactgggccgtatgccgacagtttttagaaaatataaaagccgtcctccaagataaacctttggattatattgtaataaaccatatagaacccgatcacggcgcttctcttcaggaagtgcttaatgcgtatcccaacgctacggttatatgtacggataaagcaaaaacatttatggatcagttcggtttccgcgtaggcgaccgtgttgaaaccgttaaagaaggcgacacaaaatgcttcggaaaacataccgtatcatttatagccgcaaacatgatacattggccggaagttatggcgacttacgactcaacaagcggagtgcttttctccgccgatgctttcggtacattcggcgcgctggacggaaagctgtttaatgacgaagtggactttgacagagattggctcgacgatgccagaagatactacacaaatattgtaggaaaatacggtacgtttgtacaaaagctgcttaaaaaacttcagactctcgacgtaaagatgatatgtcctctccacggtcccgtatggcgttcaaatcttgaatactttattgaaaagcatgacaaatggagtaagtacgagccggaagaaaagggcgttttaatagcgtatgcctccatgtacggaaatacggaatcggctgctcaggctcttgcatgcaagcttgtcgaaaaaggctgccctgatgtaaaagtatacgatgtatcaaacactccggtttcatatcttatatcggacgcttttaagtacagcaatatagtccttgcgtctgtaacatataatctgggaatattccccgtaatgcacaacttccttgaggatatgaaagctctttgccttataaacagaaagtttgcaataatagaaaacggaacatgggctataaagagcggctctcttatggaaaacttcatcacaaacgaccttaataagatggagcttataggaaataagtttacgcttacttcatcgctcaagacagataaagaagctgaaatggacgagctggcagacgcaataataaaatcaatggaataaactaaaacgccgcccctcggttttaaccgaaagggcggtattttttactgcggatatacaagtctgttttcatcaatattgtaaataacctgctctaaatatttctttgcaagatattttgccataggaagattcatatctaaataatttccgcagtccataggcgatgcccccggcacttcgccctcgaaatcacggataaactcatacatttcctttataagcggcactatatccttagattcaagctgccccgcaagtatgagataaaatccggttctgcatcccatcggtccgaaataaactgtttttgacttatactctttatgatttcttaaaaatgtagctcccaaatgttctattgtatgtacttccgccgtattcataacaggctcttcattgggacttgtcatacgcaggtcgaaagttgtgagcgcttcacttcctacagtatccctgcgtgatacgtatatacccggctgaagttttatatgatttattgtaaagctttctattttttccattttattcgcctttccttatttatatttttttcgtcataacgacaatgcttttgcttcttgtcattcccagtttttcgtaaaagccttctgttgctcttcctctaagggtattaagagtaatttccttaacgcctttctctttaagcttcctttccaactcggaatatataaccgctccgacgccttttcccctaagtgtgttttttacgcaaaactctctgaggttaaaaacaattccgtcataatattgttcaaagcagcctatcgcaagaccgcatggctctccgttttcatatgcggcaaatccatacgcggcgctgccgctcagcatttgttcaagccttatttttgcggtatcatttgtccattcatcattccacggtctatcgttaaacgaatcggtaaaaatttccgccaatattcctatattatcgttatctattgttctatactccattataagcctccctgttaagccagtcctttttagatattataaaatcaatgaaatatcttcccgcaataggcattatatttttatttttatatgcaagggataccgttctttccagtttgggataaatactttttaccgctatatttcggttgtttctgttcagaaccagtgcggaaagcacagatataccaagcccctcctcaaccattgacataattgtataatcgtcatacacaacatattgcgtattcggtttaaggccgttttccttaaaaaactccagcggctcgctcaactctccctcgtttaaaagtatgtacggttcctttgaaagttcttccagagttactttatccattttcgccattctatggttcacaggcaaaaccgcaagcatttcgtcccttttcagcggtatcgtagtcagtccttccgccgcgtcggggtttacaaaaccgaagtcaacactgccttctttaatccatccgcttatatttgtatattctccctgctttagttcaaaattaaccgacggatatatttccttaaactctttcataagtcccgggagccagttgcacgatatgctcgcaagtgttcctatacgtattaccccgttgcccagtcctttcatttcgttccttttttcaattaattctctatgggagttatatacgtttttaatatacggcaaaaattctttcccgtcgggcgaaagctctatgccttttttagagcgatgtataagcaccgtgtccagttcttcttccagtgtttttatcatctggcttaccgctgattgcgtataccccatactttcggcagcttttgtaaaactgccggtttcagttattttgacaaatgcctcatattgtatcacagttttcaccatctcattagaaaatctaatactgctattatatttatttgttttactaatgtcaattgcagtgatatacttctaacataaaaaattagcgggggatgtaacatcgtgaaaaacaatatatttttaaaaggaatgaaagacggtttgcccgttgctctgggctatctcgcagtttcgtttacgctgggaatagcggctgtaaaatcgggtttgactccgtttcaggcttttgcaacgtcagcgcttaacaatacctcagccggggaatttgccgcattttctctcataggcgccggagtatcgtatatggaaatagccttgaccacattaattttaaatatgagatatattcttatgtcatgcgcgctttcacaaaaaatagacaaaaacactccgattgtacaccgttttttaatggcatacgatgttacggacgaaattttcggactgtcaataatgtcggaaggtcgtcttgaccccaaatatacatacggattgatagcaatatcagctccgtcatgggcaatcggcacatatctcggcgcggttatgggttcggttatgccggcaggagtcttgtccgccatgaaccttgccttatacggtatgtttatagccgttatagttcctccggctaaaaaagataaaactattgccgttgtcatcgcggtatccatgctgtcaagcctgatgttttccattcttcccggtcttagggaaatttcttctggcattgtcgtaataatacttaccgttgtgatttctctggcagccgcaatattgttccctgtttgcggtgataaaaaagaaaagaaagaggttgtcggctgtgaaatctaatgtttacatatacatactgataatggcaggcgtaacttacataatacgtttactgcctctgcttcttgtacgaaacgaaatagagaatgtaaccgtaaaatcatttctgtactatgttccttacgttactttatcggtaatgacttttcccgccatactgaacgcgacaaacagcgttgtatctgcggcggcaggttttataacggcagtattgactgcgttcaaaggaggcagtctttttaaagtagcgctgttctcatgtggtatagtatttcttatagaactctttatataattatgaaaaaggctttttagcaaatcacaaaagccgcagatacaatatctgcggctttcttaattttattttcagttcattttagaaagcgctacggctatcttacttgctgctttggcattattgtatgcaagctgaagatttgaagcaaatgaaacgccctccgtcatatccttgatatggcttaaaaggaagggagtagtgtctttgccgtgtatgccctgttctttggcaagttcaagcgcctttactattaccttttccatctcgtcatagtcaagcgcatactcgtcgggtataggatttccgataacaaatccacccttaagtccgagatcccattttgtcttaactatctttgctatttcttcttctgtttcagctctgtaatcaagcttcagtccgcttgacttgcagtagaacgcagggaattcatcggttctcagtcccagtacgggaacaccgtatgtctcaaggtactcaagagtaagtcctaaatccaagagtgattttgctccggcgcatacgaccgctacctttgtatttgcaagttcctgaaggtcggcgcttatatccattgtagtttccgcgcctctgtgtacgccgccgattccgcctgtagcaaatattttaattcctgccatttcggcaatcatcatagttgtggcaaccgtagtagcgcctgtttttcccgtagcaagatatacggccacatcacgacgtgaaaccttgcctacattttcagccttgcacataatatcaagctcttcggaagtaagacctactttcagttttcctccgattattgcagttgtagcgggtatagctccttctgctcttacgatttcttctaccttatgtgcaaactcaacattctgggggaaaggcataccgtggctcagtattgtgctttccaatgctacaacaggttctcctgccgctattgcttcggctatttcaggtgcaattgataaatattcgtttgtcatcatttttttctctcctttaatatattctccaaaagagatatgctcatattggggtttatcgttctttcatgtgatattgccgcgattccggcggcaagaccgtaatcaatcgtcttttccagcgaaaaatcatttatatagctgtatattacagctgccataaatgcgtctccggcgcccgttgcgttaatcatattttcaacaggtttcagttttctttctatgcgccttccgtctctgtccatatataaacagccgtcggctccaaggcttacaaatatcctgttcaagcccttatccaaaatcttttcacaggctttgtacaaatcttttcggtcgtttattttcattccgcttaatatttccgtttccataaggttaggtttagcagtatggaattttcctataaggtcaaccaatttagcggcatacgcctgagagaccgtatctacgaatacaggtacggtatccgaataaagatttaaaatttcttctataatatcaacgggaagaccgggatcgcacattatcagtctgcttccctttattatattgcctttggagtgaaggaactcgacgtccattttctgtaataccgacatatcggaaagtgcgacaaacatatcgcctttctcatccaaaaccgaaatatatgttgacgaaggatggttatctacctttaatatatggcttatatctatccctgccgcagtacattccgcacatattttgtccgcataaacatcatcgccgacagccgttatcagttttacatttccgccgagccttgcaaagttttccgatacgtttcttgttacgcctccggcagaagtattcatatggccgggattactgtcatgcagatttatcgcttttttggaacgaccgtgtacatccacgtttgcagcccctattccgacaatataatcaccgttgttcactatgtatcctctccccaaaatgtatccttttttttgcagattcgcaatatgtaccgcaacggaacttcttgttattccgagcatagccgccagctcgctttgttctattgtcggcttttctttaataatctctaatatctcctgttctcttcttgtcatcatttcacctaccatatacaaatatttattttataaacataagtttattatatcattctaattatatgccgtcaatatatttttcagatttataatatatatctaacttcatatagcatattttacttccttttattccgactgaactacttaccgatactttgtcattaaataaatcattacttattattaaatcaaaaagcagattatggggataaaatcctcataatctgctcataaacttttagtttcccttactgcttaacggattgcttctctcttcccaaaatatattattatccggttcagcctttccgccgggaccataatgggcattttggcgtatgctgtaaaggtctcctccgtgaatagtatctcttttttctttatttttcttttttggcatgtctttcacctccattttcagtatctgcatttcgcactgtatttagtcttaatcaagcgtctttatgctgtcaaaatgaatatttacttcaaatattttcctgttctgcgaataatgtcgaaatatatataaatttgaataacttattttcttttattatcttttattttacattatagttttattacaaacaattaaccgcaagaaaggaagatttatatgaaaaaaaacacttattctgctttggaggcatacaaaaatttacacagctacgaaaaagtcgagctcggctggcttacaggaaagcttaccacctacgaaatcgaagaattggaaaaacaaatcgaatatcttattttagaagctgaagaagcggcatttgcatacgcatacgaaggcacatccaacgtgatcgaactgggagcttgaaatttacaaaaaatcgagcgaatttatgcttaaagtcagacgtctttcgccatacaaaaatataaagccaatttatcgctcggcttcactattttattaaccaaccgtccctataagttaaactgacatcgtctatttctgttttatatcacttaaacagctgattttcccgtcattatatctcaaagtataaaaacggctgtctatgtacagacagccgtttaatcgacaaatccagaaaaacctaccgaatttccatatatttcaaattaattacttaaaatgaagattccgatatttattcatcttccttcgttgccatagccgtagcctctccgtcaacaactacttttccgtcttggttaacaatagttgtgcgcattactatcatctttttctcgggtattatctgcgttacttcggcgtttactgtgattgtgtccccgaaatatacaggagcggtaaatttaagcgtttgtccgcagtatatagcgtcagctccgggtataagcatacccactattgtcgatataaatgaagctgtcaacattccatgtgctattcttttgccgaaacgcgttgttttagcatattcctcgtttacatgtacagggttgatgtcgcctataatacctgcataagtatatacatccgctgcctctatagtcttagatacgctggcttttttgccgacatatatctcacctatactaaggccgctcatattaaggctgtttggatccaacatttttttgctcatctgtaccactcctttttatttttataatatcatgtttttttattctttcaatgtgtaatttttcactattttattttcaattttttgttaattcgtgccttatgattaaattacaaacctatgtttttaatgaaataaagtctcatttatgctatactgttttagaataaactttaggaggattttaaaatgcaaccaattttttctaacacatgtaaatatactctggataacctaaaacaggttactaaagccgacctcccgatgtggtacaaagcttactgtattatatttgcggcagttttcggcgtaatcgcaatagtagccttttttatgacccattcgcctaaatctgctattttccttctgttttctattactctgcttatgatatactatcataaaacgactctcacagccagaaaacactatgaacaaagtaaagctctccacggagatatagccgtaacaaaattatttttctataacaacagtatcgtaggaaaaaacatgttcacaggacaatcatttaaagcggaatatgaaaaagttaataaaatagtagagactaaaaacctttatattttaagaatattagacgatatttcaatagttgtagataaaaacggctttgtttccgataatggttcgagattcccggaatttataaagcagaaatgtaaaaacgcaaagcttcccaaaaacatgtaaactgtaaaaaggtgataaaatgctgaaaaagcttacaaataatgtatattataccgaaccggatgagtcaacagaccgtcctactatgggatatgttaaaggcaataaatattcgcttatggtagaagccggaaattccgcaaaaacagtacataaatttaattcctcgttatccgaactgggttttcctaaagctgcttttgctgtcgttacccacagccattgggaccatacattcggactgcactcgcttgaggcagtatcaattgcgcttgataagacaaacgacattttgaaatttatggaaaaccttacttggtcggacagcttactcgaaaaatacgtatccgaggatataattcctctgttttgtaaaccccatataatcaacgaatacaaagatttatcggaaatagtcgtaaaacctgccgatatttctttcaccgatgaaatgacgttggatttgggcaatcagaaatgtgtttttaaaaacattgtcagtcctcataccgatgactgcgtaatcgtttacattcccggtgaaaattgcgtttttctcggggactgcctttgtgaagaattggtaggcgaccaatggattgataataaagaaaaacttgcagtccttatagagactttggaaaatctggactttgagtacggtctggaaggtcatttcgctccccgtaaaaaagaagatatactgaaagatttaaaagtgaggcttaacctatgacaaatcagtttataagaacggaaatgcttataggcggcaaagccgttgaaaagcttgcgaaaagcaatattgctcttttcggtgtaggcggcgtaggaggtttcgttgccgaagccgccgccagagcaggtataggacatattacgcttattgacaacgatactgtcagtttatcgaatatcaacaggcaaatcatagcattgcacagtactataggcagatataaaaccgaagtcatgaaagaacgcatactggatataaatccgaacgcagaagtaaatataatcaattgtttttatcttccggaaaataaggatattatagacttttcgtcgttcgactatataatagacgccgttgatacggttactgccaaactgactgtaatagaagaagcaaaaaaggcaggcgttccggtaataagctctatgggtacgggaaataaactgaatccgcaaatgctggaaatagcggatatatcaaagacatctgtatgtccccttgccaaagtaatgcggtacgaactgaaaaagagaggaataaaaggggttaaagtgctatactctaaagaacagccgataaagcctttctttgacggcagtgaaagtcaatcaacccgacctgttccgggaagcatatcgtttgtcccatcggctgcaggacttataatagcgtcggaagttataaaagatttgacagaaggagtgcgacagtgaaaagagagttaactcaatgccaactgattgaaagaagtatacaaaaaaaataccgtaaggaactttggaggccgtttaccgaagctataaaaaaatatgagcttataaaagaaggagataaaatagcggtatgtatttccggcggaaaagattctatgctaatggcaaaaatgtttcagttgcttcaccgtataacggatttcccatttgaacttgtttatatggtgatggaccccggttataacgaggtaaaccgtcaaaaaatcatagacaacgccgctctgcttgaaatacccatagaaatatttaacaccgacatatttaacgccgccaacagcgttgataaaagcccttgttatctttgcgcaaggatgaggagaggtcatctgtacagcaacgcccaatccctcggatgcaataaaatcgccctaggccaccatttcagcgacgtaatagaaacaacgcttatgggtatgctgtacggcgcccaaatacagggtatgcggcccaaactgcacagtacgaactttgacggcatggaacttataaggccgttatatatgatacatgaagacgctatcatagcgtggcgcaattacaacggtttggaatttttacagtgtgcctgccgttttacggaaaatgtcgcacaggaagaagtttcttcaaaaagacaggaaacgaaagagctgatacgcgaattgaagaaaaccaatcctcttatagagacaaatattttcaacagtatacatgacgttaatgtcgatacccttgtcggatacaaaacaaaaggagtcctccactcgtttttagatgaatattgaaatttcattcagtcttatcaagactgaattgagggcgtcggttttgccgacgcccttcgtcgaaatcaaaatttcgacgagttgaaacatatgaataaacagactggttccatcggcaaaaacgactcgaaacctgctgttttcctcggcagaaataaattctgcctgcggattccactcgggaaacgactttgtttcccgaacctttccgctatgcataaataagttgtttaaagactgtatgcagtttgataagactgcattttttatttgcctcaaatctatttagcaacgcttttaaccgacataaaatcatcggaataatatatttgtctgccatatcgacattcggcttttactgtgttattataagagccgaaaatcaaaaaacgccgtcggcacagctctattcaaaagctgtcgcggcataaagaaaagaagtggcttaatgaaaatatcagaaaagtacagacatgaactggcagtatatcttcctcttgcctttgtcggaggttttttggaaatatatacatttttaaatatggacggtttgttcgccaattcacagacaagcaatattgtcatgttttttcaaagtatatgcgccggagataaattcggcatattatactgctttattccgataataatttatatgctcggaattgccgtaaccgaaatcgctccccagaaaataagcaacggaggactgcgttggccgaaaatatgccttcttatagaaatcctgtgcataataggagtcggcttcgttcccgcaaacattaacggaagaatatccgctcttccgatattttttctgaccgcccttcagtataatacttttaaaagtatgcagggtcaggcggtatcaacggtattttgtacaaataaccttcgtcaggttgttatacacctttgccgttataaagaaaaaaataatcccgatcagctcatattcacgagcgtatatgtatttgtaatactttctttcggcatgggcgttgtcctcggtttctatttgagcaatattttcgccgtaaaggccgtatggatatgcgccgttataatggctgccgtaatgttcaaaatcagcagacacggtcatattttagcttaaatcataatgtttcagataagctttctttatttgctgtgttagattttattaataaggactacataaataaaatcctccgttttaaaacggaggatttctcttttgcctaaaattatttcttcggcttaataggtttcttctttattttggaaagtatgaacgccgtagccaataccgctatcgctgccgcagcaacatatccttttacagtgtctgccgcaggagcaatgcagtatactccttcggttccgtccatatcggttattatataacttccgttttcttcaaagctttccttatgccacttttctccttccaatttccacagtttaacggaatcttccgttccctttaacagtcttattttggttgtcttatctattgttccgctttcaatgcttactgatattactttagcgttatcaccgcctgacgcgcccgacggcagcttatccacctgcgtgtactgtgcggtaatcttatcgttttcggtaaatactccctctgcaagggcaagcggctgttctgtgttttcacccgtttcatcactggttagcaccgttacccaaggttcatattcggcttccagtaccgtgctgaaagtcatgtgcgacaaatccgtttcgggccatgagccgtaataaccgtatttttcaggcacttcgggaaattctatatccgacaaatcttctccgaatgtaaaaggcaccgtctttataatgcttccgtcagctttaaatttaactgtaaattctaaaaagctctccggcagtccagacacttgacccatttggtcatacgttaccggagcggcctttccttcgtagcttatgctgtctattccggcgtatcctgtatctatgaaagaatttccccgtactttatccttgtcttcggcatctcccgctactgcgcctattcttcctatgcagtcctcaatgtctattattgaatggcagttttccacggttgagccctgtcctgctattcctcccaagaagctgcctcccgacagtatacatttggcaaaactgtctcttatggatgaatcggaataacccgctatgccgccgacatagtctccgcttgtgcttttaacatatccataaccttcacactcggctaccgttcccaaatccatttttcctgctataccgccgacgcagttctttttagatataacagaaccgtagtttttacagccaagggcaacggcttttgtttcatatctgaaattaagagatttggtgcccacagaagcaatatcgtcttcggggtcaaggtcgtactcgatagccattgctcccgctatgccgccgacatttatgtcagcctctatttttcccatatttgtacagccttcgattttaccgtcggttccactgtgtatatcggtatccgacatatccgtcgtaatatctttaagcgttttttcctcttcgtcgggacttaatgcgtctatcattatatttgttattttattaaactggttatttatagcccttaaatcatcggttattttatctcccgatgattttatatcgttattaagtcctttcagctcatcggatattccgtttaaagaagcatgaagatcctgcgtatcaagatgatagtcgctgtcaagcgttgaaaattctatcggatcttggtcagccagatttctcactatgtttctgatttttttcagagccgacgtaacgctgtcgcccatgtctcctgctccgtcaagggcatcggctataccgtccgccatatcgtctattatatttgacagcccgtctgcttctctcagagcttttactatgtcttttattgcctttgctacctcatcggaagccgatataacatcgtcgattatgcccgatatatctccaaatgaatcctttatactgtcccaagatatattgtttactatcttcagcagggaaacggctatatctccgaatgattttttcattccgtctacagatacaatcaatttttcaattccgtctattattttctgtttctgttcatcttctatcggcagaccttctatttctccgattgcttcctttatctgtgccaaagcgtcgttcataccgccgtatgcagccgaaagctgttctattgcggctttcaattcgcctattgccgcggcaagttcctcttcatttccgcctactgcgctgtcaagcactttctctatagcgtcctttattttatcaatggcgtcttttatatctttctgagcggctttaaaatgctctgccgcgtccttcaaatgttttcctgcctcttcgccgatatccgtaatgtcatccacgccgctcaatgcatcatataaatcgtcggcaacatcggaaaataaatccgatacatcttccaaatcttcaataacaggaacaagcctgtcaaacgtatccgttacccttgcgctgaagtcgtttatctcgttaatattgtcatttgcgaaatcttttatatcatccatatagtccaatgttttatcgatcaattctttggagctttctcttgcgtccgaagcatatatggatatggtgtttatccttcccgatacggtatcggtcgtataatcaatatcgtccagcatgttgtttacaagaccctgcatatcgttcagcgcggtatcaagatcctgaagactgtccgacgagtacataagcacaatatacggctctgcctgaccgactattccgccgacgtcctttctgcccaatatctgtccgtggttcacacagcccgatatatatccgccctgtcttccggctataccgccgatattatatcccatgtgctgatatcctatggggccgtagttctggcagctttgcagtattccgcccgaatatccggctataccgcccgtatccgaatttccttttattgcgctttcttcctcggttgcttccgtatctaagctttccagatttatgtcatccaagtctaccttggtttccttggacgacgtgtttatgcttcccctgttcacacatttcagtatgcttccgaagttctctccggctataccgcccgtatgcttttgcgaagttatagttccttcatttatacagtttcctattcttccggaagcctcgtttattccgactataccgccgatatcgctgtctccgcctatctcaccgtaaaatgaacaatttattatgcttcctctgtttattccggctatgccgccgaacttttcttttccttcgctttcatgtatagttcctttaacagtcaggttttccacccttgcaccttcctgcacatatctgaaaaatccctgtacgggttcgtttgcctttatggaaagtccgctgattgtatatccgcccccgtcaaagtttccgccgaatgtaggtatcgaagtaaatccgcttccgcttacgtttatgttgtttttaagcacaacgtttactccccttgaccatgaatccaaagagcagctttcagacagttctataagatcctccgtattctctatatatacggtctgttccgcggcaattacaggaaccgaggaaattaccgaacatattaatgtgattaaagctattagtttttttactgtcttactcatcttcggtctcctcctctcctttttgcttatcttccgttttatcttcttttttatcctcatcatcatgtttctttttatcttccaacaattcggtcggtacgttttctacaacgccggcttcaaccatggcgtttatgtttccgtgcaggacgccctttatatctgcgtctattacgccggaaacataccctcttactctgccgtttactcgcattgttccgcttccgctctgtattgaatttttctttttaagcgtgaaagccgttttctcgattataaagtctcccagtacaagtatctgaggaagaacaagcataaccaaaacaatcgatattatcgttcctcgtcccagactcgaaccgatagaggctattgcagggtctgacgaaattcttccgataagtattccggctgccgcaagtatagttcccgatgttacaattgtcggaaacgcctgattaagagattttataaccgcgtcttttatgggcatttgttttttaagctcctgatacctgcttgttattacaatagcgtagtctatatttgcacccatctgaatggaacttacgacaaggtagctgaggaaaaacatattgtttcccgtaaggtaagggaaagagaagtttatccatacacttccctgtattacaagtatcaaaagcacaggcagacctgccgacttgaatgtgaatataagcactattattacaaatattgccgataaaacgcttatcataacgttgtcgtcaacaaaagagctcgaaaggtctttttcatttgttgaatttccgacaaggtatactccctccggatagtacctttccgccacctgatgtactttacccaagaattcaaatgtttccgggctttcctccggcaatgtcgaaaatacaagcatacggctgtacttgtcgctttcaagctgcgcttttccgtccataagctgggtatgcatatcctctatttcatcgttcatttcatcgtcaagcgttacatatcctgcctctttctggtcatacagatacataaacatatctatcagcggaactccgtattcgtctattccgtttactattttgccgtaatcttcattattggcagcataggcgccgtagagaagccgtataacttctatatccatatcggtaagctctgcaaactgccttgtggtcaattcgtccgtaaccatatatccgtctactgcctcggtattggcaagcccctgagtatagtcaactccgtccattttttcaatggcttccagcatttccgcctcttttttgtagtctcccgacggaactatcagcgccatcatatttgttgtgccgaatgtttcgtcaattttttcttccgcaatctgtgtagtattctgttttgcggtttcaagggtcgtatatccgtaaacgtacgggcatttatttgaaaatataaacgcggcaactatcagtacggcaaacagcggcggaataacaaatctcgtctttatggcaagtttgcctatgggcgttatattcggcacaaagtttttatgggacgtcttatctataatcttgctgaaaagcataagaagacccggcataagcgtaaatacgcatataatactcagcataatggcttttattaaaacaagacccatatcgaatcctattttaaaatgcataaacatcattgcgcccagacccgaaatggttgtaaggcagcttcccgatatttccggaatagccttggaaagtgcggtaattgcggcttctctcggctgcatataaactcgttcctctaaaaaacgatggcataaaattatggcatagtctattgcaagagccagctgaagaacgactgcaacggagttggaaataaaagatatttctcctaaaagaaagttagttcctttattaagaatcgccgccgttccgaacgtcatcaatagaaccggtatctccccgtatgtcttggaggtgagtaaaagaaccgcaacgataataactaccgctattaacattacaaccttcatttcctcgtcaagatcctttgactgcgtatctgccgcgtcgcttgttatgtacaaatcccagccgcccaatttgtcttttatcctgtttagggcgtctttactttccttctctccgctttctccatcaaaagtaacggaaaaaagagccgatgcgtttttaaaatgttcctcggtctcgtcaaattctactgacttaactccttctatatcctccagctgttcacatatttcctcggctttcttataggatatattatctatcattacatcagctgttgcaaatgttgtaaattcatcctccataagagtaagcccctgtctagtttccgtttcttccggaagatatgaggtaaggtcattatttacggatacccagttcgttgacacaagcgaaaatataataagacctatatacattaaaaagaagccgtttcgcttatcaacgataaatccggccatcctctcaacaaaatttttcttcttatcctgatcttctttcaacaaaaaccctcctgtcaaaaatctaaactgtcatatttcgctttcgcatatataaatactgtattatcaaaatctatctgcctaaaatagcatatcggttttctgtcttttattttttaatctgtttaaagcctttttatgccttttacagctatatcattctatataatttataataaaagaccgctgttttgaacggtcataaaaaaagcggtgcgcaaaaattgcgcaccgccatgtaattgactgatttttacacacttttattcgtttgtcccaaattgtgtttttcttcctcacttattttcaatgatgttataacagcgccctctacaagccttcccagccttcttataacgatatcggggtctttgtccataccgttttccagccacttgcatattatccccacaagagcgctcatataaaaatcctttataagctctatgtcggatttatccgcgtctattcctacggcctttgcggaaacaaagttgtccgttaccttaaacgccacagtattcagatagttttcaacggtttcacgatttaaagaattgtatatgttataaacggcctttttgttatcaataacgaattttgcagcctccacaaaactgtctacccatgaatccccattgaaatccagctccgatacgctgtgtatctggctgtctatcgtatataccgtcagttcgcgtatatcgctgaaatgataataaaacgtgttcctgtttattccgcagtcttcggcaatattttttactgttattttatccaaaggcttttcattcaaaagttttataaaagagtttactatagctttttttgtcagctgcaacatatcaagccctcctcaacatacgctgcgtgttgatattttccaacatacaagccatgttagcacaaagccgaatttttttcaatgacgttgccgacggaaaatcgtatatgcctttgggggtcgataagtttttatcatatatctattttaaacgcccttttcagtgcggaatacataagtccatatgcggtttttgcataatgcgactcaggtaccgcaatttcaaaactgtgatagcagccggggaaaatatgatattcaacatctactccggctctcataagtcttgtccagtactcgatattttcatcataaaacgggtcaagagtacctataaacgaaaataacggcggcagatggcttaaatcctgcgccaaggacggcgagtcgtagcaatcgggcgttttgtcaagataatgcgcccagcttattttgctgtaatcatagcaccatacttttctgcttgttatagctttttgcgataccgtatccgctctgtagtcaagcattgcatacataggtatttgtataaccggtttagggcctttcctatcccttgccataagagccaatgccgccgtaatacagcctcctgccgaaagtcccataatagcaatccttttgcggtctgcccctatggattctccgtttttatcaagccataaaagcgcagtatatgcgtcctctatgggcgcaggcgatttatatttcggtgcaagcctatattctaccgaaacaactatcatttttacatttttcacaaatcgaaggcacatatcgttctgcctgtatacgcttccgaacaaaaatccgccgccgtggaaaaataatccgcagggaagaagtccctcttctttttttgcgggctcgtatattctcagctttatatccgtctccccgtctgctcccggtatcgttttttcatatacgtttacttcgggatcgtcttttaatgcctgtatttcctgttttgtaagattaggaacaaattcctcaagatgttccaaatcaaagcccgccgaagcgtcataattatccaacagttcgggatcgataagttttctcatcaagctctcgtccaaattaaacacctccgatttattttttagtatttttttgtttttattataattacttgtttggctgtctgtcattgtttaaagcttacaaacttttaaaattatcctccgaaaacgagaaacatatttaatatcggcttaaaacatgataaaataaatttattgtttttaatactcattgtaaattcgagtggtgaattatgctggataaatccatacccgaaaaaagtatagttatgaagctttcacacaaaacggcagacgccgttaaatgtcccgtacttcccgaaggcttttcgcttcgtccgtttaaagaaggcgaccagtatcactgggcaaaaataatagcttccgtcggcgagtttcccgacaacgggtatgcccttgcatattttatgctttattattacagacctcggattaaagacgtcaaagaacggtgcttttttatcgtaaaggataatattcccatagctaccgcaaccgcttggagcctattcgggcagccgtccgttcattggcttgccgttgaaaaagaatatcagggtctgggacttggcaaagcgattctttccgctgtgttggaatgtttttcttctcttagtcctaaagaggatatttatgtccatacaaggacatggagttataaagccgtctgcttatatcactccttaggttttaaaatgctcagagaagaaactgtttggggaaacggcggcgcagttcataaaaacgagtattatgaagcgatggaaatacttaaaaaaatcattccgccgaatatttacggcagtttattatcaacatctatttaggaggaattataatggctagaaatgtaatacttgacgttgataccggttccgatgacgcatgcgccataattttggctgcgttatcacctgaaatcaatcttttgggcgtttgtgcggtaaacggaaaccgtcctttggaggatacgttgacaaacacgcttaaaattgtagagcttctcggtctccaggataaaataccggttgttaagggagcggctgaaccgcttgttcacgagcttcttcccggaagaacaaaaaatcctaaaactcccgaaatccagtatgatgaaaacggagttgaagtatgctatcatccgaaaaaatttaaccttccggagcctactacaaaacccgttgaagaaaactttgtaacatggtacataaacgccattaaaaacagtcccgaaaaagtaactcttgttcccgtaggccctcttacaaatattgccatacttctccgtgcagaaccttcaatagtggataacatagaagaaatagtaataatgggcggcggacatatcgaaagaaattctacggctgctgctgaatttaacatatggaaagaccccgaagcggcggaaatagtattaaactgcggtgcaaaaataactcttgttccccttgacgctacacatgccgcttccacaaaactcagtgaagtacagcagtataaggatctccatacccctgtaggcgatatgatggcggaacttatagaaatccgtacaagggcatacaacatacttcagcctcttcacgagcctgacctctgccctatacacgatgcactctgcatagcgtatcttataaatcccgacgtacttaaaaacgttatttacacaagggttgacgtagacataagcggaggttttgcagacggaatgacgatagtagatacccgtcatttccataacctgcccgataactgtcatgtggctctcagcgctgacagagatttattcaacaaaatacttttcgagagagtagctactttcaaataaaacttatcttaaatcaaaagcaggcggttgttatgccgcctgctttcttttaacattcttttatgtcttttataagcatatccacattcttctcatctgttgcccagcttgtgcatatacgcacggcgctgttattttcgtctattctttcctgatatgaaaatacatatttttcggaaagtttctctataagcctatcgggaaatattataaactgctgatttgtgggactgtctgaatagagcttatatcctgcctccaaagccgcgtttttaattttatacgccatcttgtccgcatgggcggcaagttcaaaataaagaccgtcctttaacagttcgtcaaactgtattcccaacagccagcctttagccaacattccgcctttttgttttattacatatctgaaatcttttttcagttcgttatttaaaataacaagagcctctccgaacattgccccgcacttcgttccgcctatatagaacacatcgcagttttcggctatcgttttcaaatccaaatcgttatcttcgcttgcgagggcatatccgagccttgctccgtcaataaacaagtacatatcattttccttgcatgctttatatatttctttcagctcattttttgtatatatcgttcctatttccgtagaatccgatatgtagacaagtttcggctgggctatgtgttcatgtgattcatcagtccaatgacggctgtaaacttcccttatctgttctgccgtcagttttccgtcgccgctttctattcccatgaccttatgtcccgtcgcttctatcgcgcctgtttcatgtacgttaatgtgtcccgtaacggcgcataccgcacactgatatggtcttaaagccgccgatattaccgtaaggttcgtctgggttcctcccacaagaaaatgcacgtccgcgtcgtctctgccagttatatttcttatgacagaagcggcagccttgcagtattcgtcctcgccgtaaccgccgacctgcctcatgctgacctccgaaattctttttaatatcctttcgtggcatgtctcgctgtaatcgttattaaatcttatcatttatgctcctccgtatcgacataaatctaatattgtctaaaaattatgtttttaacagtttttattatattcttttcgacgttatttctcaatatatttatacaacggtcttcatttatgtttattgtgtactatgcacactatcttttaattgcttttcattaaataatattataaaatttatttaggattttaaaaaaaatttatgacataggcagaggaggaaactgtatgtatcttataaccaacggtaaagtcattacaagggatattgacaacccatattttgaagacggcggcgttgccgttgacggaaacaaaataatagaagtaggcagcgaccttgatcttaaactgaaatatccccatgcggaaataatagacgccgaaggaaaccttataatgccggcatttataaatacccatacgcatatatacagcgcgcttgccagaggtctttccataaacggatataatccgagaaacttttatgaggttcttaacggaatgtggtggaatatagaccgccatcttgacttggacggaacaagagcgtccgcctacgcaacatatatagaatgtataaaaaacggagttactaccgtatttgaccaccatgcaagctatggatatatccccggttctctctttgaaatagccgaggttgccaaagaaaccggagttagaagctgtctatgctatgaggtcagcgacagagacggagaaatgaagtgcagacaggcaataaaagaaaactacgactttataaaatatacgacagaagaacccgaccctatgcttaaagcaatgttcggtctgcatgccctttttacgctttcggacaaaactttggaaaaatgtgtggaaacaaataacggaatgacgggattccatatacatgtatcggagggcataaacgacgttcaggacacatgggaaaaatataaaaagagacccgttgaaagactgagggacatgaacatactcggtcccaaaacgatactgggacactgtatccacgtcaatgacgaggaaatggatataatcaaagaaagccgctcaatggttgtaaacaatccccagtccaacatgggcaacgccgtcggctgctcacccgtaataaacctgtataaccgcggaatacttgtaggtctgggaacggacgcatatacccacgatatgcttgaaagcatgaaaacagttttggcaatacagcgccacaattccaaaatgcccaatacaggctgggcagaagcagtaggaatgcttttcagaaacaacccgataatgtgcggaaaatacttcgacgaacccctcggtatattaaaagcaggagcggcagccgatgtaatcattatggaatataagccgtatactcctctttccgccgaaaacatagacggtcatcttattttcggaatgaacggccataactgtattacaaccatggcaaacggtaaacttcttatgcgcgaccgccgtcttgtggatttagatgaagaaaaaataaacgccgatataatggaaacagccaaaaagctttggaaaaacataaacggttgaaggagatgatataaatgggtgaaaaaatgacgccaatccctttcaaaaaacttataaacagaattctctgcgaatatgaaaacgagaaaaccgttttcggagtgcgttacccttacataaaaaaagataataaaactcttgaacttttcggtgaaaaagcggagacgcctttcggtcctgcggcaggtcccaacacccagcttgcacagaacatagtagccgcttattttgcaggcagcaggtttttcgagcttaaaacagtgcaaataatggacggtgaagaactggcggcgtgtatttcacgcccatgtatactagccgaggacgaaggctataactgtgaatggtctacggaacttcttgtttcgcaggcttgcgacgaatatataaaagcatggcttgccctgaaggttttttccaaaaaattcggtctcggctctcccgacgggttcatattcaacatgagcgtcggatacgacctggaaggcataaaaagcaaaaaaatagaccgctttatagaaagcctgaaagacgcctccgtaacgccccaatggaaagaatataaaaatatactgaaagaatttttcccaaaggacgcagaatatatagacaatataccgtcaaaagtatgtacaagcgtaaccctttcaacgcttcacggctgtcctccacaggaaatagaaagaatagcttcatatcttatagcggaaaaacatcttaatacctttgtaaaatgcaatccgacaatactcggctatgattttgcccgtgaaacccttgataaaatgggatatgattatatatcctttgacgaccgccattttagggaggacttacagtactgcgacgctgttccaatgtttacccgtcttaagacattggcggaaagcaaaggattggaattcggcttaaagctgtccaatactttccccgttgacgtaaaagcgggagaacttccatcggaagaaatgtacatgagcggaaaatctctgttcccccttaccgtggaaatggctaaccgaatatcgaagcaattcaacggaaaaatgcgtataagctattcgggcggagcggatttcttcaatatcgacaaactttttgaagccggtatatggcccataaccgtagccacgacaatactgaaaccgggcggttataacagactgaaacaattggctgaaaagcttgaacgctgtgaattccgtccgtttgacggcgttgactgcgaaaaaacggataaactcgcaaaagaagctgtcagcgatattcactatataaagcccgtaaaaccgcttcctagcagaaaaatcaataaatccgttccccttacggactgttttatcgccccgtgtaagtcaggctgtccgataggtcaggacatacccgagtacatagagctttgcggacagaaaaaatatacggaagctctgaaagtaataacggcaaaaaatcctcttccgttcataacgggaacaatatgtccgcaccactgcgcagacaaatgcacgagaaacttttatgagattcccgttgatatacgttccgaaaagcttaaagccgccgaaaacggatttaatgaatttataaagaatttctccgttccgaaaccttcggcaaaaaccaatgtcgctattgtcggcggaggtcccgccggaatggctgcggcatatttcctcggcataagcggtataaaagctactgtctatgaaaaagaagcaaagctgggtggtatagtaagaaacgtcataccttctttcagaatatcggacgaagccatagacaaagatatcgaacttattaaaaaatcgggtgcggaaataaaacttaatacagaagccccctccatcgaagaacttaaatcaatgggatatacccatatactttactgcacgggagcagtaaaaccgggaaaactggacataggcggaaatacgttaaacgtaatagactttttaaaaaggctcaaatcaggtgaaaatataaacatcggaaaaaatgtagccgtcataggcggaggaaataccgccatggacgcggcaagagccgcaaaaagggtctgcggcgttgaaaacgttactattgtatacagacgcaccaaaaaatacatgcctgccgatgaggaggaacttgccatggctgtcggtgaaggcgttgaatttttggaacttgccgcccccgtaaaatatgaaaacggagttttgaccgcaagaaaaatgatacttggcaaacccgatgaaagcggaagaagaagtcccgttgaaacggacgaactgataaacataaaaaccgatacggttatagccgccgtgggagaaagcgttgacagcgagttctttacatctcatggaatagaagtagataaaaaaggccgtccgtcatttaaaacaaatataaataatgtatacgttgccggggacgcattgaaaggcccttcgacagtagttgaatgtattgccgatgcaaaggctttttgcgaagccataacagaaaaccaaatttccgcaaacatcacggaaaatatgctttcctccgaagaaaacgccgtttccaaaaaaggcgtgcttaaaactccgtcgggctgtgaaagcgaaagatgcctctcatgcaatatcgtatgtgaaaactgcgtagacgtatgtcctaacagagcgaatattgttatacatcctaatggaatgggagcgcaaatagtccatatagacagtctctgtaacgaatgcggaaactgtgaaactttctgcccttacaacagcgccccctataaagacaaatttactcttttcagtaccgttgaggaattttccgaaagtacaaacaacggttttgtacctctcggagaaaatcttttcagagtaagacttgataatacggtaaacgactatgacctttcaaaggataataatcttgataaaaatatagaaatactgatacttacaatcaaaaacgactatccttacatactttaatccgaaatggagatatacactaaaatcgaatacataacgaaaatcaggacggtaaattcataccgtcctgatttattttcgcatatttaaacaagttttattctcgctccgtctttatattccgttatcttacctatctttgcggctctcggtatatatttctttatttcctcaaataaaccgctgtcgggcgctgcggctatcaaaagacctcccgaagtctgtgggtcgtatagcatatcctgtattttaagcgcaacattgcctccgtcgacatagttttcggcataatttctgtttctgtaaagtccttctggaagtatacccatttcagccatttcttccgctctgtctacaaactccatattatccgtatatatttccgcggcggcttccgaaccttgcgtcatttccaaaagatgtcccataaggccgaagcccgttacgtccgtgcaggcatggacatcgtattttatcataatatccctcgcctgtttattaagcgttgccatttgcttcaatacgttgcccaaagttttatcgtcaaccattcctgcctttgcggcggtcgttataatgcccgttcctatgggttttgtcagaataagctcgtctcccggcttggcgcctgcatttttcagtattttatcgggatgtataaatcccgttactgccaatccgtattttggctcgtcgtcaaatatagagtgtcctcccgttataagggctcctgcctcgtatactttatcatatccgcctttaagtatggaatgtacatgttccttttccatatcctgcggtacagccattatattaagacacagcttaggctctcctcccatggcgtatatatccgacatggcgtttgccgcagctatctgtccgaacaaatacgggtcgtcggcaatgggaggaaaaaagtccacagtttgcacaacggcaatatcgtcgcttattttataaaccgaagcatcgtcgcttttatcaaatccaaccaaaagattcgggtcgttatgaacttttatatcctccaaaagctttgccagtgtgcctgctccgactttcgccccgcaccctgcgcattttgcaagcttcgtaagtttaatatcatccatttttatccctcccgaaaagataatatggcttcaagaactccgccccctacggcaagagctttatccgaaaccgtatagcaatgttcctttacgcaccttgggtctacgtctccgcttttcatgcctttataaacgggcgttccctttggcaatatccctcttaaaacgccgcctatactgcatttaacggcttctccgtctatatacgcaactgtctgtccttctttaaccgtatcgccgatttcacacacagggtcgaaagctccgtcctttaccgctcttattatcctctctgtcgtatatcctccgatatttccgggcactcccgtatttgccgcggcagagccgttttttataactcttcccaagtaatgccctcttttggtctctataacggcatgacagtcgactcctgccgtaaatcccggtcccacgcctatgacaatcggcgcgtcatctattttcgttccgagattttcctttgccaatatggcgtctacaattgcctcgggcttcaaagcttttatgattttcgccttttcatcggctataaccgctatatttcccatagacagtattttttttatttcttcggcattatttgctttttccgccttaacgtcctcaacctgagccgttccgttaactattgcctgagaaaagcataccgttcttcttattgccgtcggtctttcaatatccgtcatcactacgtcgaatttagcatgtttaagccgaagtgcgattcccgaagctatatctcccgcgccttttattactgtaagcatttaagcctcccctttcttatttctcctgcgaataccggaacgtttatatactttgccgtttcagaagcattaataatatccgtttcgttttcaacttgatttattaccagcttatggcataaattttccgcatttattacctttgcggctatttggggcgttaccgtatattccgtatcaagccccgtcagttcggcatacaattccgccctgtggcatacattcttaatctttccaccgattccttttacgcccattacctgtatggtctcaacgctttccttcggtataacaggttcgtaaacctcatgcgctttcaaaggcagtccccgtgagccgtcagcctcgcacaaaatatagtccgcatatttcagtatttccgaaaagtctatatcaggcaatataagttttccgttttcggctgccttgccgacgcagataagtccgtttttataaaggcttctttttatctcttcctccgacgggtcataaagtgttataatatgctcgggcgcatatatttttgcagtggtgcagacgataaccctgctctcagccgaaagttcttcagccagagcatacataaggctcgtcttgcctccgcttcctattatggaggtcaaacctcttttaatgtttaaaatatcggaaatcatatacggactccttatcgttatattatcataaggataacacctttcgggagggtttacaatggaaaataaacttaccgccaaaatacgaatacatctgtttaaaaatgataagtgcttcggcccgggaatatgctctcttctggaagaagtggacaaatgcggttccctgcgcaaggcggcgattgacatgaacatgtcatattccaaggcatggaaaatagtaaaacagtgtgaggaaaatctcggttttaaacttcttatatcgactaccggcggaaaaagcggcggcggcgcatttcttaccgacgatgcaaaacagattataaactcctacaatatgtactgtgccgacatagaagaatattcctcaaagcttctggataaatatttctgaatttaaacagtgtgtttcgtatttttcaagaacacactgtttttttcacaaattttgaaacctcaaagattttttcctgtatttataagtgaagggctcttcaagaaaggattgaaaaaaatggacgataaacaaatattggatttatatataaaccgctccgaaaaagccatagaagaaaccgatgcaaaatacggctcttattgcaggaaaatatctatgaacattcttcaaaatattcaggacagcgaagaaacggtaaacgatacatggctgaaagcatggaatacaataccccccaaaatgccgaatccgttaaaaacatatttgggtagaataacgcgaaacctgtctctaaatcgatatgaatattacagagcccaaaaaagaaattcacattttgatattatcctgtcggaggtggaacaaatgattccgttaggggcaggctcggacgaatacgaaagcggcgaaatttcacaggctataaacgcctttctcggagagttgaaaaaagaaaaccgtatatattttgtacgtcgttactggtactccgactccatagccgatatagccgaaaaatacggagtaagcgagggaaagattaaatcttcgcttttcaggacaaggacggctctgagaaactatttgggaaaggaagggataagtatatgaaaaaagaagacttttttaaagaactcggaaatatagaccgaaaatatatagacgaagctgaagaagccgtaaaaaaagagagaggaaaaaccgttatgtggaaaaaatgggcggctgttgcggctgttctggttattgcaacggcggcagttatcaccttgccttcggcacaggctgccataaaaaagatattctcatttataccgggcatgaccatagaagaacaaaccgac

SEQ ID NO: 1287 - DNA, 26090 bp, Unknown
  16S sequences of unknown bacteria
gcaacggtatagtcgatccgtgcccctctcagatatggcttcgtatggaagtcataatcctccagcgcatcccaccgctcatgatatttcaaaaacggcagacagtaggtcatccgctccttccagtccagctccggaagcatcacatccagcatttcacgctttgcctttccgtaccgcattccgtcaaacgcctgccgcagcctcgcctcgccattatacagctccggataccagagataatacgtctccagcacgaccacctccggtttctgatacgcgagcgcctccttcaaaagaaaataggacgatgccacagtctgctccgcacttcccatatcataggcggcaatcccgtactcgcgccacagcacattcggctgcacaccataatacaaatggctgctccccaggaacagcacatccagcgaatcctttttcacatcgtaaaaggtatgaatcatatctgcttccgcaccgctcttcctgcgcagcacctctgaaatccttccatataaaagcagcccgatcccaataaaaagaaccgctgccaaaagccatctccagcctttcaccgctttattttgcatcattcaaatctccaacctcaaaactgaaaataaataaactggctcgcatcatagcccggcccatacacaccgaaaatcaggattccgaaaatcgctgtaaaatagatgagccagcggaaccagattccctgcttcgtaatccatgcaatcaaatggatgttccggtatttacaaatatctgctgccgccagaataccaagacaaacgatcagcacatcctttgtctgctccgtcagccccatgaccgtcagattgtcgccccatgtaaaccagtatgtgccggaacatccaaggatccgcttcagaatatctattccctgcgacaccgaaccggcccggaaaaagatccagcttacgctgaccaggctgaaggccagcagaatccgcagcagccggtggctgaatgaggtctcatccacacagaaccactgcttcagttttttattaaccgggcgcatccattcaccaagcacctgataggctccgtttaatccgccccagaacacataatgccagcttgccccgtgccacagaccgctcactaaaaagacaaccatcaggttgaaccatttccgcacttttcccttccggttgccgccgagcggaatgtacagataatcccgaaaccacgtagagagcgaaatgtgccatcttctccagaactccgccaccgacatggaaaaatacggggtattgaaattttccatgagcgtaaagcccatgaccttcgctgcgccgattgcgatattcgaatagcttccgaagtcacagtaaatctgaaacgcaaacaaaaccgtggcgatcagtagctggtagccggtgcgctctgcgcatgtattgtatacattatccaccgctatcgcgagatactccgccagcacgaccttctgaaaatatccatacagcatcaaaagcagtccattacgaacacgcgcaaattcaaagcggtgcttttcattgatctgaatcagcagattttttgaacgctcaatcggtccggccacaagctgcggaaagaatgacacaaacaacgcatatttcaggaaattcttctccgcgtaaatctcgccacggtacacatcaaccgtatagccaagtgcctgaaacgtgtaaaacgaaatgccgaccggaagaactacatcaaatgccggacgctgcacctcgatctgtgccagcgcgcacagccgcacgactgtatccgctgcaaaatcaaagtacttaaagaaaaacagaatcgcaagattactgataaacgagagcgccacacaccagtgcatccttcgtcttcgccgcttctcctctttgctctgtttcgctttttccagcagcagcccggatgcatacgtgatcgccgtcgacgtcagcatcagcaatgcatactgcgggttccagcacatataaaagaaatagctgcacacaagcaagaacagataccggatccgatgtgggatcacatagtagcacaaacatactgtcggaaaaaacaaaagaaattccagtgaattaaaaagcatagctcctccatattcttactttctgtcattcgctcatgagtccatttctatcatattcaataagtcatgctttttcatgcaagcatgaaacgcatgatcttttgacccttatatcatcatatcggcagagcgctgatttgtcaaaccaagcaaaccaactccgtcgtgtttacattttccccggtcatctgccggatgaaatcccagcttgcgcgccagcgcatatcccgccacatttttctcatgcacctgcacccagaccgtatccacgcgcaaatactcaccggcatactgcagcgccatgcggcacatctcattcccaatgccgcgatgccggtacgggcggctcagcatatactccagctccagctgcaggccatggccggattcgtgctccgaagcctccgcaaacccacagcagccgatcaggcgctccttcccgtccgcttccccggaacaggccgcttcctttaaaaaaacgccccacaggccatatccatacagccggtactgctccttgcagtacgccttcagcacctccggcgtaaagcccgccttcctctgggagccgcaaaatgcatactccatcccgtcttcctcgccgatccggcaaagcatatccacatcttcttcggcaagctcccgaagaatcaggcgcccatcctcggcaatcgtcgccggaatcccatggaaatgacagtagcactccctcagcatctgcacatccacatccagcagatccggcagtaccatcgcggcaccggcaaaatacccgtctgaatccgagatgccaagacaggcaatcccttccgtctctgcctgctctgccagccggcaatcatccgtgatgaggagcgcatccgaaatcacagtatccccacggctacccggaactgcctcccggttctgccaggatttatttctctcaccggccactatccggcaaatcccctctgcttccagctcctcaaacagctccgacagtccggcctgatggttttcttctaatttataataaacatttttcagcatttccatctaccacaatcctttatccaccattctatcatacccgcccgataacgcaacccgttttctgccttgcattccattcttgtaaaagttataatcgggatggcaggtcaaaaggtgttttgacagcaatttataaatatgtatcagaaaggaaacagaaaaatggcacagaatccaatcgtaaccattaccatggaaaacggcgactgcattaaggcagagctctacccggaggtcgctccgaactccgtcaacaacttcatcagcctcgtaaagaagggcttctatgatggcctgatcttccaccgcgtcatcaacggctttatgatccagggcggctgtccaaacggtaccggcatgggcggcccgggctacacgattccgggtgagttctcccagaacggcttcaaaaatgaccttcgccacaccgagggtgtcctctcaatggcccgcgccatgcatccggactccgcaggctcccagttcttcatcatgcacaaaaatgcaccgcatctggatggcgcttatgctgcattcggcaaagtcatcgagggcatggatatcgtaaataagatcgcagatgtcccgacggatttccgtgaccgcccgatgaaggaacagaaaatcaaatcgatgaccgtagatacatttggcgtcgactatccggagccgaaaaaagcatgaagcttttgtatgcagaggatgaacccacgatggcagaagctgtcgtggacatcctcacctatcacaactatctcgtcgacgcagtctccgatggggaggatgcgctctcctatgcactcagcgaaacctatgacggcatcatcctcgacatcatgatgccaaaattaagcgggcttgaggtactgcaaaggctccgcgctgcaggctgccggactccgatcctgctactcaccgccaaaacggaggtggaggaccggatccagggactcgatgcaggggcagatgattaccttccgaagccatttgcaatgggcgagctgctggcccgcatccgcgcgatgctgcgccgccgggaggaattttccccggatattctccgctgcaaagacctctccttaaatacggccagctatgagctctccggcccgaccggaagcgtcgtgctgccgcgtctggaataccagctgatggagctgctcatacgcaatcaaggtatctacctctcctctgcagatctgctcgtaaaaatatggggatacgacaccgacgcagagctaggcgtcgtatgggtctatatctcttatctgcggaagcgtctcaccgccgtcggctcttcctgcgcgatccgcgcaaagcggaacgtcggctatacactggaggcgaaggcatgatccgtgcgctgcagaaaaaatttgtcatcacctcgatgaccgccatcagcgtcctgctcctggtcctgctcggcggcatcaatatcacaaatatcgtcctctccgaaaaggagacgagccgtacacttggctggatcactgcacaggagctcggcgaatttccggataagccattctccgggaacaaatcgacagctccggatgccgataagccgccggagccgccctctccgtttggacaggaacgcaatgcaaaggatgcgatcctctcctccaattattttgtcgtgcgcacagatcttaccggggaggtcctctccaccgatgtcacccgcgtctcgaccttaagcgaggaggacgcggctgcgctcgcctccgccatctggcaggctgccgacaccgacggcacaagcggaaggtacaaatattccgtgcgtgcagacgaagaaaaagaagaggtcgtgctcatctttctggacacctcgcaggatctcctctcctccctgcgtgtccttctgctctccgccgcgctcggcgtactctgctggatcctcatgctgctgctcgtgatcctgctctcgaagcgcgccatccgcccgtttgcagaaaacatgcagaagcagaagcagttcgtcacaaacgccggtcatgagatcaagacgccgctcgcgatcattctggcgaacacagacgcgatggagctctacaacggagaaaacaaatggagccgaaatatccgcgaacaggtgaaccgcttaaacggtctgatgaaaaacctgctcacactggcgcggatggacgaggccaccttgcagatcacaccgacagacttttccttcagtgcactcgtacaaaaaaatgccgatgccttcgccgagccgtttgcgctgcgccggatcactatgcgatccgatatccggccggatctttggctccacgcggatcagggacatatcacgcagctcctttcgatccttctggaaaatgcactgaaatatacgaacgacggcggttttgtaacggtcacgctgaaaaaagagggacgcggtacactgctgcaaatcgccaatacctgtgacgccctccctgacatcccacccgcccgtcttttcgatcgcttttaccgggcagatgcggcacgcacacagaaaaaaggcggctacggtatcggtctttcggtcgcacagtcgatcacggaggcgaaccgcggacagatcacagcagaatataaggatggaaacaaaatctgtttctcggtcttctttcgctcctgacaacgttcactcagcacaaaaattccaaacgtgcgccgctaggcgcacttcacaaagacttcacagaaatcattctgtgaagtctttttttctaagctaagtctaaggttggcgtcctataatgctggtcaggaagcaaagaaaacagttcaatccacaaggaggaatttaccatgaaaaaaagacaattattcttatatgcactttccctttccgtttccgcagcagccttcggcggcgtcagcgtattcgcagacagtgactacagcagtcagacgatcaccgcgaaggtcacaggcatcgacggcagcagcgtcgatctgcaggtcggcgagctgaaccttccggagaagccggacgataccggcaacgccgctccaggctccgagagctcagccgacagcaacgctcagaccccgccggaaaagccggatgacaacagcaatgccgctccaggctccgagggctcatctgacagcaatgctcagaccccgccggaaaagccggatgatgccggcaacggtatggacttctttactgcaggcgatgacactctgacgctggattttgccgatacggaaatccttgtcgagatcgggaatgacaccgaggaaggctccctcgacgatatcgcggcggattccatcctctccattgaatttgatgaaaacggcgatgtcacccaggtaactgtcctctccacccatccggatgacatgggcggaaacggagaaatcggcgcaccggacggaaacggtgctccaaacggcaacggcgctccgggcggcaacggtgctccgggtggcttcggcggctccggcgaagtgacacagggcgatgcagcgacgaccatcagtgaggattccaccgtctcagatgagacctacacctccaccggagatgacgaaaatgcggtccgcatcgacggagcaaccgtcaccttagacggcatcaccgtcgacaaatcctccggttcaagctccaacaccgaggatggcgatttctacggcatgaacgcagcactgctcgcaaccggcggcgcagacgtcacgatcaccggcgcgactgtcacctcctctgcacaaaacggcaatggcgtattcagctacggggaaggtacgactgtcacgatctcagactccacgatcacaacgaccgcagataattccggcggaatccagacgaccggcggcgcgactacaaacgcctccggcctgaccgtcgatacatccggaaattcagctgcagccatccgttctgaccggggcggcggcaccgtaaatgtaaacggaggcacctatacctccaacggctacaactcaccggctgtttattcgaccgcagcgatttctgtttcagacgccacgctgacagctaataattcagaagcacttgtcatcgaaggacagaattccatcacccttgacaactgcgacgtaaccggaaacatgagcgatacagagggtaccagctccgatgaaaacgtacacaatgtcatgatctatcagtccatgtccggagacgcagaggtcggtacctcctccttcacgatgaacggcggaacactcacctcgaacaacggcgacatgttctacgtgaccaatacgcactgcacgatcaatcttaccggcgtgaccctaactaacaacgactccgatgcatacctcttgaatgtgaccggcaacagtgcgagccacggctggggcactgccggcagcaacggcgcacaggtcgaatttaccgcagacgaccagacgcttgagggcgatatcatcgtagacagcatctccacgctcgagctgacgctctccggcagcagcagcttcaccggcataatcaacatcacagaaaatgccgacggaggaaccgccgtcgacgacaacgcagtcgtcaccgtagaggaaggcagcacctggaccctgaccggcgactgcacgatcacttccctgaccaacaatgggacgatcgactttaacggacatacgatcacgctcgcagacggcaccgtactgggcgagtaacaaagctcccccttttccagactccggcaccggccaaaatgaggtgccggagtctttttgccgtgttgaaaaaaataagcgcttgtgataagatagcacgcggagttccgtatattcgcaagcatcccagcacaattattagaaagaggagacccccatggcagatacacagatcgaaatcaccccgcaggagctgaaaacgcttccgcaggattcctatcaactcattgacacccgtgacgacgcgagcattgcctacggaatggcaaacggcgcgatccacatcccgcaggaagccgtagtcgaccggctcacctccgaaccggagctgctcaaaggccgcaccgcgatcctctactgcgcacgcggtattttaagcatggagctcgcttccgagctgaaccgccgcggcatcccgtcgcgcagcctgaccggcggatacaacggctggctgctcgcccacttggcaggcgatacgccggatgaaagtgaagaagaaaaagaagaagcccggctggcccgccagaagcgtatcgaagacagcatccggcgcaaattccatgtgccgctcttctcccgctttgcaaaggcggtccgcgactatgagctgatccaggaaaacgataagatcgcagtctgtatctccggcggcaaggactccatgctcatggcaaagctgtttcaggagctgaagcgccacaataaattcccgttcgaggtcgtctatctcgtcatggatccgggctataatgcagccaaccggaagatcatcgaggaaaacgcccgcatgctcggcatcccggccaccattttcgagacacagatcttcgatgccgtctacaatatcgacaaatccccgtgctatctctgcgcccgcatgcgccgcggctatctataccgcagggcaatggatcttggctgcaataagatcgcactcggccatcactacgacgatgtcatcgagacaaacctcatgggcatgctctacggcgcacagatccagacgatgatgccaaagctacacagcatccattttgacggaatggaggtcatccgcccgatgtacctgatccgcgaggccgacatcatccactggcgggattacaatgatctgcactttatccagtgcgcctgccgctttaccgatacgtgcacgacctgtcgtccggacggcacgagtgtctccaaacgcatggaggtcaaaaaaatgatcgccgagatgaaaaagacgaacccatacgtagagggcaacattttccgcagcatggaaaatgtaaacctcgataccgtgatcggctacaagcagcacggcgtgcggcactcgttcctggaagggtataatttcacaagtttcagttgaatattcctgtcagatcacgtagaataagctttatatgatctgcacagactaaagcagagcgtttgctctgcttttcttacataaagcggatattcgcattttatttcattcacttatccatagcggaatgcattcctgtcattcggctgcatttgcttttgatagagaaaggagcttccatgaacatttttgatatcctcgggccggtcatggtcggcccttccagctcccatacggcaggcgccgtccggatcgggctgatcgcccggcggctgctcggcgggcagccagccactgcaaagatcacactctcaggttcgtttgccgctaccggcaccggccacggcaccgaccgtgcgctcgtcgcaggtctgctcggcatgaagccggacgacatccgcatcccggacagctttgcactcgccgtggagcagggactcgcatttacctttgacaagaccgaattaaaagaagcgcatccgaataccgccatcctgcagctgtccacggcaggcggccgtgagctggaggtacaggcttcctccctcggcggaggccgcatcatggtcaacaagctcgacggcatcaacgtaaacttcaacggcgactccccgaccctgatcgtccacaacttggaccagccgggccacgtcgcagaggtgacctccatgctctcgcacaagtccgtaaacatcgccaccatgcagctctaccggaaccaccgcggcggctatgccgtgatggtcatcgagaccgaccaggatatccccgccgaagcgctccggtggctctcgcgtctggaaggagtgatcaaggtaacgtatctgaatgcagagcagtgagacaagcgccggctaattgctgcaaaagtggcatgccctcccggcaacaaagctgccaagatgacttagctcgttgcccgcgagaataaacgggatactataaatagaaagagaggccagatttatggcatttgaagcattgtcgcagatccttgcgatctgtcagaaagaatccatcgatttcgcggaggcagtgctccgggaagacagcaaggaccggctcgtcgaccgcgaagcatcgatccgccagatgactgccatgtgggaaagcatgtgtgacgccagcgattcctacgacgtatcccgcaaatccaacagcgggctggtcggcggcgcaggcggcgtcatggccgactatgtggctgccggcaataccctgtgcggagatgcgatgggacgcgtcatcgcacaggcgctccagatgggcgaatccaatgcctgcatgaaacggatcgtcgccgctccgaccgccggagcctgcggcgtcctcccggctgtactcattccactcttccgtgatgatccgaatacgatccgtgccctcttcgtcgcagccgggatcggtcaggtcatcgcgacccgcgccagcatcgccggagcctccggtggctgtcaagcagagatcggctccgcctccgcgatggcggcaggcgcactcgtctacctgcgcggcggcagctgtgaacagattctcgccgccgtcgccatgagcctgaaaaatctcctcggtctcgtctgcgacccggtctccggtctcgtcgaggtaccgtgcgtgaaacgcaacgtcatcggcgccgtcaacgcgatgtctgccgctgacatggcgctcgccggaatccaaagcatgatcccggccgatcaggtcatcgacgccatgaaggaagtcggcgacctcatggatgtctccctccgcgagaccggacgcggcggcctcgctgccaccagacgcggtgtagagatacgtgagcggctgcagggcgaagctgccaaataaagtaaagtgcgcagatcccaaggctttaaccccaagatctgcgcacttatttcctccagcccccgctaccacgtctttacaatactcagaatctcctcctcatagttaccgcgatagtccttcatcctgcccacattttccacattgctctccgcgccgtagccatcctcctgaaactcccacacatgatagctcagtccgcgatgctcaaaatcaaggctgccacagccgccttcctccgtatattcctgtttccagcccttctcttcgatatagctctgaagcttttcaagtcgcatatgttcctgttcctttcacaataagtctaatacctttctgtaattcgtcaggctgcctatctcctctgccgcagcaccaccagcccatacggctcaagctcctgcttcggatcaccgaataccgtctcggtctcaccctccggaagcggcagcatcacacgaccggtgccaaaattctgataaatgtagtagcgcacatcctctgtctcgcgcgtcgttatctccagcccctccgggatctcccccggtacggcgccgcatatctcctcatgctccagcagcttcgcaataaagtcctcctggaacacttgctccgcatctgccgccacataccacgcgctgccctttccataacggttcaccgtcagcgccggatagccctgatagaaatcactgccgtaggtcatcagcgcctgcgcaccgtcaagtctgaccagatcgcagagatatttgcacgtatactcccggaacagccccagctcattgccatccaccggcatgaactgattctcctcccagtcaaacagcccgtcaatctccgtactgcgcagtccgagcacgtccatgaggccatgcggcgtcccgcccagatagcagcggtccgtatcatccgcgatgccgctccagtacgtcgtgatcagcacgccgccctgctccacaaatgcacgcaccttctctgcaaagccctgcttgaacatatacgtcatcggcaacacgagcacctgatagccctcgatgctgcagtccatatcgatcaaatcgacgttcatgccctgcttgcggaacgcccggtaatacttcagcagcatttcctgatggtgcagcccgtcgttacgcggccccttgctgtcctccattgcccaccggctgtcccagtcgtagatcatcgccacctggctcttcacctcgctgcctgccagctccgagattgccttcagcgtctcgccgacccggcatacctcacggaacacccgcgtatcattttcgccataatggtcgatgaccgcaccgtggaatttctccgatgcgccctggctctgacggatctggaaatacagtgcgccctcaccgccatgcgcgatcgcctgcatcgactgtgcgaagagcacgcccggcttcttcagcttgctgactccctgccagttcgtcgcggacggacaggattccatctggaaaaacggcttgcgcttcagagaacgcatcagatcgtggcacattccattgtcataggctgtctcgatcattgccttcttgccccaggacggatacgtatcccaagtgacgatatccagctctttcgcgagcttgaaataatccagcggatcatagtaatacatcagattcgccgtcaccggacgggtgcttccgcctgcgcgcacggcctgtatttcatggcggataaagtctgccgtttgatgcgtcacaaaacgcttccagtccaggttcagtgcatgcagctccagctcaccgcgcgtcgacgggctctcgatctggtcaaagctctgatacgtatggctccagaacgttgtcgaccagcacttattcagctgttcgatcgtaccatagcgctccttcagccactcctgaaacgccttctggcacagaggacagtgacactcaccgccatactcattcgagatatgccacaaaatcacacccggatgactgcccagccgttccgacagcttccgattgatcagcgccaccttctctcgatagaccggagacgtgtagcagtgattgtgccgtccgccgaacagatttcgatggcgggattcatcgacccgcagcacctccggatacttgtctgccagccatttcggacgcgcgccggacggtgtcgccagaatcgtggaaatcccgtgctcatagaggttctggatgatcttctccagccactcaaagtggaataccccttcctccggctccagcgtcgaccatgaaaaaatacccaggctgaccacattgcagcctgcctccgtgagcatgctcacgtccttctccagaatgtccggccggtccagccactgctccggattgtagtcgccgccgtgcaacagctttgtcgttgtaaaatccatgtgtttatcccccttcatttctgttttttatttacaccttgcctgtttgtcccatctcaatcagacctttccatggcattatctctcaccattttcttcccgcagcagctgctcaatcttctcattcgcatcctcatacgagagaaactgaatcccgtgaatcccgactgagcatgccccttctgcgttcgccttcaggtcatccacgaaaatacactcctccgccttcagctgatacttctcaagcaggcaccgatagatcgccggatccggcttgagcagcttcacatagccggatacgacccgtccatccgtatacttcagaaactcgaagcccgccttgtgcacctcaaaatagctcaccggatagttcgagagaatatacaccccgtatccacggtcatggaactgcttcagccactgcgcagaatatgcaaacggaatcgtcagatacggctttccctcctcgataaaacggtcataatccgcccgcatctcctccgggacattcccgcgcatcgccgcgatgacctcctcctccgggatcgcgccacggtccatctcatgccagagcggactcgcgatcgactcccgcagaatcaccctcgcccgttcctccgaaatgcccatatccttcagcacccccgccggccggaagtccaccaacaccccgccaatatcaaaaatcagattttcaatcatactatctcctttgtgctccggcctgccagagcattgatcttactgtatatataaagctctctttactatagcatgctttacactttgcggcaatcttggtttaacacatatttctgattccctttccttcttctccatgctgtactaattatgttgtccagccgatacccgataatgtgaggaggcgaggtccacatggaaatcagtaccaccggcatagcaagtggttttttcttttccaaagttccgtatccgacttcggatacttcacaatggaaaatagggctttgccttgacaaaaagaaacatccggaagttctcaatcttccggatgtctcctatccgtatcttttatctggtctcgtaagtactcagcctgccgcttcccttctgtctgagctttcctgccgcgcagagctgctttagaagccgaaatgcctttgtcgtcccggacccgatcaaattctccgcctcttttcgtgtaatgctgccatttttgcgcgcataagccagaattctgtttttctgttcttccagaatgtcggccttttgagtctcttccgctgtctgcgtaacttttcgtggcacttcgtttcgattcggaagggtcacgcggaaaacgccttttgcggtctcgaattccgggtgtgcctcacagctccggtaggcgcgccggatctttccgatcccggtaccgtagctctcgatcagtcgcatccgataaaatatggcagccagactcggattgcgcgactgtgatacgccgaggaagatcgattttaattccagtcctgcgaccagtccgcccagggaaacaaactcaatgcggtcgtcatagatattgatcagattgctgccgctaaaggagtaatcccgatgcacgatgctattcagcagtgcctctctcaccgcttcttccggataatccctcacatctgtccgatccagaccggaaaaggtcgcctttgtcttattgaccagatctatgaactgatatacatcctcaagctgcttcaaaacagaacccgaaaattcttttctgtcccggaacacttctttatccgtcccctgaaaaagcgcaacctttgtcgtcgtctcgcattgatccgacaacagtaacgccagatttgtataaaggtcatcttctccgatcaatttcaacgtcctcatctgtggtgatccgatttccagcgaccgcttttgcatctccatctgaagtgtctgaaaggtcagctcctgattcatgcttctgcataattcgaaagaacggccgctgttttgaaggatcatctcacggattccttcttctgtcataggctgcgtagagctcccctttctgacgtaaaccccacttggcttcagtcctttttcccgaagataatacgggcggtttgtcccggtcgtcacctgaatttcgacgacctgcttttcttctattccgaccgtgtttacccgtacaaacggcataacatccggagccagcgaatccttcagggaatttacaatttgcagcatgacttcatccggatttgcaacgccgagcactgtcccgtcctttcgtactccgacaaaaacgcttccgccttctgcattggcgaatcccattacttcttttcgaatatccggaacatattcctgcttaaattctacattcagattttcaaatatcagcatcctgttctcctttctttcttttttctttctctttattgtaattaagaaagaaagaaaagtcaatccgtaaaaaagggacatccggaagcactctgtctcccggatgtcccctcacttttattcctttactgctttttcacagctttatttttcgctgcgtcttttgcgtctgcaaatgaattctgctgcgagcatcgccatcgacgcgagcatcagagccatgtacggtgcgatcggtgtatcgtcgccggtctttaccgacgtggtcttcttcgtctcagactcggtctctgtctcagtctctgtattggtgatggtcacatgcgcttctgtgtttgcctcgttcagtgtcacggaggtcttgtctacctgaacggtatacttgaagcctgccgcgcctgctaccggcttgccgtttgcatctacctcagtgacgtacagcgtctgagatccgcccggtgcgatcgccacgaacacttctgcttctgcctcagagccgcctgccaggtcgagtgccacgatgttctcggacacgtcgccggaaagctgagtgtatgccgcatcggagaagatacctgcatagaatacttcattgctgttcttcgccttcttgtcacttccgagcagcttcttcgtgatcgtcagaattccttctttgtagaatccgtccggaatcgtcgcaaactgattctcaaagtatacggtcgtacttccatctgcctctgtcacagtcgccttgttgccatttgcaaatactgctgcgtaggccacattgcctgccatgacgccggatacaaagttcacgccatttgcgtcacactcaccgacgtaatacgttctgccgatctccacatttgtaaatgtaaccgtagcgctcgatgctttcttaaatacgagcggcatgatctcggaaatccgctttgtgcatgcctcatccgcatacagtgccacatagaaggtggcatccacggcgttgatctcctcaccggagaaggtcagcttcttcgtaacagaaaccgatgccttttcgcttctggtcatcgcatccttcataactaccggatccgttgtgccgtctgccttcatcgtgaaggaaatcggatcagcgatctcatagccatccggagccttcacctcgatcagctgataggtcgcgcctgtgttcagcttcgcttcgatcacgtgcggctgtccatctgtcgtccactcatctactgcagttccatttgcatcaatcactctcagcactgcgccggaaagcggtgcttccgttgcggcatcgagcttggtgatctctgcctttgtggctgtgtcctcgacaagaagaactccgtccttgttaatcgttactgttcctgtcaccttgccggtgcggtcgatcgtaaatgtcgtatccgttgtcagcgtatagccattcggtgcaacggtctcgcgcagcgtgtactcctgaccgactgtaaggttctttactttgtgtgtctcacccttcttggaatcccactcatctacaacgtttcctgccttatccagcacctgaatgtgtgcgccgtccagctcttcgccggtgccaaggtctaccttcgatacctctaccgtccgcgcatcctctacaagaagaacgccgtccttggtattcgtagtcgtcttgtcttccttcagcttaccatgctcatccagctcaaaggtcgtatccgttgtgatcgtgtatccatccggcgctactgtctcgcgcaggatataggtggtgttggtcttcagcttttctactaccttgtcttccttcgtagaatcccattccgtgacaagcttctcgccctcgccggtcttctcccagatctgaatatgcgcacccggaagctccttgtcgttggtgatgtccaccttgcggaccttgacggaggtggcggtgtcttcgacgagaagaacgccgtcttttgtcttcgtagtcgtcttgtcttctttcagcttaccatactcatccagctcaaaggtcgtatccgttgtgatcgtgtatccatccggcgctactgtctcgcgcagcgtgtataactctccggtcttaaggccggtcacttcatgcgctttcttcgcagaatcccactccgctacgacggtaccattcgaatcaaggatctgaaggtgtgcgccctcaagctcatgtgcgtctgaaatgtcgactttggtgatcttgacggaggtgatcgtgttcgtgatcacgtattccgtcttgtcctcatttggcgctacagacttcagataaccgtctatctcgccgacttcgtcgacgcggtagctgatctctgttccatctgcatacttgtcaaggtctttccaagtgtacttccagctgttttcttcgttcagctctactgagtcgccctgcggtgtttcatctgcataaagctgtacctgaatcgatgccggacgaacgcctgccttattgttgttgtcttcccatacctttgttacgctgatgtcagtcatttccggggtatgggtgttggtcagcgtggtgataaatccagtgacaccttctccaggtgaaaggatattataagttacttcgttggtcagctcgtagccatccggaatgtttcctgccttctcagtccagaagtactcatacatctgaccatccttatacttcggctgattcgatacactcgccttccagccatttgctgcggtcagttctacagtcttgacttcctctgccggattggtatccgcatcatccacatcatccaacgtgatcggaaccgcctgctctctgattctgcgcatcaatgtaacaggcagcttctccggacgcttgccgtcctgattgttattgtcatcccaggtcttctcgacagatacctcgatggtggccggtgtgtgagtgttcgtcagtgtcgtaatacccatttcatcagaatctgaaactgtaaccgtatagccatccggcagctcctcagaccaggtgtatacatttggttcagcaactgcggtattcttaggcagatccgtgatcatcgccgtccagccgttttcttcattcaggattacgtactgaccggtcagttcgccgttcttcaaaagatctactctcagctctgatggacggatgccatcctggttctctgcgtcattccagatcttgcgaactcctacagataccttatccggcacgcgtgtgttcgtcagggtcgtaacctcgcccaccgtcacatcaccggtcagctcatagccctccggcagtccgtcttcctgctcagcccaggtgtaaatattctccacaccggcggtatacttcggaagatcctcaactgttgtttcccatccatttgccgtattcaatgatacggtccgcatgaactgtccattcttttccagatcgactttgatctcgatcgggcggacgccgtcctgattctcggcatcgttccatgtcttcctgatggtcgcattgactacctccggcgtatgcgtattcgtcagggtcgtgaaggttccgtctgtctcatttaaggtcagctcatagccctccggcacttctgcctctttccaggtgtactcattcaaagtaccatccgtgtactcatccagcttcgaaatgctcgcactccagtcgttttctgcactgagcgttaccttctgatccgtttcctctccgttcttcacaagaattgccgtgatcgtctccggacgcttgccgtcctgattctcaccgtcattccatactttcagaacacttgcctctacctttccaggtgtgtagctgttcgtcagtgttgtaatgtctgcttccagtgtgtcttcggttgcttctgttacttctttcttcgtatcagtcaggctgtagccctccggcagatttttctccacccaggtgtatccgttcttcacaccgccggtgtacttgtcaagattctccacggtgccggtccagttgttctcctcattcagagttaccgttcctgccacttccgtaccgtttctcatcagctctaccgtcagttcaggtgcacgcttgccgtcctgattgttgttgtcatcccataccttcttcacaatcgcattgatcttctgcggcttgtgcgaattggtcagcctggtgataaatccagtgacgccttctccaggtgaaaggatattataagttacttcgttggtcagcttataaccgttcggaatgttgtcttccttctcgatccagaagtactcatacatctgaccatccttatacttcggaagattcgatacactcgccttccagttatgtgctgcggtcagttctacggtcttgacttcctctgccggattggtatccgcatcatccgcatcatccaacgagatcggaaccgcctgctctctgattctgcgcatcaatgtaacaagcagcttctccggacgcttaccgtcctgatccttgttgtcatcccaggtcttttcaacagatgccccgatggtggccggtgtgtgcgtatttgtcagtgtcgtagtacccacttcatcagggtctgaaactgtaaccgtatagccattcggcagctcctcagaccaggtgtactcatttaaggttccatctgtgtactcatccagattgtcgagcgttgcgctccatctgttttcttcgcttaagattacaaactgatcggttgcctgaccatttttcagcaggttcacacgcagtttctccggacggatgccgtcctgattacttgcatcgtcccataccttctttaccgatgcgcttaccttgcccggtgcgtaggtattggtcagggttgtaatcgtaccgattaccacatcatcgctgtttttctcgtctgtgacagctgcgctctccagactatagccctccggcatggttccctcaacccagctgtaacggatcggggtgccgttctcatttttcgcaaggttttccaccttagcagtccagctgttggtagcgtttaaggtcacggtctgcatcggaacggtctcattcttcatcagagtaactgtgagatcctgcggacgcttgccatcctgattgtctgcatcgtcccataccttgacaaccgttgcatttaccgtctccggtgtatgcgtgttcgtcaggattgtcttgcttgtgtcttcactgtcatatcctgtcgtcagagtgtagccatccggcacattctcttcctcccaggtataagtgtacggtttgccatttacattctttgcaagaccggatttcgttgcagcccagtgatttgtttcatttaagactgcctcgtctaccttatgctttgcaacgtcgtctgcctctgcatacagggttacggtgatgctctccggacggatgccatcccggtttccatcatcgttccataccttctgtacggatacgcttgtttcttccggtgtgtacgcattgatcagaagcgtcatgttattcgctgtctcactcggaagcggctggtagccgttcaggccttcctgactttcctcccagaaatactggatttctgtaccgttttcatactttggaagattatctacggtcttcttccagctgccatccgcaccggctgtcagtgtgtaagtgtcaaccgttcctatgaggccattgacgctctttttcagaataacggtgatgctctccggacgcttttgatcctgattgtcgttatccctccatctcttctcaactgtagcgctggtcttttccggtgcatgcgtattcgtcagcgtcgtgacaaaggatttctcgccgttttgctgcgctgctttcaccgtatatcctggcaactgcgtctcctctgtccagtagtacgtataagctgcaccatttttgaacttcagaagatcggttttcgtatacttccagttgtttgcttcatttaaggtcatctccaggatctcttctgctgccgcctcacctgccttgccatacagcttcacggtaatgccggtcgggcgcttgccatcctggttgttgttatcgttccataccttcgtaacacttgcttccactttttccggaatgtgtgtgttcgtaaagatggtcttgacggtatctgcgctgtcgtctaccgctgttgtcagcgtgtagccagccggtacgttctcctcttcccaggtataagtgtacagtttgctgtactcttcgtcgccctgcttgactctcacgtactttgcaaggccggataccgctgccatccagttgtttgcctcatttaaggttacctgctttatctcatgcttcgcaacgccctctgcttctgcatacagtgttacggtgatgctatccggacggatgctatcgcggtttttgtcatcatcccataccttctgtacggctacgctgacttcttccggcctgtagctgttcgtcagggtcgtaatctcgcctttcgtcactatagcgctgaaataatatcccttcggcagtccgtctgtgtgctcagaccagttgtaaatgttcgttttgccatctgtgtacttcggaagattattaatctccaccttccagccgtttccctcattcagcgttatggtctgaacgagctcgttcggagcattccacctgtttccaaccttctttttcaggtcaactatgatctcggccgggcgcttaccatcctgattgtccgcgtcatcccataccttctttacggttgcttccgttgtctccgggatatgggtattagtaataatgaagccttccttcatgtttccggtgactgctcccgtatacaggttaacagattcctcctctacggtgtagctgatcgtctgtccgtttttcttttcatccagatcactgaaactgccgctccagtggttatctgcgttcagcgtcaggcgcttacccgtgtccactccgtctgccatcagttttactttgatggaggacggacggtgaccgtctgcgttgttctcatcattccaggacttggtgaccggaacgtccaccttgcctggtgtatagctgttcgttacgttgtagccatccacaacggtagtgtaattctctaccgcatcctcggtaatcgtgtacgtgatttctgttccgttcgcatacttcggcagatcttcccatttccagttccagccgttcgatgccgtgacagtctgtaccttatcggtcagctctctgccatccgcatacagacggatcgtgatgctgcccggacgcttgccatcctggttgttattatcgttccaggtcttgcttccttcgatgtcaattgtctccggtgtgtgcgtgttggttacgttgtagccccttacacttgttgtatatcctgctactgtatcctccgtgatcgtataagtgagttcctttcctccctcatacttcgggagacccttgtagctgtagccccactcatccccagtcttcacccaggtcggttctacatctgtgacttccgccttctcaatgccttccccttccttatacaggtgcagcgttacgccatccggacgcttgccatcctggtttttcgcatcgttccaggtcttgcttccgttgatgtcgattgtcgcagggatatgcatgttggttacgttgtaaccatccacaacagtcgtgtaattctctaccgcatcctcggtaactgtatactcaatctcggttcctgcatctttgtacttcggcagatctgtgaagctccaactccagttgttcgctgctgttacggtctgaaccttatcagccagctctgtgccatctgcaaacagatgaattttaatctcgcttggacgcttgccatcctgattgttattatcgtcccaggtcttgcttccgctgatgtcgatcagttttttatttacaattatgaagccctcttttccaaggtcttctatttccactgcaaatttgtttccgctgatcgtcacctttccgtccgattcaccaacttccttcacactgtaaataatttcattgccattactatccgtgattgggaggtcttcccatgtgtaacgccagtcgttttctgcattcagagtcgccgtatcaccgtattgtgtttcggctccatccttcactttaccaaacagctgaacctgtacacttgcatttgctgggatatcgtcttcttgtatccactcttttcttaccatacggctcgtggtttcttttttattttcgaaaataaccgtattgccaccggtaaattcattcagtgttatattttttgcgtcagcttttccttttaatgcttcatactctttctttttttcatcattccttatatttttaatgataaagtaatgttttcctgtatctcggctgtatcccgttggcgccatggtttcttcataataataaagagtattatagtgcagttctttaaaagtaaccattccgtttgaatcactggttgctttcattgcttcataagccggattatcttccagtgtctccggattcactgccttgacaacaaaagtcgcaccctgcagtgactttccgtcttcatttactttttgaatgctgacagaatccgatcctcctgacacagttgcatctgacttctgatattttacttctgtttttgtttctgtacttttttctattcttccctttaaggtcgctgaatttgatacctggtaggtcttaccatcttccttatctgcagtaacaagtgtagcacggtaaactacccgaagtgcacgtgaatcaggaatggtaagcaccatctttgtttttccgtcattcagcgtactgaaggagcgtttaaacgataccgcttctcccgtatctctgtctgtgactgtaatgctcgttgtatccagcgtcagattctcatccaaaacgtcctcaagtactaatacatcactgtccggaagaagatccagcgcttcatagttgacatcaattacatattctactacattttttacaccgctaactgcttttccgactttatgcagttctttgctcgtcatagtgacggttgcagactccgtttttttaccaacggttacgctattggtaaaagaaatcctgtcgccatccactgtaacgccatttccagaacctgtcggaagtgtcgtgatttttgtatcatatgtaattactgcccgtacttttccggtcagtgccggaaccgtcattgtcagtttccttgttgacggatcaaaggaggctttgatagctgtttcttctggattcttctcctcgttctctttatacagcatgcattttgctgaaccgtccacataggtcatgtattccggcagtgtatctgtgatggtctttgtactctccggaagatctgtcctcttccagttttgcagatcatttataatgatttcccattttgcgatgccgcccgaaagtgtaccagacttatcaagcacaaagtctgtatttttaatttctccggaagcactgtcatcttcctcgttgtcctcatcatcaatcgtataggaagaatgaatcttatttcctacccaaccactataagaacctgaatccgtataatccgaagtgtaagtaatttcaaggattccgctgatctcttttgaaaataccagagtcatggtcggatttacaccattacctcccgctgttttcgaaacggtatagtttgttccttccgtcagcgtactgccagcctcttttatcgtaacagtgccttcatactttcctttccaattatagaaatcctgtaattcatcttttataacaagattctttactgtctttccttccggcggtgtgaccgtgattgtccaggtcgcttttctgttttcactgtctgtgacaaccgatttcttcacgatatctggttttggcttctcgcccggttttacttctacctttccatcggcttcttttccgtcgccaccaatcttgtttgtaaacgtcaccgtgtctttgatatcagacatatcttttgtaatctttgtcttataaacaagcttgtatgctccgcggttcgcagtctgatcacttgggaaggtataagaaaagctctttccatccgcagctgtgatatcactgagcgctccggatgcgatctgttgtccgccaacccaatgctggcttccgtttgaatcgtaatatacttcataatttccggtatatttctgatccgcaccaagtgtatctgtaaacgtctttcctgctgccgggctgagatttcccggaacataaattactgtccaggtaatttctccattggaaacggctccgttcttattaacaatactctcggtaatctggacggttgtatcttttgaaccacttccaccggtccaggtccagtctgccctgtttttattaggatcgccatttttaatgttgaaatcttttatttggtgttagaatataaatagtacaaaataaacatgaccattttcaataaatatta

SEQ ID NO: 1288 - DNA, 17502 bp, Unknown
  16S sequences of unknown bacteria
tcgctacctccaccttggcaaggtggcgctctaccagatgagctaaatccgcataacccgtggtgcctccggtcggaatcgaaccaacgacacggggattttcagtcccctgctctaccgactgagctacagaggcgaatgggcaatggcgacctggatggggctcgaacccacgacctctagcgtgacaggctagcgttctaaccaactgaactaccaggccacaatggtgggaacaacagggctcgaacctgtgaccctctgcttgtaaggcagatgctctcccagctgagctatgctcccgtcatgtgtaccgcccggtttgcatatcactcaccggcgacaaacattatcttaccataacataacctgtttgtcaagaactttttttaatttttttgatttttcttaaagtatgcggtgcatacacgtttttcggcgagcgaagagagggcattcttcggtatgagccgccgccttttacggattttgccctacataatatatgtattatcctacggtatgtttttatgattaaaaattcagccggatttttcggattttataattcagctttaatagttaatttgaattattttttgtgcgatattacatttatatttttcttgcgacatatatcgcacgctcggtttcgtcggtagggggagagagggtcatatcggcgtacacggctaccttttcaagccctgccgatgcgagtgctttatcaatttgacggtcggaatacgcacgctcggaaaattcctcgccgctgcggcggtaagcgtccccgtcccttataaagaaatcgagcagtatatccgtttcaagcgtttcggggttggtctcgttctgccaaacgcagtaaacgtcgtcacggtcaataacatatgtattatccgccagtatatgagtatgcttgaaaacggtattaacgtcaaaaataaaaagcctgtccttttcaagaaaaagcgatacctttgaaatcgcggtgcaaaaagcggaataatcggttatgtggttaaggctgtcaagacagcagacggcaccgtccaccgtgccgtaaagatccaattcctctgcgggctggcagagataaagcacatcggttttgcactcggcggaattttgccgtgcggaggctaacatatcttcggaaatatccacacctattacatcgataccgcgctttgcaaattcgttggaaaatccgcccgtgccgcaggcaaggtctaaaagcagggcggggcggcggtcgtgcttttcaaaaagagagagcaggtaatcggtgcgcgttttatagtctgcatcctccataaggcgatcgtaaacctcggcaaagcggtcgtaattactcattttcctgctttaacctttcaaaaaccattttgtagccttcgttaattgagcgggcgaccctgcttattgtggcggtgctggcgcctgtggcttctataatctcgctgtagaccgccttattgtaaagcatttttgcaacgttatatcgctgcgctatcgcccgaatttctttcggcgtgcaggcgtcggcgaaaaatttatagcattcttccttatccttaagagttaaaacagcttcaaaaagctgatcggctgcgttgtttttttccatgcttcggacccctttcaaaaggaactgattatattttaacacattaaaccgttaaagtcaaaacatacttgccaaatgtttttaaaaatgttatatttaaatatgggggatgattacgattgaacagtgtaaaaatactgcatttggcagatgcgcatataggcgccgcacttagttttttgggagcgggggcggacgcaaggcgttatgaggcgctcatgacctttgaacgcataatcaacacggcaagcgagcagggcgtgcagcttatagccgcagcgggggatattttcgattcaaacaaggtgtcggaaaagtttattgcgcctatttttgaaaaaatagcctccgtgccgaaaataaaggtggtatttgccgccggaaatcacgatccgctgaccgccgattcgccatttgaaactcggaagctgcctgaaaatctttatgttttgggcacggcggacgactgcatcacctttgacgatataggactgcgggtgtacggcaggtcgtttgagagcgtatatgcggcgggggaggaacggctttcgattactccgccggatgacgattatataaatttaatggtgctgcacggcgagcttcgcagcgatatgggatccgattacaactccgtgactcccgggtttattgagagcagcggtatggattacatagcgctcggtcatattcataaacgcaccgaaataaggcgcctcggcaagaccttttacgcgtatcccggctgcccggagggcatgggctttgacgagctcggcgaaaagggagtttatataggggaaatatcaaagggcggcaacagtctcgaatttctgccgacggcacgcaggatgtgcctttatgaaaaaatcgatatcaccggctgtgaaacaaacgccgctgcagcagagaaggttcttgcggtgttaaaggaaaaatacggcgaaaaatacgcggagaatctctgcaaaatcgagcttataggcactgcgaatataatccctgccgaagttttaagcaggctcggctcgctttattatgcaaagctgcgtgataaaaccgagcctccgataaattacgaagaattatcgcatgaaatttcgcttaagggactgtttgtgaaaaatatgctttcaaggctgaacgccgccgacggtgaagaaaaagaaaatttaaaagaggcgctgaaattaggcttaaaggcgtttgacggcgaggtgagctgcgatgaaaattaacagaatatatatagccgcattcggcggccttaaaaataaaacaatagattttgaggacggcttcagcgtcatatacggcgaaaacgaaaacggcaagactacaattatgacctttattaaaatgatgttttacggcagcgagcgcgggtcttcctccatagctaaaaatccgcgtaaaaaatacgctccgtggagcggggaaaagtctgcgggaagcatcgatttcgagcacggcggcagaagctaccgtttagagcgggaattcggcaacaccaattcgagcgataaaattacgcttaccgatatgtctgacggtacaagagaaagcttatccggcaatgtgggtgaaagatttttcgggctatccgccgccgcgtttgagcgcagcgtctttgtgggacagttcggcaaggcggagagcgattccgctgccgaaagcgagataaattcaaagctttcgaatatggtgactacgggggacgaatcggtatccttcgccgcggtgagcgacaggctacaaaaggcaaggtttgcccttctttccaaaagcggcagagcgggcgagtgcgataagagcaaaaagcggctggcagagcttgaagcggagcttgaaagagcggaggatatatacgagaagcatgccgaataccgtaaaaacgccgatattattaacgcgtcgatcgaaagggacgccgagcgcgcggcgtgccttaaggcaaaaatcgacagcgagcaggatataagaaacgccgaaaagcttaaagagctacttgagactaaggataagcttgaaagggcaaaggaggagctgcgtttaacaaacggcggggtgatagatgatttatatgtcggcaaggtcaagatgtgtcttgcaaagcttgataccgccgccgaaaaattaaaggataaaaccgatgaggtgcaaaggctgtcggtcggtatagcggacgcagaggataagggcgtcagagaaaagatcaagaatcttgaaaaggaaattaccgacctgaacaaaaagaaaacggagaccgaaaataatatttccgcaaataaaaaggcagcggaagcccttcgggcgaccgaaagcgatgttagaggtaaaaagagcggtataaatgttgtatttataacggctgcgggctttgcgctgctggcggcattattgcttttcgcctttaaaatgcagagcgttgctttaatacccgcggcggtatcggcggtatcggcgcttttaagctttattctgcgccctgcggataagcgcgcgcttaaggattatgaaagtcggcttaaagcatttgaagcggaagccgaaaggcttaatgcggataagacggatgtattgcagcagctgtcgcttttgtctgcaaggcttgaagctgtcaacacctcactcggaatgggaacggcggcgcttgaaaatcagaaaaagctgctgcttgagagtcggaaggcaatggaagaggcagaaaacacctataaagctgccgaaaaaacgcttcttgagctttactgcagctataagcccgcacaaagcacggatgaaattcggcacgagcttgatacgcttgcagagaaagctgacggtcttaagcagataaagcagaagcttacttatttggcaaaggatctcggtaatatttcatatgatgaagcgcgccaaaagcttgaggctctgccgcggacgacaaaggaaatcgattttgaaagcattaaaacggaatatgaaagtctttccgaaaagctctccgaaaaccggagcatgcttgcgagggccgaagcagaggacggaataagcattaaaaacgcgccagaccccgagagactcaaggcggaaattaaggagcttaccgataagataagctgtcaggagggcttttgccgtgcggcggatactgcgcttgaagcgctgcaggacagctttgcggagcttcgcggcagctacggctcggcgcttgagaagcgggcgggcaggattttttcaaggcttacccgcggtgcttacggctctgtgcttataaccaaggcgtttgatatgagcgttgaggaaaacggaagattcggcagccgcgaggcggaatatttaagcagcggcgcggcagatcaggcgtatttaagcctgcggcttgcgctctcctcgatgattttcgaaacctccggcgcattgccgatatttttggatgattcccttgcgcagtatgacgatcgcagagcagaggctgcggcgggcttcctaaaggaatattccgcggatggtcaggtaataatgtttacatgtcacggcgctgtaagagacgcggcggtcggtgcaggcgcggcggaaatcgatttgggagagaaaaatggacaataaagcagagcatgagagacccgagcttgaatgtgaaaaattttgggtgttcgtaacaatgatagccgtaggcggatatctcggcgcttatacttatatacttaagggtggggtattctgcaatgcacagacggcgaattttgtcctgatgtccgtcaatatagggacgtttaacttcaaaaaggcgctttattacttaataccgatatcggcatatttcgcgggtgcggtaatatccgagcttatgccgaaatatacgacctcggcattcaaaatgcgatgggatacattttttatcggctttgaaatgctggcgttttcggggatagcatttattccggatgacgcgccgccgcagatatgccatgtgctgataaatttcatagcctccatgcagtataataccttccgccagtcgcgccatgtggtaatggcgaccaccttctgcaccaatcatctgcggcagacgggggtcaaatttgttaaatggctcaggcacggaaataaggaaatgcttgcggggctgcttatgcatttatctatgataggtgccttcactgcgggcggaatagtatcggcgctgctttgcacggcgtttgcgggcagggcgctgctcggcgcggaaataccgcttgccgtggtttttatcgctcttttaagggctgatctcggagcggaacgggataagctggatattaaaccgcacggtcattaaaaaaagtgaaaattcacacttgactttatcgctttaaagcgatataatatactcaaaaggagattgatggatatgagtataaagaaaatattatcggcaatgactgtttttactctgtctgcggctgtctgcttatcgtttgcgggctgcggtgagaaaaaggaaaaggataaatacacggtcggcatttgccagttggctcagcatgaggcattggacgccgctaccaagggctttaaggacgcgctcaccgaaaagctcggcgataaggttgaatttaaggagcagaacgccgcgggggaatcatccacctgcaccacaatagtaaaccagtttgtatcaagcaaggttgatcttatattcgcaaacgcaacgggcgctttgcaggccgcggtttcgggaacggagagtattccgattgtaggcacatcgattaccgattatgcaaccgcgcttgagattgacttgaaggattggacaggcaaaaccagcattaatgcaacaggcacctcagatttggcaccgcttgataagcaggcggcaatgtttaaggaactgctgccgaatgctaaaaaggtcggcatactctattgctcgggcgaagcgaattcaaaatatcaggcgactgaaatcgcaaaatatcttaaaaaattaggcattgaaaccaaggaatatacaagcgccgattctaacgatatagcccaggttgtaaccaccgcctgctccgaggttgacgcgctttatgttccgaccgataatacaatggcttcaaatgtgcagataataaacaacattgcagaacctaaaaaaatcccgattatcgcgggtgaaaagggtatttgcaacggctgcggcattgcgaccctttcaatcgattattacagcataggaaaaaaagcgggcgaaatggcgtatgacatacttgtaaacggaaaagaccccgccgatatggatatcgctttcgattccggcccggttaaggagtatattaaggaacgctgcgacaagttcggcataaccgttccgagcgattacacggcaattcagtaaataaaaaaatcaagctatggcgatagggcgtattataccctatcgcttattgcagttttgaaaggaattaaaaaaatgctgtcatttttcagttctttgccgggcgcggtggcgcagggcacaatatggggtattatggcggtaggtgtgtttatcacctataaaatacttgaccttgccgaccttacggtagacggctcgttcggcacgggcggcgcggtgctggttgtatgtaccgcgggcggaatgaacatatatcttgccatgcttttatcgttgcttgcgggctgcgcagcgggctttgtaacgggcgttctgcacacgaaattcggcattcccgcgattctcgccggaatacttacgcaaatagctctttactcggtaaatctccgaattatgagcggcaaggcaaatcagccgctttcagctatgaaatacagaaaaatacttctggtttctctacgcagcataaataaatcgcttattgtctgcggtatatttgtggttgtaataattgcgctgctttattggttcttcggcacagagctgggtcattcgctcagagccacaggctgcaatcaggcgatggcgcgggcaaacggaataaacacctcaacgaacaagataataggctttgttgtatcaaacggtattgtggcactgtcgggcgggctgcttgcgcagtaccagggctttgccgatgtcaacatggggcgaggcgctatagtaataggtcttgctgccataataataggcgatgtggtattcggtaagatattcaaaaactttgcgcttaggcttttaggcgcggttttgggcggcgtcatctactatatagttataacctttgttttgtggctgggacttcccgcaaatgaccttaaaatgcttacggcggcggttgtggcgctcttcctcggagtaccctattggaagggcaagcttgccgaaaaacgcgtaaaacccgccgaggaggtaaaagccgatgcttgaaattaaaaatgtttataaaacctttaaccccggcacaataaacgagaaaaaggcgcttaacgggcttaatttaacccttaacgacggcgattttgtcaccgttataggcggaaacggcgcgggaaaatcgaccatgctcaatatgatagcaggcgtttacccggtggacagcggcgccataataattgacggcaccgacgttacaaggctgcccgagcacaagcgcgcaaagtatttagggcgcgttttccaggaccctatgatgggcactgcggctgatatgtggatagaggaaaatatggcgcttgccgcccgcaggggtcaaaggcgcgggcttaaatgggcgataaataagcacgagcgtgagcagttcaaaaaaatgctttccgagcttgatttggggcttgaaaaccgcctctcggcaaaggtggggctgctttcgggcggtcagcgccaggcgcttacgcttttaatggcggtaatgaaaaagcccaagctcttgctgcttgacgagcacactgcggcgctcgacccgaaaaccgccgcaaaggtgcttgagctttcggataagtttatagccgaggaggggcttaccgctatgatggtaacccataatatgcgcgatgcaatagcccacggcaaccggcttattatgatgaacaacggaaaaataatactcgacgtttcgggcgaggaaaagaaaaaactcacggttgaatacctgcttgaggctttcagcaaattaagcggcgaggaatttgcaaacgacagggcgctgcttaactgatttttgcattttggcacttgaaaacttttttaaatatggtaaaattaaattagattaaaaaaaggagttcttataaaatggcaaaagaagttttggttgaaatatccgcgcgccacgttcatgtaacagacgaggcacttgaaatacttttcggcaagggtcacaagctcaccccgaaaaaggatctctcacagcccggtcagtacgcgtgcgaggaaaaggttaccatagtaggtccgaaatcgcagcttaaagcgtcgatattaggtccgacccgccccgaaacacaggttgagctgtcccttacagacgcacgctctatcggcgttaccgcgcctataagagaatcgggcgatattaagggctcgggtgtatgtaagctggtaggccccgcaggtgaaattgagctgaccgagggcgttatcgccgcaaagcgccatatacatatgacccccgaggacgccgagaaatacggcattaaggacaagcagattgttagcgttaaaatcccgaccgagggtcgcgcgcttgttttcggtgatgttgtggctcgcgtcagccccaaatataagcttgccatgcacatagataccgacgaggcaaatgccgctgcagttcccggcagctgcatgggtgaaattcttgactgataaccccataggtctttatatccacatacccttttgcacgaaaaaatgcgcgtattgcgatttctattccgcctgtgttacggaggaacttataaacgcatatgttaaagggctttgtgaatcatttaaaatttggggcgataaaatctgtcgccctattgatacggtatacttcggcggaggaacgccgtcgcttttaggggagaggataataccccttttaagggcggcgcgctcctccttttgtattaccgataatgccgaaataaccgctgaattaaaccctgcgggcgattccgccgaatttctttacgcctgcaagtgtgcgggtgttaacaggctgtcgataggcgcgcaaagcggaaatgatgatgagcttttgctgctcgggcgaacgcacaccgtaagagataccgccgaaacggttaaagcggcgcgggctatgggctttagaaacatttcgcttgatttaatgtgcggtcttccgggctcaaataaagaaagccttaaaaaaagccttgattttaccgtggggcttgagcctgagcatatatccgtatatatactgaaaatagaggaaaacactctgttttataaaaacaaagctacgcttgcgctgccggatgacgatgaaacggcggagcaatatatgtatatatgcgaatacctcgaagataaaggatatttgcattatgaaatatcaaatttctgccgcccggagtatgaaagccgccataaccttaaatactggaactgcgacgaatatttaggtataggcgcggcggcgcactcgtttattgacgggaaacgatttttctacccccgcagcattaaagcctttttaagcggggagacgccagtgcccgacggcgacggcgggggagcggatgaatatattatgctccgcttgcgattgtcgcgcggggtagattttgccgaataccgaaggcgtttcgggtctgacctgcctgacagctttataaaagctgctgaacgcctgaagagcataggacttgtaaaaataaccgaagacgcagttgcgataaccgacaggggtatgccggtttccaacagcataataaccgaattattggagaatatataatgagaacgcttaaaattcatcttatacgccacggcgctaccgacgcgaattatgacggacggtacataggctgcaaaaccgatttaccgctcgcccccgaggggctgaacgagctgcgcctgttaaaggacgatattgattaccccgaaattgaaaggctctattcaagccccatgctgcgctgccgtcagacgggagccgtgctttaccccgattttgagcccgtaatgattgaggaattaaaggagtatgatttcggttcgtttgagaataaaaccgcagcagagcttgaaagcaacccgaattttataccgtggacatccggcaggctgtccgctccgcccgggggagaggacaattccgaatttataaagcgcatttgcgtaggctttaataaaattgtgcttgatatgattgaaggcgggcttaccgaaagcgccgttataatgcacggcggcgctattatgatgctgctcggcgtttctgccgtaccgaggcataagcccgttgaatggacggcggataacggcaggggctattcagtaagagttaccccctcgctttaccataaaagcggcgttatagaggtttacggtattgtgtgatatttctgcctttattgcctgaattgaaaatattttaccgaaaaaattaaaaatccacttacattaaattccgaattgtggtataataactttatgtcggcggcatagcaccgttataataatgcggtatttcaggcaaaggaagaatgaagggtgtataaaataggagataagataatttacggaaaaaccggagtttgcgttgtggagagtatcgaggaaaaaaccgttccgggcggaaaaaggccgtattacacattaaagccgatgtatcagcagaacaatgtaatctacgcaccggcggacagtgataaaattttcatgcgcccgcttatttcgcgcgaaaatgccgaaaggctcgttgaaagcgtacccgcaataagagacagcgtgcttgcggggaatacagtggcggaggatgccgactgccgcacctgcgaggagctgctgcaccttgcggtcggaatttatgaaaagcgcagggaggcgcgcaaactcaaacgcaagctgggctatacatatgaaaaacggctgcataatgcagagcaggttcttttcggtgaacttgcggcggtattggaaatagaaccggaaagcgtaccggaagtgctgtttgcaagcgtcagatagatgctttgtatgtaattttacatatatttcttaaaaagcttgacttttatttcactcggtgttaagatatagacgatacaatcagacgaattttccgctatggaaagtattgtgccctgattgtattgtctatttaaatgcgatgataaaggaaagtagaggaatctccgccttaagagagtctccgccgcggctgtaagcgggggcaggtatgaattttttgaagttcccttttgagcagcgcggctgaaaaaaacagtaggcgacgacggaggagcaccgttacaggctctaaagagtgtttgctctcggagcgaaaattacgggtggtaccgcggagtattatgtacttcgtcctgtttttacagggcggagtttatttttttgtgtggaggaaaggcaatgaaggaaaaaatcgaagccataagagcggcggcaaaggctgctattgaaaaaacggcaagcgaaaatgaaattgaagaattaagggtaaaatatttaggtaaaaagggcgagcttacggcaatgcttaagcaaatgggatcgctttcccccgaggaacgcccggctatgggtcagcttgtaaacgaggcaaagcaaaggcttgaagcgcttatagccgagaaaaaggcggaaatgaagcaaaaggccaccgaggcaaagcttaaagccgaaacgattgatattaccatgcccgcaaaagaggttaaaacgggcggtatacacccgcttaatcacgttgtaaacgatatgattgatattttccaatctatgggctttgacgtggtagacggtcccgaggttgaaaccgaccactataatttcgaatgcctgaacgttcctgcggatcaccccgcgcgcgatatgcaggacaccttctatttaggcgaaaacctgcttttgcgcacacagacctccgctgcgcagataagaacaatggaaacaagaaaaccgccgatacgcgttatatgccccggcagagtgtaccgcgccgatgaggtggacgcgacccattcccccgttttccaccagcttgagggtcttgtggttgataagggcattaccatgtgcgaccttaagggcgtgcttgagcagtttgcaagggaaatttacggcaaggatacaaaggtgcgtttccgcccctcgttcttcccgtttacagagccgagcgttgaggtagacgtttcctgcagcgagtgcggcggaaaaggctgccgcgtttgcaagggtgcaggctggatagaaattctgggcgcgggtatggtgcacccgaacgttctgcgctcctgcggaatagaccccgatatttacacgggctttgctttcggcataggtattgaccgaattaccacaacacgctataaaataagcgatatccgcctgcttttcgagaacgacaagcgtttcttagagcagttttaaagggggtaaaaacaaatgaaaatttcacttgaagctttaaaaagatatgttgaaataaacgttcccgttgaggagctttgcgaccgtatggtaatggcgggctttgaaattgaggaaatggagaagcagggcgaaaacattaaaaatgttgtagccgcaaaaattttaaaaataactccgcacgaaaacagcgaccatttgcagatatgccaaatggacgtggggaagaatgagcctgttcaaattgtcacgggcgcacagaatatacacgagggcgattacgttcccgccgcgctcgataacagctacctgccgaacggcgcgcacattgttgcgggcaagctgcgcggcgtagagtcaaacggtatgctctgctcgggcggtgagctgtgccttaccgaggcagattatgagggtgccgcggtaaacggcatacttattttaaagggcgagccgaaaccgggtaccgatatgcgcgaggttttggggcttaacgattatataatagactttaaaattaccgccaaccgccccgattgcaactgctttttgggcgttgcaaaggaaatttcggtagtgctgggcaccgaatttaaagcgcccaagccggaatataaaacggtggggcagaatatatccgattatataagcattgaggtgcgcaatttcgatttatgcccccgctatataggcagggtggttaaaaacctgcgcataaaggagtcgcccgagtggatgaaaaaagccataaccgcctcgggtatgcgccccattaacaatattgttgatattacaaactttgtaatgcttgaaacgggtcagccaatgcacgcctttaactacaacgatataggcgggcacaaaataatcgtccgcaacgccgaagaaggcgagaccataaccacgcttgacggcacggaccacaacttgacccccgatatgctggttattgcggacggcgaaaagccctcatgccttgcgggtataatgggcggcaaggaaagcgaaattgaaagcgataccaccgatttattcttggaatcggcaaagttccgccgcgataacattcgtcacacaggcagagcgctcggtattcgcaccgaagccagcggcagatacgagcgcggcgttgatattatgaacgtttcctacgctatggagcgcgccctgcagcttatttcagagcttgacgcgggcgatattatagacggcgaaattgaccttaacaacggtctgcccgaggaaagaattataaacgttacaaccgataaaattatggagcttatcggcgtagatgtgcccgatgaaaaaatagtttccattttaaacagtcttcatctgcccaccaccgcaaacggcaaggagcttaccgtgcgcgtgccctctatacgcgacgacattgagggcagagccgatttagccgaggaggttatgcggatttacggctatgaccacattataggcaagccgatgcgcggcgacgtggtgcgcggcaaaaagctgcccgagcgtataaagtgcgataaaataaaggactttatgaccgccgcgggcgcccgtgaaattgcaacctattcatttataagctccgccgctattgataccctgctgttggatgaaaacgacgagcgacgccgacaaatcaagattataaacccgctcggcgacgaatattcaacaatgcgcacccagcttacaacaagtatgctgtcggttctggcaaccaacatcaaccgcaagataacagacggcagattttacgaaatttcaaagcgttttattgcaaagcagctgcccataaccgagcagcccgacgagatacccacaatgtcggtgggaatttacggcaaagatgaagatttcttcaccttaaagggcataatagagggtgtaatgcggctttgcggcgcgcacacgcagtatgaagtgagtgcagagccttatctccacccgggcagacaggcgcttgttaaggcaaacaacactgttgcagccgttttcggcgagatacacccgacggttgccgccgagtacggtattgactgccgcgtatacgttgcggaaatcaagcttgatgtattgcttaacataaacaagcgcaaaaccgtttacaagccgttgccgaaattccctgcggttgagcgcgattttgcaatgctctgcgataaggatttacccgtgggagcgcttgaaaaggcgattaccaagggtgcgggcagattgcttgaaaggctggagcttttcgatgtatactcaggctcgcaaatacccgagggcaaaaagagcgtggcttacagcgtgtggctgagatctgccgacgcaacgctttctgataaagatattgatacggtaaacgccgcaataattaaaaatcttgaaggtgcgggcgcagagctcagaaaatagtgcttgaacttttttgaaaaaaggtataaaataattataaacagttgtgagaggtgtaatttatgaatgacagaacaatgaccttttcaataggcgaccagacagaacaggaaataaggaatattctgactctggtttacgacgcgctgaaagaaaaaggctataacccgataaatcagatagtcggatatattttgtccgaggatccaacttatattacaacccacaacaatgcgcgcaaccttataagaaagattgaccgcgatacgcttttacaatcgcttgtaaaatattatttgagcgcgtaagggggatatttgcatgaaaaagctgctttacattctcctttttctgcaaatcatcagcggagtatttatcttttttatgcttatcggcagcgatgcctttatggctgttcttgcctggtttatctgtattcttcaaatagctcttaccgtttcggtaatacgcaataccgaggatatagagcagttaatcgaggaaaccacttggctcagaacaaagctcaaaaggcttgaagaagcggtaaatccctataattcgccggagtctgccgtacctgcggcataccatggcgaagccgcccgcggcacttgggaatgtgtaaaatgcggcacggtaaacaaggcgggaacagacgtctgccaaagctgcggcgccgcttattcggctgaaattaaccccacaagcaacccatttgccaaaaagaaaccgcgtatcagccgattcgtgaaataattatttatccgaaaccgccgggcattttgcttcggcggttttggtttgccgaaaaagcgaatgaaacaccgccgaagcgggaaaaataacagcggtgattctatgaatttttttaaaaaagaaagtcttttaaccgcgggagcggggcttgcggtgggacttgtgaacggacttttgggagcgggcggcggaatgattgccgttccgcttctgcaaaggctgggacttgagcgcaagcaggcgcatgcaaatgccgttgcggtcattttgccgataacggttttatccgccacactttatctcatgaagggatatgtttcgctttccgattcgttcatatttattccgggcggaattgcagggtctttgctcggaacgcttataatgaaaaaaatatctccgaaatggcttaagcgcatcttcggcggatttatgatctatgcgggcgtgcgcctgctttgcagatgagctggacagcccttgcggcagggcttttatcgggcattataggtgcaatgggtctcggcggcggtgcggtgcttataatttatctgtcggtctttaccgatatgccgcagcttaaaagccaggggataaacctacttttttttatcccgatagctgcggcggccgttgcggtttacgggtttaaaaagcagataaaatggaagcttgcggcaaaaatcgctgtttgggggcttatcggcacggcaggcggacttttgctcacggatttcctcggaggcgatataaccgcgaaaattttcggcggaatgcttattgtaataggcataggcgagcttggcattttcggcaaaggaaaaaaggataaggatactccgcgctgcaaagaaaaataaagcgctcagcacaaaacaacaccgtgcggcttttaaagctgcacggtgttgtgtgagtgggagctatacggaatacccttgaaaaggcattggtttaaaccgcttgaatgggatttgcgattactttaaatatggggtgaggacaaatgaaaaattaacgcgcgttgtaaaatgaagttgaaataaaataaaaaaataggtccatagtgacaaacctgtggtagaattaatttgctacaccaattctgaaaggatcatcactatggacaatccgaattataccacagaacacagaaaagggc

SEQ ID NO: 1289 - DNA, 15749 bp, Unknown
  16S sequences of unknown bacteria
atatttcggagaacttcgccgcctatgtcaacgagggagaacacgccgccgggaatcaagactttgattatgccaagatgtccgatgaagacgctgagcctgcccgggaggggttggtgcaggaaaaaggctttttcatcctgcccagcgagctgttttgcaatgtccgcgcccgtgcagatcaggacgaaaacctgaacgaaacgctggagcgcgtctttgctcatattgagagcagcgccgccagcggcgatgcggaaaacgactttgctgggctgtttgatgacttcgacgtgaacagcaaatccatcggggaaacggtggcaaagcggaacaaggtgttggctgaactgctggacggcgtagcacagatgccgctgtatgataccggcggcatcaatcccgacctgttcggtgacgcctacgaatacctgatgagcatgtacgccgccaacgcaggtaagaaaggcggccagtattttactccggcggatgtttccgaattgctggctcggctcggcaccatcgggaaaacaaggattaacaaggtctatgaccccgcctgcggctccggctcgctgctgctgaaggtggaaaaggtgctgggcaaggacaacatcgagcggggctttttcgggcaggagatcgacctgaccacctacaacctttgccgcatcaatatgttcctgcacaacatcgagtttgataaattcaacatcgtgcgggaggatacgctgattgccccgcagcactgggacgaccagccctttgagctgattgtctccaatccgcctttttccgtgccgtgggaaggggataaaaacccactgcttatcaatgacctccgtttctcccccgccggcgtgctggcccccgcttccaagggcgatatggcgtttattctgcacagccttgcgtggctggcaaataatggcgcggcagccattgtctgctttcccggcattatgtaccggggcggcgcggagcagaaaatccgcaaatatctggtagataataactacattgacgcgattatccagctgccgtccaacctgttcctcaacgtcaccatttcggtggatattatgttgctgaaaaagagcaagacggacaacgccatcctgtttgtggacgcctccaaggaatttgtaaaggtgacgaaaaacaaccgcctgtcggaggaaaacatccagcgcattgtttcggcggtggcccagcggaaagacgagcagtatttttcccgcctggcgcccaacgaagaggtgggcagcaagcagaacaattataacctgtctgtttccacctatgtggagcaggaggacacccgggagaagatcgacattgtaaagctgaacgccgaaattgcggaaatcgtagcgcgggagcaggtgctgcgggaagaaattgataagattatcagggagattgagggataaatatgagttgggatagaacagaatatacggaaaccgccatatgtgcatgtggaaaagggacgatagtaaggctggcatacatcgaagacgatgattggaacagaacacgaggcggcattatttcagaagaaatttgctgtactgagtgtaaagaaaaatttcatatagaacattatatccagcactatttttgcccttcctggaagggtgatggcataatagatagaacatatttggttcctaacaattttacaattccatctgtgctgagtgagaaaaacttttgctttagcgtagatgagcaaattgtagcaaattattatctcgaagaaatatcagcagcaaaggccgatatgattcgaaataaatatagtacaaagcttgaacgaaaaagtagtcaagatatcgtggcttggtatgaaaaaagatataaaagaagaagtttgtctcctattgtggaattgctgaataatattgaaagccaatacgaccactatgagtggactccacaacgacttgaagaattcagaaacaatgaaaaaatcaagattcaagaaaacaaacgggttattgccgatgttattgcacgatcatttgaacttgatttcaggagaaagcaaaatgactaaactagataaactaatacttgaactttgccagaatggtatcgaatacaaaaaacttggcgacattgctactatatcacgtggtggaagttttcagaaaaaagactatgtagagaagggggttccctgcatccattatgggcaaatatatatgcactatggtttatttgtagataaaaccatatcttatatcagtgaagaagttgcgcagaagcagaaatttgctgagcctaatgatgttattatggctgtcaccagtgagaacatcgatgatgtttgtaagtgcgtggcttggttgggaaaagaaaaagttgccgttagtgggcacacagcgattattcatcattccctacatcctaaatatttggtctattttcttcatacatcaatgttctatcggcagaaaacaaaatttgcccatgggacgaaagtgattgaagtgtccccaaataaactgaatgaagtaatgatccccgtccctccgctgccggtgcagcgggaaattgtccggattctggacaatttcacagagcttaccgcagagcttaccgcagagcttaccgcagagcttaccgcacggcggaagcagtatgagtattatcgggatgcgttgttaacttttagtagccatgtacccaagatggcttttcaaaaatgttgtttgttgtctcgtggcgattatattactaaaaaatctgcaaagcctggcaagatccctgtaattctaggtgggcaagaaccagcttattatattgacagagccaatcatactggacaagcaattgttatttcaagaagtggtgcttctgctggctttgtatcttattgggatgaagatatttttgttacagatggattcattattgaagcaaaagacaatttgaatcaaaaatttttattttactacttaaaaaacttgcaaagcgctttaaattctatgaaaaagggtggtggagttccgcatatcacgggtgaaaacatatcggctttagaaattccagtccccccgcttgaagaacaagcccgcattgtctccatcctcgaccgctttgacgccctttgcaacgacctcaccagcggcctgcccgccgagatcgaagcccgcaaaaagcagtatgaatattatagggacaagctattgacctttcaggaggtgaaagcgtgagttatttcaacatcgtcgctcagagcagcgaaagcaccgttgtaacggaatacaagccgcaggccaaacgctcggaggcataccaaagcgaggcggagctggagcgggagtttatccgtctgctgcaagaactaggctatgaatacctgcccattcacaaggaaaaagatttggtggacaacctgcgccttcagctggaagcggtgaatggctaccggttttccgatgaggaatggggccgctttttcggcgaggtgctggcaaatcccaaaagcggtatcgtggataagactcgtctcattcaggaggactttgtgcaggtgctgcgccgggacgacggcagcagcaaaaatatcacgctgtttgacaaaaagaacatccacaacaaccgcttgcaggttatcaaccagtatattgtttccaaagaggagggcgcggcccacgacaaccgctatgatgtgacggttctggtcaacggcctgcccatggtacatattgaactcaagcggcggggcgtgcccatccgggaggcgttcaaccaaatcgaccgctatcagcgggatagcttctgggcagcttcgggcttgtttgagtatgtgcagatttttgtggtgtccaacggcacaaataccaagtattactccaacaccacccggtttaaccacatcaaggacacccattcccacaaggtgaaaaaggagaaaaccagcaacagctttgagtttacttccttttgggcggatgccggcaaccggatcatccccgaccttgtggacttcaccaagacctttttctgtaagcacacgattctgaatatcttagcccgatactgcgtgtttacctcggaaaatatgctgctggtgatgcgtccctatcaaatcgtcgccaccgaacgcatcctaaaccgcattgaggtcgccaacaactataaaaagttcggcagtgtggctggcggaggctatatctggcacaccacgggcagtggcaaaacgctgacttccttcaaaacagcgcagcttgcctccaagcttgattctatcgacaaggtgctgtttgtggtagaccgcaaggatctggattaccagactatgaaggagtacgaccgctttgaaaagggcgcggccaacagcaacacctccaccgctatcctcaagcgccagctggaggacgatggtgcaaaaatcatcatcaccaccatccagaagctggccaccttcatcaaaaagaataccgcgcacgcagtttttgataagcgcgtagtcatcatctttgatgaatgccaccgcagtcagttcggcgatatgcaccttgccattaccaagtattttcgcaagtatcacctgttcggttttaccggcacgccgatctttgccatcaatgccggaactggtaaaaagccaacgttacgcacaacagagcaggcgtttggcgatcagctgcatacctacaccattgtggatgccatcaatgaccgaaacgtgctcccgttccgggtggactacatcaaaaccatggatatggagccggatattgacgacaaagaggtttgggacatcgaccgggaacgggctttttcagcgccggaacgtatccgcctggtgaccgactatatcctgacccactttgaccagaaaacctatcgtggcagcaagacctatactttcagtgtattgcaaaatattaccgatgtggcgtctgccagcggcagggcctctattgaagaagtcaaacagaaacagagggtcaacggcttcaattccatttttgcggtttcctctgtagaggcggcaaagctgtattatgcggaatttcagcgccagatggcggaaacgccgcagcggcggctcaaggttgcgctgatttacagctacggtgcaaacgaagaggaaacggacggcattctggacgaggaaaacccggaggacacgtctgccctcgatgtgaactcccgtgattttctggaaaaagccatacgggattacaacgagatgttccataccaattattccaccgacggggacaagttccaaaactactacaaagatgtgtctctgcgaatgaagaataaggagctggatcttctcattgtagtcaatatgttcctgaccggctttgacgccaccacgctcaacacgctgtgggtggataaaaacctgaagatgcacgggttgattcaggcttattcccgcaccaaccgcattctgaactccattaagaccttcggcaatatcgtctgtttccgcaacctgcaaaagcgcaccgacgatgcgatttctctttttggggacaaaaatgccggcggcattgtgctgatgcgcggttacaaggattactatttcggttatgaggatgacgatgaaaaataccatcccggttatgccgacatgatcgaggaactaaccgagaagttcccgcttacagaggaacgcatcatcggggaacaaaagcagcgggaatttattgttttgtttggcgctatccttcgtatgcgcaacctgctgacctcctttgatgatttcgcaggaaatgaaatcctttccgaacgggacttgcaggattatctcggccggtatcaagaccttcgggatgaatggaaaaaccgcaggcccacaggggaaaaagaggatattacccatgatatcgtttttgaaattgagctgattaaacagatcgaaatcaacatcgattatatcctgatgctggtcaaaaagtatcacgactctcactgcgacgacaaagaagtcttgattaccatccgtaaggctgtggacgccagcccggagctgcgcagcaaaaaggcgcttatcgaaacctttatcgccggtatcaacgatgtagacgatgtgatgctggaatggcgggcctttgtcgcagaagaaaaggagcggcagctctccgccatcatccgagaggaaaatctgaaagatatggaaacgagaaagtttattgaagcatccttccgtgacggctctgttaaaacgagcggcacggccattgacaagcttcttcccccaatgtcccgttttggcggcggaaatcgtgcggaaaagaagcagggcgtcattgacaagctaaaaacattttttgagcgatttttcgggattggataatatctctaacaaaaatcaatttgagaaaaggaaaatcaggttgacttgcatttttcttgccaaaaaaaagcattactttttatatttacttcacagtcaaaaaatagaatggaggaatttattggaagcaagaagtagcccttacttagattggaattttagtgaccctgaaaccgccgttgccggagtggcttttcacgcattcgaatggctgtttgtcagatttgcaccgatcatgctcgcggggacaatcgttggaataatcttaacgcggaagaaagtataaaactgctctactctttggggtacggttcagagcgtctgtatacgatgctctgtattcctttcgaccattctatttatcggctcatggcttcctcgcctcataggcctcgcgccattgtcaggagcggttcgaggcttcgcctatactcacgcggggttgaagctcggcgcaagtcccttttccttcatgccgcgcaaattgacggccagcacctcctgcgtggaagccggaaccatgcctcttgacaaacgttttgttttttggtccaatagaatggaacggatgttccaacgagaggaggggctgctatggaaaggccggatttcaaagcggattttgtctatacagtcgattttagaccggtaaagcattatcgggacctctataaatgcataaaaaaagggttggacttgccggattttttcggggaaaatcgagacgccttgtgggattgcctaacgggattcatcaggtgcccatgcgatatccggtttagtgggatttcttctttaagcaaacagcggcgggcggaactgcaaaaaatcctggatgtatttacggaggcagaaaaagagaatccggacgagttccgtatcctctatatcgattgacgcggataaagggtaagcgcgtctctgcgtgaaagctcaatgcttcgactggaagaaaccgggcctccggggcaatacgcccccggaggctttgctttgttcgtagccggttatatcgaaacgcctgagacgcccgcctttaggtggccgccccgggtgttttattcgaaaagggcgtttttcgggtaccgatgttgccttttatatcacaaatcggcggggcccttgcccggaacatctctttctgttgctctccgtctcggaaaacaatcaaaaatcaacaattccatcataaaaaatgttaaatacaaagcccccgtgccgtgctataatgaggccatagagggttggaaaaacaagcgattgtgtatttttgtcatgaccgcaccggaaatttatcatttttcactggatctttgtggaaaggaaggggacacgtggaagccattacgactttccgaaaagtcaaatttcatttcgacaacgtccatttcaaagtccccctggaatttggcccctattttctggcccaggcaggcgatttggcgacggaggccgactacctctgtgagccccatatccagagcgtttacgagatctcttacgtggtttcgggcgagggggttttcaccgtcgacggcaatccttatccactgcgcaaggatatgctgttcatcaaccggccaggcgaggagcattccatcctgtccaacaaaagcaacccgatccgatacttttatttgggcttcaccttcaatgagccctatttatcgaaatatgagtataagacactcaaggattttttcgacacgtgcgacaaacgggacgccacggccggaagcagcttgcaggattctttcctcaagctgttcaataacctgatcaccaccgatctgttcgcaggctccatgatcgagtcctgcatccaccagatcgccgtgaccgtgtaccggcagtacaacgacaccgccgagcgggtgtatgcccctacccagcctctcgacggcaaaaagcggctgctctacgacatcatccactatatcgacgtggaaagcgaggatatgggcgcgctgcaaaagctcagcgaaacctttggatacagctattcctacatagccgacctgttcagccggaacatgggggaacctctcaaggagtatttcacccgccgccggtttgaacgggccacccagctgctcgaggacggcatgagcgtcactcaaattgcggatatgctgggatataagtccatccattccttcagccgtgcctttaccaggcgcttcggggtatcgcccctggaatatcgcaaggcgcaaaaagagtcctgtggggaatcaacgacgaacaaggagagatgaagatgaaagtagcagtcatcggctgcggcaacattgccaacgcggcccacatcccggcgtatatgaaaaacgcggaggtggaaatcgtctatttctgcgacatcctgctcgaccgggccgaggccgcggtggaaaagtacggctgcggcaaggccgtccgcgattatcacgacgtcctgaaggatccggaaatcgaggcggtctcggtctgtactcccaacaacgtccacgcctccattgccatcgatgcgttaagggcgggcaaacatgtcctgtgcgagaagcccgctgcccgcacctatgaggaagcgctcgagatgcagaaggtgcagcatgagacaggcaaggtgctcaacataggcgtggtcaaccgcttcaacgacagcgtcaacctgatcaagcagtacatcgattccggcaagctgggcgacgtgttccacgtgtacatcagcttccgctcccaccgctgcatccccggtctgggcggtgcgttcaccaccaaagccatcgccggcggcggcgctctgatcgactggggcgtgcatttcctcgacatcgtcatgtactgctgcggcgatcccaaaccggtcacggtcagcggcgagaccttctgccgcctcggcaaagatatgaaggactatgcctataccgacatgtgggcgggtcccccggattacagcggcacctatgacgtggacgactccgtcaccgccctcatccgcaccgccggcccggttatcaccctgaacggcgcttgggcgcagaatatcgggcaaaatgagatgtatatcgatttcatgggcgacaaggcggggatccgccttcagtacggccaggatttcaccgtctacaccgccgagcacggcgccctggtggaatacaagcctgtctttaagatgaacaaccactttgaaaacgagatcaacgcgttcgtggactgcatcaagaccggcaaaaagcttccgtcccacatcgacaccgtcgtcatcaccgccaaaatgatgcaggcgatctacgactctgccgatgcgcaccgtgaagtggtcatggactgatcggagaggagagaccattgtgaaaatcggattcgtagattattatctcgatgaatggcacgccaacaattatcccgcgctcatcaaagaggtatcgggcggcgagatggaggtcgcgtacgcttacggccatatcgacagccccatcggcggcatgaccaccgatgaatggtgtgccaaatacggcatcgaacgggttgcgaccatcgaggaactcaccgcgaagagcgacgcggtcatcgtcctttcccctgacaactgcgagatgcacgaggaactctgccaaatcccgctgcgttcgggcaagcggtgctatgtggacaaaaccttcgctccggattaccccaccgcccggcggatcttcgatatcgcggaacagagcggtaccccctgctactccacctctgccctgcgcttcgcggatgagtacaaggatatcgactcggcatcgattacctcgctgtgttcctgggggcctaatgatttcgacacctattccatccatcagctagagccgatcatgatgctgatcaagtcccatcccgtccgggtgatgtatctgccgggtgaaaactggtacaccgtcgtcatcgcgttcgaggacggacggaccgccaccctgaccggctatgccaaggggtcgcccttcatgatgaacatcgcgggcaaggcggaaaacaccctcgtcaaggtggaatccgacttcttccacaacttcatcgtggaattggtggcgttcctccgcaccggcgagatccacgttccccacgatcagaccctcgccattatggcggtgcggggcgcaggcctcgaggccattcaaaagcccggcgtatgggtggatgtaccggcgatctcctaatccgcaatttgagaaaggggttaaccacatgagcgaattttcgatcggcatcatcgccgactggctccgccttccctttgaagaaagcctgaaaacctgcgccgacatgggcgcggacggtgtccagctttacgccgtgagcggcgaaatggcgcctgaaaacctgacgcccgcgcagatcgcggagaaaaaggcgctgctgtcccgttacggtctggcggtttccgccttgtgcggcgacctcgggggtcatgggttcacccgcgcggatgagaacccgggcaaaatcgaaaagtccaagcggatcgtcgacctggcgctggaactcgggagccatgtggtgaccacccacatcggcgtggtgccggaggacaatacctgcgacacctataaaatcctgcaagaggcctgcaacaccctggcggactatgcacatcggaacggtgcgttcttcgccatcgagaccgggccggaaccggccgcgcggctgaaagcgtttctcgacggcctggattccaagggtgtcgcggtcaacctggacccggccaatctcgtcatggtcaccgacgacgatccggtgcaggcagttttcaccctacaggattacatcgtccacacccacgcaaaggacggtatcatgatccaaaagaccgatcccaaacggatttacgatttctttgcggacaatgggatcgaggacctgcgtctgggcgactacttcaaggagacgccgctcggccagggaaaggtcgatttcgaccgctatctggatgcgcttcgtcagatcggttatcacggcttcctgaccatcgaacgggaaatccagaccgatccgcgcgcggatatccagctcgcggtggacttcctgaagtccaaaatgaaataaagtccacgcatcggcagccccgggtcatccggggctgctgtttttttcgtttaagcacgaaaaagatgaagcaaacagaatgttctccggtttctcctttcatttcgccaacggccggaagaaaaaaccgaacagcgcgcccgctattaactacggtactggaaatcacgtatactcataataggtgatcctggaagcttgaaagggtgtgatgaaaaccggataaaatctgttgctgtctttatgtacctgcggcgtgcagggtgtacgccgcgggctttccttctgccgccatgaaggatacgcggtaaagacggccgcttttatgtgaaattgccgcaaggcatccggccgctttcattctagtccgcctcatgtccgctgccggcggtttccgtatcgtttccgggcccggcccggcttatcatggtagattaaaccctctccagtatgatcgataagcactcctctaccgccttcttattcaccctggcaatgtcttcatatatataggataaatcatcggtcagttcaatgacgtagcgtttcatattctctcctcctcatgtagttgccgtattgtatatggtaattataattactatatacattccatttcaagccccatatactaatatggggtgattaatatgcctatttcttttgcaccaatgcgtgaatacatgaaggctcataacatttcttattattatttgggcaatcaagggattgaagccccaactttacatcgtatccgtcatgatgaaccgattacaactgaaaccctcggcaagctatgcaaaattatgaagtgtcaacctgtcgatctaatagaatataaggaggaccatgaggagcctgaagcgaagtaagaatcgcgatacgttcccgctgactctattttttcaaaagcgtttctttttcgtcttatcttacccgcggcgggccttgtgcgtgcagcgggtttctcttagttctcgttttagcgttttagaaccaccagtgctactggtggttctaattgtttcaaggcgcgatgaccgcaggagacacgcactttttcattacctctttatagcgccgaaacctgaattgcttttacgacaggttcctgttatacttcaattgttaggggtttttatatttggaggtgaaatgtgtgcccaatttgtcgagaggcatcatgctggaagggatttcatgcgctggaaaaacgtcggttatgtatgctttgaaaagactttttgcggccgatttgacgttggaacgcaatatcgtgatgttaggcgagcattatacccaggtactcaattccatcggcggggaattccggtatcacgaccggcaggagcacacggacatgctctttgggcgggtgggcatgatcgagcagttatatgaatgggcctattgcctcggagaatatcggcgggcatcccggggcttatatacggtctttgaaagaggactggtgaatcatgtcgggttttttcaagattatgccgatccggacatcctggaattgatcgaacggtttgccaatttaggcatagaggccattttgctcgttgttccggatcatctgatcgaagagagactctggctgagagaaaaacaaatgaatcggaccgaaccggacgcgcacagagcggagctggcggaacaatataagaaacagcaggaggatatgctattcgctgtaaaaaaaatgcggctgccgtcacgcatcatttgcagcggctccatggactgggacgcgtacgcaaaaacaatcgtttacggggaaagccgcacgctataaagtttttcaagagttcaaagtcctcggccgatcccaccacatgacaactcatgcctgcctccccatataggatctatcataaagtcaagaggtggttttatgataagctacgggcctttttgggacacattggagaaaaagaagatctccacctatgcgctgagagaaacgcatcgcataagcccccatatgttgacgaggatgagacaaaaccgctatttgagcctgcggaccatcgacgatctgtgccggatcctggactgccgcatccaggatatcgtggaatacaagaacgaggcgtgacgggcatcggggacggcgggccgctatgcacgtccgctcgatcgtttacgtatggcgtattcctgccgtttaataaagcaggggacagcaccggccagtcttcctttgcaaggacgaaacgcaagctgagcttgtgaggcgccgcgatgcggcgtcccttgtccggcagcatgccgaaggattccgacatgcaaaaggcagccgcccgaggcggctgcctttttgttggttatgggaccgcgccacggcgctcttaggatagggaggcggcaccggatggggcggacgcggtgacggtcaagatcttctcctgagcctcgcccgggttcccgtcccgggcgtcgacggtcaggaccgtgccgggcatcagatcgccttccaccagcttccggctgatgagggtctccacatgccgctggatataccgccggaggggacgggcaccgtagatggggtcgtatccctcgtccgcgatcaaggtcttcgccgcaggcgtgagcgcgcagcgaagctgctgggcggacaggcgtttgttgagccccgccatcagcaagtcgatgatccgggcgatatccgccttggtcagcggcttgtagaaaacgatctcatccagccggttcaaaaattcgggacggaaggagcgccgcagcaacccttccacctcctgccgggcggagccggtgacggcgccgtccggcccgatgccgtcgagcaggatctggctgcccaggttggaggtcaggatgaggatggtgtttttgaagtccaccgtccggccctgggaatcggtgatccggccgtcgtccagaacctggagcagcacgttgaacacatcgggatgggccttttccacctcgtcgaacaggatgacggaatagggcttgcgccgcaccgcctcggtgagctggccgccctcctcataccccacgtatccgggaggggcgccgatcaggcgggagacggcgtatttttccatgtattccgacatatcgatgcggatgaggttccgctcgtcgtcaaacaggcattccgcgagtgccttggccagctcggtcttgcccacgccggtggggccgaggaagaggaaagagccgatgggccggttgggatcctggatcccggcccgggaccggaggatcgcctcggtgactctcgtcaccgcctcgtcctgtccgatgatccgccggtgcaggatatcctcgagatggagcagcttatccttctccccttccatcaggcgggcgaccgggatcccggtccaccgctcgacgatccgggcgatctcctcctcggtcaccttgtcccgcagcaggctgtgctttctcgattcctcggtcaggcgttcctccgcctcgagctgcttctgcagctcgggcagcttgccgtatttgagctcggcggccttgttgaggtcgtaatcctgctccgccttctcgatctgtcggcccacgtcctcaatcttctcccgcagggactggaccttgccgatggcggccttttcgttctcccacttggccttcatggatccgaactgctcccgcatttcagccagctccttccggatctcggccagatgctccttggacagggggtctttttcctttttgagggcagcctcctcaatttcatgctgaatgatcttgcgctggatcacgtccagctcggtcggcatggagtcaatctcggtgcggatcatggcgcaggcctcgtcgacaaggtcgatggccttgtcgggcaggaaccggtcggtgatataccgattcgagagggtggcggcggcaataatggcctgatcctggatcttgacgccgtgatagacctcataccgctccttgagcccccgcaggatggcgatggtatcctctaccgtcggctcgtttaccatcaccggctggaaccgccgttccagcgccgggtccttttcgatgtacttgcggtattcgtccagggtggtggcgccgatgcagtgcagctcgccccgggccagcatgggctttaacagattgcccgcatccatggcgccttcagtcttaccagcccccacaatggtgtgcagctcatcgatgaacaggaggatccggccttcggatttccggatctcctcgagcaccgccttgagccgctcctcaaattcgccgcggtatttagccccggcgaccagggcccccatatccagggagaagatggtcttgtcccgcaggctgtgagggacatccccccggacgatccgctgggccaggccctcgg

SEQ ID NO: 1290 - DNA, 6920 bp, Unknown
  16S sequences of unknown bacteria
aaagccggacgggacgtcggcgcgacaccggacggcagagaggcatattcaccgctctgcgactcgctcggagctattttcggaaaggacaggtcgggaccgacggctcttctcgggagtgtgacgtcgctcgcgctcgacaagctgtgcgggacgccggttctcaacttcaacctgacgtcgaagttcaacgacgcgacgctgagggcgctgatactcggctacatggagatgggcggaatacagatgcaggtgagctgcgtctcgcgagagactctcctcgacgcgatggagcacccggagcttcacagaaacctgatagtccgtgtcggcgggtattcggagtacttcaacagactgaccgacgatatgaagaggatgatcattgacaggtcgatacaggaagtataacgatatcgatataaagaccggagagccacagtgactctccggtcttcttttataatttactccgacacaccccggaaccggtcaaacacatccgcccacgtcgttatgacagccttgtctgtcgtcagcgagactatatgcctgatgatctcgcggaatttctccggacactcgcagctttccgggtcgtcgctgccgtgcatcgcgaatacgacgaactttttgtccctgacaaagccgtcgatgtttctgagattttcctccagtgtgtagtctcccggccagtatctcgggttccagtactgcggctcgccgcgcacgccgttgcggtccgagtaatcatagtaccggcggctccattcgagcagcttcgtgtcgtcgtcgagatacccgggtccgcccgcggtgattatgccgcgaacactgaatccctcggatatcaacgcttctttcgtctttctgaagacctcgtcgtaatcctcgtctgtgctgtccttcgtaagaaattttccgctgtgtgagatgatctcgccgccgtccttcacaatcaggcggcagatctcgcgcgccgacctcttttccgggtcgtcatagacattgtcaagattccacggaattatcgccgggcagagcggcacgccgtactcatggcagatgtcatatatcctgccgagaaatctgttcgcgtcgtcaatcgtaagaacgaaatacgcgcggtcggtctctttcattctgaagctcattctgaatatccttccttaaatgaatattttcacatgattttgatgatttcaccccggacgacccgccgcttgaaaagctcggcggaattttgcggatcttcacgagccttgacgcgataaagaaggggatcagcgtcgttgattcgccgagtctcggcgtcacgttctgtcaggcgtgctgcagactcatgggcgaggacctcggacacgccatagacgtcctgtccgaccggatattccatttccgcaacgtgaccggaaccagagaaaacttccgcgagtccttccacgacaacggcatcatcccgatggcaaaggtgatgcgggaagactgttcgccaccggatatcttaagggaataccggaagcgaacgggggaatataattgtcagcaatatctaaacagcaaaggagaacaaaacaatatgaacatgagcgcattaaacgaacggcagatcggagttaccttcggattccgcgcgaaagccgatactcttcggcgagtacggatgtgcgtctcgcgtcggaggcgcgattaatccggcggtttggagcctcgatcctgtaaatgtttgactatataaagaacaacatcagctttgattacggcatagttcatggcgtaatgatggatgtgataaccgtgcgtttaagaagagaaatatgctacccgacagacagctggacatcagtctgggcgtcaagccagaaagccatcaaagctgcaaaaagaaactgccgtccccggcagttccctcacattcacttatcctcttcagacccgagcgcgagcacgctttcggcgcgcttcgcaaacagctcgtcggataccgacttttcaccgacggtaaagcatccgacgccaaccggctttccgggtttatccccgtcgaccggcgcgaacgcccttccatcgccgcgtttcagatattcgcgggtgagtttgtctatctctttcgcgagcgtcgtcatatcctccgccgtcagagggtcgtccccgctcacgatacggatgtcggcgttatcgagcgagtacgcgctctccggaatatgcggatttccatgcgagacgacagttccgtccgaaagcacaagcacaggttcggcgaccgaagttctgatatcatttgtgccgttctccggaacaaaaatcttcccttccttcgacaaagcgtaaagcgcgtcgtacgcgtcatcaatcgccatggagtcatatttcgcgagatcatacctcagcgccgacgggcagtcaaccggcatcggcagaccgatatagtcgagcatcttgtatgtaagctcatcaaacctgaaaagcgtaccgctgaccgtgtcatacgcgaagcggtatccgccgtatttgaacgaatgtaccatttttcaacacctcaccgcgtcccgcggttgtcctttgattatttccgccttcttccgcggtcgactctttctctcgccattgccgcgggacttttcgcgccgcttcggacgctgacctttcccttctgtctttccccgcgcgagacggcgagaccgccgagaaacgccgcaagaagacacccggaatatccgagaagcatccgcagaacaccgcactccttcccggcgtcccccctgaaaaacagcgagatcacccagaaaacaagcacatacagcgctccgccgagaagacccgatacagccccgccgccgacagacgacagagcccccgaaacaaccgctccgataatcaacgcagccattgaaagcggaagcagaagcgccgccggatccctcgcggaaagcgccgcacaggtcataataagcgccagaacaagcgccgccgcgacgccgatccctgtcccaataagcaccctgaatattccgccggacccacgctcgtccgagttcctgttaaaaggcatacaaaattcctcccgatcataaaagcattaccgttaagatcatatgcgcctgaaggaacatgtatgcctgccacaacgccgaaacgccgcggatgttcgtttattttatttcttgtcctcagccttgacgtcgatcgacttcacggcgctcttgaggatacggattttcgttccgtcgcgaccggtctcgatcatgacggtctcatccttaatgctgacgacctgtccgatgatgccgccgatggttgttatctcgtctccgacagcgagcgagtcacgcatctgcgcggtctccttctcctgcttcttctgcgggcggtacatgaagaaatagaacaccgccagcatcgccacgagcatgataatcgtggtgagcccctgcataccggtactcgcggtcgttgtcgccgtatctgtaagaatagtaaacacttgttgatcctccaaataaaaaattatctcttactattataacccatcaatggatatctttcaataagattttgtaaattctcagatatcaaactccccgcggacatactcgaggtaattcatgcagtactcgtcctttccggcgacagcctcggcagagtgcaaagcctttctcagctccttcgacgtcgggtcgattatagcggagtcgagaccgcagaggattgccatagatatgaacgccgcgttgatgaaagcgcgcttcggaagcccgaaggacacgtttgacagaccgcaggtggtcttcgcgccggtcttctccttgacaagctttatcgtgtcaagcgcggtgagtgcgtttgtgtctccggtcgcgagggtctcgcagatggcgtcgacatagacgttctcctcattgacgccgacagaggtcagcttttcgacagccttcatggcgcagacaagccgtccatcggcggatgttggaatgccctcttcaacactcatcggcatgacgacaatgccgcagccgagttccgccgccacaggcgcgagctcgtcgatacgctcgtcagacgtgaccgagttgagtatgagcttccggtcgccgcagagcttcgccgcgcgcgtaaggacgtccggcgacggggagtcgagcattatgccgcattcgctctcagagagaacgagcttcgcgatccgttccatcgtctcgtattcggcgtcggtcatgagggcggtattgatgtcgaggtaatcggctccggcgtccgactggagctttatcaggcgtactatctcgtcctcactgtttttcattgcctcgagcgcgctcgggatagaactgttgagtttttctccgatgattatcatttttgttttcctttctcatctgtaagaatttattgcttatcttttatcttttgccgcgtatatacccgacaagctcctccgcaagctcatatcgcttaagagggaacattatataaaatccgtcggcaaacgcgtatacctcgtctatggttctctcggcaaagtcgataacaatccgtttcgcgtcctctttcgacgcgtccttcagcttttcgataagcccgtccggaatcgctatcccgccgacctcgtttttcaggaatacagcgttcttgtatccggcgagcggcattatacccgcgagaaggcgcacattcgggtatttctcctttatcagcttgtacgcgcgcttcaggttctccgcgctctccggcgtgaatattgcctgagtcataagcatcttcgccccggcggctatctttttctccgcccttgagagctcagccccgaagttcggcgcgttgacgttcagcgctcctgcgacatacatcggcgaagcggcaaacacatcctcattcaggctcgagatgtaggaaatcagcccgagagacgacatattgtaaaccgcctttatgccgtccgagcgcagcccctcatccggtgaatcgcccgttatcgcgagaacgctgtcgactccgtccatagccgcggcgagcatcgcgcccttcatcgcgatgcggttccggtcccggcaggtcaggtgcggcagaaccggcatcccggtctcacggtgcagcttcgcggcgagcgccatagggtccgccctgcccctcgcgagcggagagtcagtcaatgtcagcgcgtccacccccgcagcgatgaacctgtgcgcgcagtcacagaaaaacgacgagtcagtgttcaccggcggattgagctcgatcgctatcagcttcccggagtaatcgaaacattcgaaaaagctctttctcccgacagtctgttcaggcgacgagccgtacacgccgacttccgcgctttccccgagccgcagatacgcgagacgcatatgctccggagtggttccgcagcagcctccgacagccccgactccgagcgccgccattgagacgagcttttccgcgaaatataccgtgttgtcggcgaagaccatccgcccgttctgccttgccgggtagctcgcgttcggcatcagggagagccgccgcatatcgaatccgggtatcctcgacggtatctcagaggcgagcccgagcatcaccgacggaccgcacacacagttcatgccgacaaaatccgcgtactctgccgccgcgccaagcagtgtgaagatgttccgtcctagccttgtgtatccatcctgcgccgtggcgaaagaaactataacgatcgagtccgggcgctccttcttcacatgaacgagagccggtatgagcggcgccagatcgtcgagcgtctcaaacaggaacctgtcggcgccgagccgcagaaactcgcccgcgaccctcatgtaaccgtccgacgcagtgtcatagtcagcgggaataccgccgatgtcggcgaaaacttctacctttttgccatatctttcatttgcctccgcggcgcacatattggctatcctgaatcccgccgagatcacctcgctcagcataccgttgtcagggaagacgagcgggttcgcctgataagtgttcgtctttatggcgtccgccccggcggatatgtaatcgcggtgtatccccgcgacgagcgtcggctcacgaaggtccgccgcctcgcaaatctcctcgcgcccgccgcgcgactggtagagcgtcccgaacgccccgtcaaacctgtattccggcatatttttcacccattccggcaagtaccatcaacgcctgccataattcatcataatatattataccacaaagccagtacacctgtcaatcggtgcgccgctcatttctgcataaagataaaaaagaaagcatggcgctttgctgtgtattaatacataccgttcatttctccgcgtccaacaacagtcccagatcaagcctgacctcatgccgtccgggatcgtcgttcgagtaacagcaggtgtcgaagccgaccagcgtgaagcccatgtggcggtaaaagcctatggcgttcatgttgcaggactgggtctcgagtatgacggcgcggcgcttttcggacctcgcgcggcttatcgcggcttctatcagacgtctgccgtatccctgccctctcaggcggctgtcaacccacagctctgtcacgataagacggttcgaccactcctccgggcaggtctcaatcgcggctagcagttccccgccgtccacaaccccgacagcctctgcgccgtcccaccaatccgcgtacagccggtccgggaaatcatactcctccggggtgtgcgtaaccgggaacgggaaggtctttttacggatactcacatcaaacccgtcaacgctgacatcgtagtatccggtcgtcgtgtaggatatcggtaggatcgctcccttgtaggtttctttcgggaggggggttatatcgtatgttttatcttcgttcattgtcatcctctaaaacttattcttat

SEQ ID NO: 1291 - DNA, 10408 bp, Unknown
  16S sequences of unknown bacteria
ttctgatttttagctaccttaacccattgtctaaagccaatgggattgcggtagccttatttcatcccactggcgacttgctttgagacttgaatccatctggcaaagaccctggcctgacgcatttttctgccaaaaaaaggcactgccacgttcctgtttcagaatgtgacaatgcctttttggctcctgtttttccgctcttatttttcctctccgatttttatcagaaccttaatattttccggtccatgtccgatcagatattcaaagccctcctcggtcagtgtatctaaggtaacttcctttgtaatcagctcatctgcacggattttaccttctttcatatattccagcgcagtcgcaatctcatttacatgcgcctggcttgtatacaggatacgttctgcctcctgcagcgtattcatgtctaccgtcggcttctttccaaatacacccatgaccataagctttccgcccggcttcgtgatgcggatcgcctgatcgagtgttttctccgcaccgatacactcgtatacaatatcagccagcctgccgtcgctccacgtctgcacgtactcctccaaatcagcctttgaggaatcgatatacgttccgccatagcgctccaccagctccctgcgatagtcaccgataccggatacgaggatccgactcgcgcctgcatattttgcaccgaaaaaagccgaaaggccgatgatgccagggccaatcaccacgacatccttcccgttcatatcgcccatcaggttcgttgcatgaataccacatgcgagcggctctgccactgccgcctcacgctggctcacaccttccggaatccggaagagcttcgctgcttcaacgacaacatagtccgcaaacgcaccgtcgtcacctactccgaggaatccaagcttctggcaaatattgtagcgaccgcttctgcatgcttcacatttgccacaggtcaggctgccattcgccgtcacgcggtcaccgaccttccagccatccacatcctctcccagctccacaatccgaccggaaaactcatgaccgataattaatggtgcaacccggccggtcagacgatgtggcttcttcaccgggataaaattcggcccctcgtactcatgacggtccgtcccgcagacaccggcccagtctactgcaattttgacctgaccctttttcggtgtcggctctgcgacttcttcgattctcacatctttatatccatgccatactgctgctttcatctgttttctcctcctgatagtaaagcgaacattcgcaatccatccctgtagctctgcggtaaagcggacattcgcaatccatccctgcagctctgctgacagggcctagcttcgctacttgcctgtcccgtgtctttactgtcccaaatatgcctgcatcagcttctcatctgcgagcagatcagctccggttccatctgccacaatattgccaacgttgacgagatatgcccggtcgcagagcttcaatgcctttcgcgcattctgttcaatcagaagaatcgctgtgccatcctgatttacttcctttaagatatccataatctgattcacaatgatcggcgccagcccaaggcttggttcgtcgagcatcaaaagcttcggccgtgccatcagtccgcgtgcaattgcaagcatctgctgctcaccgccggagagcagtccgccatactggctttcacgctcctttaagcgcgggaacatcgcataaatgcgctcaaaatccgtccggataccgtccgcatccttacgcagacagcagccaatcttcagattttcctttaccgacagcttataaaaaatctgacggccttccggcacgatgaccatgccctcttctacgacctgataaggctttggcggaagcggcttgccgtcaaatgtaattgtcccgcctgccgcctttttctcactggaaagacatttgagcagcgttgatttgcctgctccgtttgcaccgagcaccgccacgatctcaccggcatcgacctttaatgaaatatcatacagcgcatggatacctccgtacgcagccgacaaatgttctacctttaataattcctgtgccattattcgtctcctcccagatatgctgcgataacctccgggttcttcttgatctcttccactgtgccggtcgccagggttttaccgaaattcagtaccgcacacgcgtcacacagatttgtgacaacgtccatgtgatgctcaatcatcaaaattgtgatgtcaaatcgctgcttcagtttacggataaactcgaccagctccaaagactcatctgcattcataccggctgccggctcgtcgagcagcagaagcttcggatcggtcgccatcgcacgggcaatctccagctttcgctgatgtccgtacggaagactgctcgcgcgctcctctcctttatctgccagtcctacgatatccaggaactccatcgcgcaatcctcagtctcttttgttgcttcgcggtagcggggcgtacgcaacagtgcatcgccaaggtggtatttggaatgcatattacaggaaatcataacattcgtctttactgacagatttccaaacaggcggatattctggaaggtacgcgcgatgccaagatgtgcggcttcatgcggctctatctttgtgatattttttccctgaaacagaattctgccgccgtctgcctgataaattccggtgatcgtattaaatattgttgtctttccggcaccgttcgggccaatcagcccgtaaatcattcccggctccaccttaaggctgaactggtcgatcgcccgcactccaccaaatcttttttctacattttgcatttccaaaatggcttcactcatggctgttctcctttgctgtcttttttccgatgttccggatcttctgaaccagccgggtcaggctgaattcccagtagccgcacagtccgtttggacgcagaagaatcacaaggacaactgcgattccgtagaacagcatacggtactcagacatactccggaatatttccggcagaatctgcacaatcaatgtaccgagcacacttcctgtcagactgccaagtccgccgagcaccgtcgtgataacaagctcactgctctttccaagattgaataaggtcggtgtgatgaagcgcagataatgtgcatacagtccgcctgcccagcctgcgtaaattgcgctgaacacaaacgacatttttttataacgcacgacattgatgccatttgccgctgccgccatctcattttcccggatcgccgtcaatgcctgtccgtatctggaatgaatgaaattccatgcaatgataaatgccagcacggtacagatcacggccactgcaccggtcgtcctgtacggaatatttgagtagccgtttgcaccgcctgtaatatcttttgcatagttaaataatacccggacacactcgccaaagccgagacagctgatcagaaaataatcgccgcgcagccggatcgtcagactgccgagaatataggatatgatacccgcaattgccgcgccgatcaggatcgacagaacaaatgggagcttaaactgtacactgcagatcgccgccgcataagcaccgatcgacataaagcctgcatttccaaaggaaaacagacgggtaaatccggtgagcacagacataccgagcacggcgatcatgttcacacagcagataaccagaacaccttcctgaaacgaattcaacatgactttctcctcctatgctttttcctgtacatccacgccaaacagtccgctcggtctgaccagcagaatgacaatcagcaggcaaaatgaaatcagatcgcgaagaccagaactgatatagccggatacgaccgtctcgatcagtccgagcagcagcgctcctgcaattgcacccggcacgcttccgagtccgccgataacggatgcgataaatgcttttaagcccacatttcccatagtcggatagatattgtacttcattccgtatgtaatacctgcaagtccggcaagtgcaccggccagaagaaataccatcgcaatcacacggtcgatcttgataccgagcagaccggccgtccggctgctgcaggctaccgcccgtacatgcagcccaaatttagtcttattgatcaggaacagcaaaatgaccagtgcgatcgccgagagcaccagacagagcatatccgtctttccgataaaaataccgctgatattgatcgtaccgaccttgaacagctttgggagctgcttgaatttggatttccatatcacatttgccaggttctggtaggtcgtggaaagtcccatggctgcgatcatcagaaacatattcggggaaccgttgttacggatcctgcggtatgccacacgctcattcaaaaagctgatgaccgccgcgccgccaataccaatcacacaggcaagccagaacgggatcgcatccacctgcgtcgccataaagcatacataagcgcccagcatgcacacctctccgtgtgcccagttggaaaaatccagcaggctgtatacaagcgcgtagccggaagcgatcagcgcataaatgctcccgatagagattccggtgatgatctgttgcagcaaaattttcattgctctgtctccttactttctgtatttatcctgaaatatatcaaaaaatgtttttcttaagcccgagaatgcccaagcaaatccaagaccggaaatgcatttttactgcacctccggtcccttttatttcccttttcagtttgctgactacttgctctgttccggctcgtaaatgcctacatactgtacttcattatccttgacctcaaagatcgcggcatctctgctcggattgtgggtcgccggatcaatgctcatatgtccgagcagtccgtcaaagcttgtggtcgcctccagctgatcgcggatcgcagtcggatcgtcgctgccggctgcctcgatcgcctgcttgatccacatcacaccatcatttccgtacaggcactctgcctcaagcgcaacgttgtattctttctgatatacctcaccgtaagcagctgcctccggaaggttgaagcccggacgggatacataatagcagccctccagtgcaccgttggacagctcgatcagctcggtcgtatcccagccatctgcaccaaagaatacaccttcgataccaagctcacgtgcctgctgtgcgatcaggcatacattctcatagttccatgggatgaacaggacatccggctgtgccgctgcgatcttcgtcagctgtgcgcggaaatcattatctccgttctgagcttcttcagaagcaaccagctctccgccaagctcagtaaaagtatctaccatgtactgacctacgctcgtgctgtagctgtcggtcacatctgtgatcaatgcacaggtcttcagtccaagctcattatacgcataggatcctgccagataacccatgtaagagtcaatgaagcagaggcggaaggaatacggatgcaaattaccatccgcatcaaccgttaccagatcattggatgctgctgtcgcgataaccggaaccttcagctcatctgccactgctgcgatcgcaatgttgcagctggagaagttcgttcctacgacagcggatacgccctcttcctctacgagcttcttgtaagcggtgacggagtcatccggtgcgccttttccatccaggccaatgacctgtacctctctgccaaggataccgccatcctcattgatctgctttgcggtcagctccatgccgtttaatcctgcctgtccccacagtgcggtatctccggataaagcaccgacatagccgatcttgatcgggttctcggtgtccagcccctgtgcaaacgcaccagatacggtcgataagcttaaccctaatactgctgcaaaaactgctacattctttttcataatcatctgctcctcataagttgtccgtattttctgtaaaattgatacaattttttcctgatgtcatagtaacatactagggaatacttgtccaatatccagaaaaaatacccagctataaggtcttcttataacaccgatgccatgttattctccggcccggatcgcccagcgcagcttcgtcgagcgcgcccggctgttttggatgcattcctcctgcgacggacggatcacatccttggcaatatcctgataaacgccttcccggtaaaactgctggaaggtctttttcacgagtcggtcttctccggaatggaacgttaggattgcggctctgccgtttggcttcagtacggacggcagcttctccatcagtgcatacagcgcctcaaattcatgattcacatcgatccgcagcgcctgaaacgtacgggcgctcgccttcttgaccgcttccttccgttctttttccggaatccgcacaagcgctgatgcgatcacctcatgcagctctgtcgtcgtccagcccgccttgcttttccggtttcgctgtaggatcttctccgcgatctcctccgcatacggctcatccgaattttccacaagcatgccgatcagttcttctttcgaaataccaagcaggcgatccgaagcgctgatcccttccatcgggttcatgcgaagatccagcggcccctctgccttgtaggtgaatccacggtccggattgtcgatctgcatcgaggaaacaccgagatccgcaagcacaaagtcaaacttgccgacctcttctgccacctgatcgatattggcaaagttcgtcagcttcactgtcagtatctccgggccgtagccatatccggcgagacgcgccttcgtcttctcagactcgatcggatcgacatccagtgcatacagatgtccttctccttttagctgctccagcatttttctcgtatgtccgccatagccaagcgtcgcatccagtccctgcatccctggctgaatctgcagaaaatccagaatttcctgcaccatgatcgagatgtgcatccccgccggagtcccgccctttcggatgaccttctcgatcgtatcgccgtacttttccgggttcagctccttgtacttttccttataagaccgcggatgcgtaccggaatagcggacacggcgcttgtgcggggtctgattcgtatcattatttatttctgtcatggtgaacctcctgtctggtttttcgtttttctctattactataaatttcatattctgtcttctggtaaacgttagcaaatgtgcatatctcatagacagatagacatatctcgggtccggacgcaattgtggcgtaggcctgcagataagtattataacgtaaagttcatatgaatagaagatatcactttctatcaccctatcattcatacagcaagccttcggtaacctgtacaagctctgcatccgcacagccgcagaccgcaagtgtatacgcatcataaacaaatacacacatctcagacgccatcgcaatctcgtcctgcttcgatattgcgttcttaagacaatacatgcctgtggattgcttctgatttgcatttttctgcaccgcagtctgttctctgttttttcgatgatcgctccggtattcccgcagatatgccgcacatgacacctgatccagtccacgggaaagcccacgcccatcccgcttcacatagctttccttcattggccagagcaccgagagcaggtcggcacgctctgtatcattctggcaatcggcaaagagcgcctgttcttcctctgtgcagatccggcgcatcagcgcctccttataggaaagcttccgctccacgtcaatcccgaccggacggtctgcgagcacgcaggcacaggcgctcttgcagtggctcaggttaaaaaagagctctgggtgtgctacgctatatggctttccatgcgggtgctttgcaagctgcaggctggaaagctccgtcatcccgtattccgcccgcagtgcgtacaaaaagagcagccacgcactcaggtgctccctccgatgtcggatgacccgttcattcccctgccagagcgcttccacttcagaagcactcaccagccccgcctgcagcgaggcgccggcaagcctttctcgccagttattctgtgtaaattcacatacataaatcatttgctcatattacctcatcacttgtctgcaggtttgctgtgcagtctgcaggaattccgactgtcatttcctgctgctcatcccggtcgatttgccgcaaatcacacttgagtattatacgctaaattatggctgaaactcctcccgcagccgctccaccgcccgtttttcgatccgtgacacatacgagcggctaatgccaagctcttttgcgatctcccgctgtgtgcgctccttgtgccccagcagcccatagcgctcgcagatgacctgcagctcccggccgcttaatacacgttccagacagtctgaaagatgccgcaggttctgctcccgctccatgtcttctaagatatcgagcggcgggctctccagcacatccatcagccgcagctcccggccctcctgatccgtcccgattttctcatacatcgacacctcgcgcatcctctttttccgtgtgcgcagcatcataagcaattcattttcaatacagcgcgccgcataggttgccagccgactgttcttttccggatcaaaggtcatgacagccttaatcaacccgataattccgattgaaatcagttcatccgtctcctgatccggcgactgatatttctttgccacgtgcgctaccagccttagattgtgctcaatcagtgcatttctggcctcgacatctcccatttggcaacgtgccagatattccttttcctgctcagccagaagcggcattttaaatgttttcaaaaaagcacctctaagcggttttatgctatcttatgcatcagcccgctttgaagtgcttttccatctttttctttttaaccgaatcaagcaagtccttacgctttcacactgccatccgcaaaatatcatagcggtctgcctgcgcatccagcgcaagccacagcacctgcttcggatgcggcgcactctccatcgcctcgccgtcctcattctcgatgccaagcactgtcgtcgtgacattgcttccgtccggcttcatgatctcgatctgatcgccgataaggaacttgttgcgctgctcgatgcacacccgtccatctgctcttgtatctccgatgatgccaagatacgtatattctttgatgtaggtattgctgtcgtaaatctgtgcttccgccgacggctttccataaaagaaaccggtcgtaaactgccggtatgtgcagtttgaaatctgatccagataccagctcatattctgctgatacagctcaggtgactttgcataatcatccagtgccttccgatacgtccgcgccaccgtcgccacatagagtgcggtcttcatccggccctcgatcttgaagctgtcgataccggcgtcgatcagatccgggatgtgttcgatcatgcacagatccttggagttaaaaatatacgtcccgcgctcattttcctcgatcggaaggtattcgcccggacggctctcctccatgaccgcatatttccagcgacacggatgggtgcaggcaccctgatttgcatccctgcctgtgaaataattgctcagcaagcatcttccggaataggagatacacatcgctccgtgcacaaacgtctcgatctccagatcatccggaatatgcgcccggatctctttgatctctgccatggagagctcccgtgcggaaacaacccgcttcgctcccagctcataccagaagcggtacgtctcataatttgtattatttgcctgcgtgctgatatggcgttcaatttccggacagacacgctttgcgatcgcaaatacacctggatctgcgatgatcagagcatccggccgaacctctttgagttcctcaaaataggcttccacgcctgcaaggtcgccattgtgcgcgagaatattcgccgtcacatatacctttacgccatgctcgtgtgcaaaggcaatgccctccttcatatcctccatcgaaaaatttttcgctttggcgcgcagaccgaatgcctcgccgccaatgtataccgcatctgcgccaaacaccactgcggtcttcaatacctccaggctgctcgccgggattaataattctggatgtctcataatcctgttcctgtctctcttctttttctcctctgccttttttggtctgaccctggcatctacaggagaatttttcatttcattctgttttctatctaatatttacaatctgaccgcggtctttctctgtgctgttttgccacagataccagccgccggcgttctgtc

SEQ ID NO: 1292 - DNA, 13743 bp, Unknown
  16S sequences of unknown bacteria
cgacaactccggtctctaccccgccgaaaagaccgccgccgacataaagcgcgcggtcacccatatgtcaggtaagatgcgtgttggagccggtaccgtcacgaccgtgcgggaactcatgctcgcgtccggagccggagcggaattcataatctcaccgaacaccgacccgctgatcatcggacagacgaaacagttcgggatgatctcgattccaggcgccttcacaccgtccgaggtcgtggcggctgagcaggcgggcgcggactatgtcaagctgttccccgtctcttctctcggtccggaatacgtgaagagcatactcgcgccgctgaattgtgtgaagctcctcgccgtcggaggcgtctcccgtgaggacaccggaaagtatcttgacgccggatgtgtcggcttcggcgtcggtggcggaatcgcgaaccggaagctctgtgaggaaaagcgctttgacgagatagccatgaacgcaaggttatgggctgacgccgccggcacgggggaaaacgagcgtgactgagcggagcggcgacagaatgatcataaccatagacggcggaacaacgaacacaagaatctccctcgtcagtgacaagacaatcagagaccggataaagacccgcgtcggagcgagggacagcctcgacggcacgccgctgcgcgaaaccgtcagggacgggataaaagaacttctggcgcggaaccgcctttcggagaacgacataaccgccgtcgccctctccgggatgatcggcagcgagagcggtcttaaagacataccgcacattctcgccccggcgggaaaagaagaactgagacaagccgccgtccgtgcagatatgcctgaggtcaccgggatacccatgtacttcattcccggcgtgcggacattcgggacagacgcgttcacacagaacatgagcgccgcggagatatgcagatcggcgacagactgcgacataatgcgcggcgaggagaccgagctcgtcggcatcacggaagccctccccagcgtcatcggcgaaaacacgaccgtcatacttcccggctcgcacatgaaactcatacgcacggacagcgccggcaggataaccggcttccggacatcaatctccggcgagctcatccgggcaatcgccgagaacacgatactctcccactcgatcgggaacatatttcccgggaaagcggacgaggaatggctgcgcgagggttttgacttcgccgggcggaacggtctcggggacgcgcttttcaggatacgtgtgatggcgaactttgccgggacatcccctgaaaagctctacgcgttcctgacaggcgccgtgctgcgcgaggatgttatcgcggcggcagagtcggagagagttgttatcggcgggtccgacccgttcagatcggcgctcgcgtgcctgcttggcagaagatgcaaggtcacggcgcttgacaacaggctcgcggaagagtgctctgcaatcggcgccgaggcgattgtccgcgggtgattgtgtcggaaaatccatattattatgcgaaaatcacattgacacttcgccgtatatgtggtataattccgacatgatcaagcagcgaaaggcggtcacttcatgaattctgtcacaaaaccacacaaaatcggatacataggcttcggctgcatggcgggaggataccactatgacaccgcgatgcgtgacgacgtcccgttcgccccgacggcggtgttcgacatcgacccgggaaagcgcgccattgccgaatcgagaggactcagggctttcgataacctgaaggattttctcgattcaaagctcttcgacctcgtcgtcgtcgcgacgagcaatcagttccactgcccgtacacctgcgccgcgcttgacgccggatacaacgtcctgtgcgaaaagcccgcgggactgtcctcgggcgagattgagaaaatgatcgatacagcgaaaaagtccggaaaactcctgaccttccaccagaaccgccgtgtcgaccgcgacctgctcatcgtaaaggaagcgctcgaaaagttcgacataggaaggatattcacggtagaaaaccgcgtcggaggcggcgagggctccaccgggcagatgttcggatggaggagatttaaaaatcacggcggcggactcatgctcgactggggcgtccatgtgctcgaccagacgctgtatctcataaacgagccggtaaagtcggtctgggcgcagatcgagcgcatacgctccgaggaaaccgacgactacagcaaggtgctcatcaggtttgagagcggtctgacggcgcaggttgaagccacgtccttcgccccgatgcccctcccgaaatggaccgtgatcggctccgacggcatgataacagtcaaggacatcgaagggaacggagccggactcatgcgcataaagcgctcgcatactgacgacatgctcagcccgtactatgagacggaccgaaaggagacccgcccgcagaagatgttccgcgtagacgagtgggagacggtcgacctacctgtcacccccatcccgcaggactgggcggcggtgtacaagaacatcaccggtgcgctcgacgggaaagaaaagctcatcgtcacaccggaaagcgtgctcaggtgcttcagggttattgaggcggcagtaaagtccgcggaagaaggacgcgaaatagagttctgacatagcagaaaggcatccaaaaacggatgcctttcttattttgctgtctcagtcctgtccgacagacgctaggaaatcggagtagctgtttatgatcttctcggaattcttcgcccaataggacgctgtatccgtcgacttattcgtgatgaaatatctgtagtacgcgaggtcggtgagctttccggacgggtcgagattgtagctgacctcatacgtcatgttctcacgcatcatgcggtagaccttcaccgactcatcgtcgcggagcacctttccctcgatgtacttctcaacaaaagcgtctttcaggtacttcccggaagctatcgagagcgcctcgacaaccgctcctgagcgttcagggttattcagcgtcgacggcagagccatcatgccgccggccgcccagacgacgtagttctcctgtgcctcgtcccacttcgggtacggcagatagccgaaatcgacatcaatttcacgcagaagcgcgggatccgagctgtacggcatataaagcgagtttccggcatagaaattctgatactgatcgttgccgttcttgttgatgaaaacgtccggattgtcgcacagaccgacgagcttcgttatcttgtccgtaaagctctctgtattcaggctgaattcagcgccattgtctccgaacatgaccgggctctcgccaaaaccgaacatgaacgccgccgtggtatgcgggttggcgataagtccgaacctgtcttcaagatcggctttcccgttcgaattgagatcgaccgtgacattctttatatccgagacaagccggtcaaacgtccatgtcccgtcaaataccgcttcatacggcgacgagatcccgaaatccgacgccattgacttattgaacagcatcctccagtgctgctgtaccgtgtatgtgaagtcagacacagcgaaatactgtttctcaccgatcgtgtatgtcgcgttagctgaattgttgtaataatccgccgcaagatcgacatacgggagatcgttccagtcatacaccagattctcggtcatatacttcacgcgctggccggtggaccagaaggctatcatatcgatagtctctccgtcccctgacagcacagtgtttctgaacgttgtctcgtatttgtcagtactctctttctgcgacgatatatgaacgttcagaagctcctccacctcgcagtttctcttatacgccgcgtcgttcagcacatcgcctgtctctgactcaggatcgatgtatacattccacgttgttgcttcatatgacagaactttgaagtcatatccgccgagatcgatgccgcgcagtttctcatagaaatccgcttctgtttcctgcgctgtcgtcacgccgctttccgtcgtgtcctcaggtctttccatgtcagtatttccgcaggaacagaccgctatggccattgccagaagcagtatcagcgcgatatgtcttttcatatcctttcacctccgatttttgtaacaacaggcaggacttctctctcaagaagctcgtattcctccttcgtgcatcttttcatcggtctccggcagaagccggcttttattccgagaagctcaagaacagccttctctccgggcatcacaccgaccttgagaagagagcggacaatctcgttctccacccgctggagtcgtcctgcctcatccatgcgtccttcaaggaacagctttctgatctttatcatccggtcagccgtaaaattgtatgtcgaaccgattccgccgtccgcgcccgcggcaagtccggacaaaaacatctcgtcataaccgttgaacacggcttttccggggaatcgcgactttattccctcgagcgtgaagaaatcagacgatgtatgcttgactcctatgaatctgtcatccccgaagaatctctcaagctcgcgcagaccgagtgagacgccggtcgccgccggaatattgtacaccagcactccgagcggggacgcgtccgcgatctgcctgtagtacgagatgatctcatcggtaccgaacccgtaatagaacggagccaccgccgagaccgcgtcataaccgagctcgtcggcgtatttcgcgagaccagacgcggtatccgcgcttatcgccccgacgtgcgctatctttacggcgcggttcccgattattccggcgcagagacgcataagctcccgccgctcatcgtcggtcagcatgaacacctcggatgtgcttccgcaacaatagaaaccgttcgcgccgagcttcagattatactcgacaaggtcagacagcgcgttctcgtttatccttccgttctcatcaaacggcgtcaggagcgccgtgtagatcccctcaaacttcgtcatatcaaaaattcctccgctctgaacgaatagccctttataaacgccttcggtgaatcgtcaactatgtagttcaccacgtaaatctccccatcgtcaaactgcacccagccggtatagcctgaatctgaaacgtggctgcggtcaaaatctatcgggaaaattctcgcccattggtcgtttctcttttcggcgagagcggactccggcggcattatcgcgccgaacgtattctggtagagcgtcccgagccagccctttccgccctgcatgaagcggtatgtgataagtatccgcccgtcgcgcaggaagcccgctgtcggtctgtgacagccggggagcggcacgttgtatacgccgttccatgtccttccgccgtcgcgggatatcgccttgaggcagtcatagcccataacggagttctcccgcagatacgcgaccacagtatccggcgcgacctctaaaagcgacgcctcgcacagattatacctcgcgtccgacgcgactatcacctcgtcagaccacgtctttccctgatcgtccgaatacctgagatattccgtgagcttcccgtgctccgctgacgggcggtgagccgagacaagccagcggccgcttttcagctccacgagcctgtccgggacgattccatgcgctccgggaatgataatcggttcactccagctttctccttcgtcagcgctgagccagagctttatagcggtcccgccaaaatcggcggggttctctccgcttatcatgtcgcagagtatcgcgagccttccgtcagacaggcgggatattctcgcgcagttgtggtacattccgccattcgagcgctcggtcagcgggcgcttttcggtccagctacggcctctgtcacagcttgttttcagaactatccgcgagttcttccggtcggcgtggtgattgcactcggtgaagacgcatacgagctttccgctctttgtcagcgcgacatcgggaaatgcctcatagacggaatcatcacggcttatcgtaaacttttccatgtttttctcctctttttggtattgtgcttccattataccagaaaagcggcacattgtctacaataatgtgccgcatacatgaccgttttatgagcgttccgatgatatcctctccctgaacttcgccggcgtcatcccgtaatagccggaaaaagcggtctcgaagctctgccgtgacgagtaaccacacctctccgctatgtcgggtattccgatgtcctcttgcgacagcatccgcgccgccgtccgcatacgcatctcgcgcatcttttccgagaatgacatatcatagttctctcgcagtatcctctgcgtctgcgacctgctgtagcctatcgactcggcgagatcgcatatcgtcgccccggactggtagttgtccgcgaaaaactgctcaatcatccggcacgccgttatccgcctgtactgctccatgctcccgagccggtcgcccggatacgccgcgcgtatcgattcctgccgctcgagcaggcggctcatcagtatcccgagtgacgctttaagcctgtaaagtccgaagagatcaatgctcgcgccggaaaagccctcgatttcatcgacaagcgacacgaaccccgccctctcactctcgtccggaacaatgtgcggcttatcgaagcggtattccacgttttcaccggttataagctcaaagccgaagtggaaccgctcgacatcctgttcacagctgacgacgcggtgcggcagacccgcgcttattatgtagaactccccctcgcgaaggcttacccgctcccccgcgcactcgagcagcattccgccccgtcgcatgaaaaagagctcattgttcgcgtgctcatgcaggacataggtctcgtcgatgattccgcgcgaaccgacatagtcgagggttatgctgagctttatatcctcgatgtcgacaccgaccgtgaagcgtgtgctcttcgtgctcattcttcttcctccccgttatcgctcggagctctcccgtacatctttctgtacgccttcgaaaagtagctcgcagacgagaatccgctcatcatggcgcactccgagaccgaatagcgcttcgaggacagaagagtcccggcgtagtatatccgtctcgcggcgatctgtctggctatcgtaagtccggttatctcgtggaatacgcggcatatataggatttgctgtatccgaactcggcgcagatgcttccgacgcttatctgctcggtgaagtggcggtctatgtactccattatcgaggcggtgaggctgtgcttagattcactctcgtcggaggactggtcggccggggaaacagtccactcacggcagagccggacgagtatttcggtcgcgagcgccatcagggcgttcttcgtgtactcgtcaccccgctcgttctcggcgtacatacgggcgaaaatatccgcgatctccggatcggtcacatggtgcgcgaagcgtagtttttcacagccgaaatcacggagcatcctctttccgataagcagcaggtgacgcgtgcagctgtcctccgagtaaagatcgtgcaactcgtacgggttcacgacatatatcccgcgcggctccggaacaaagctctcccgaccgcatatcatccggctctcgcccgaaacatagcagattatctcgagctcctcgtgccagtgcagctgtttgtcgttccatgactcgtcttctccacatttatagtataccgaaaaattcgcgtcggtcacctcggagatattgtcttcatagtgcatcatcagtctcaccctctaccattataccacaattccggagatcaggcaagacttatcgaagaatttgtgcacgaaattacaagctttggtcaatacgggacatttacttttccaccaaatctgtgatataattgagtcagcagctgcgagaaacgtataaacaatacaaaaggagaccgatcatgaaaacaactatgaaacgcgccctttcaacgctctgccttatgtgtgtacttctgtccatgtccgcggcaagcatttcctgcggtgataacacaacagcggaagacacaaccgccggcaacgctgacgacaccaccgagacagcgaccgaagaggtcacgaccgaacaggatataaagagcacccttcccacagccgatttcggcggagacgagttcaacatcttcctctgggaatacacgcagatggcagtcaccgatgagacaggcgacattataaacgacgccgtttacaagcgtaactccgacgtcgaggagatgtacaacgtcaagcttaacttcacggtcagggatggttcgagcgaatccggacagcaataccagtggttcaagacgataacagcgagcattctcgctggtgacggttcgattgatctcgcgggaggctatggctacatgcttgccagcaattctcttgatggaaactatgtgaatttgtgcgatgtatccccgataaacttcgccgacccatggtgggcggacaaaatcatggaatcctcaaagatcggaaacaaactctatatggctctcggctgcgccgacccacaatactgggactgtgtctacgcgatgtactgtaacaagcgtcttgcggatcagtacagcattccagatctctacgcactcgtcaatgacggaaaatggacgctcgacaagctgatggagttctcagagctggccagcgccgatctcaacggtgatggcgtcatggacgacaccgaccagtacggatatctcacaggaaacaacatggagatcgacgcgctcatccccgcctgtgggataaagatcgtagacaaagacaaagacggtctgccggagcttctcggactgaccgaaaaatatattgatgtccagaaaaggatggaaagctacataaaaacagacgctattctctatggtatcagttgggaaatggtcaaaccattcatgaacggtcagggactcttcatgtcagagcgcatcgaagtttctcacacaatgcgtgagatgaaagacgatttcagtgttctcccgtacccgaagtatgacgaaaagcaggaaggctacggtacatatctctgcatagacaacacgaccggattctcgataccggtgacagccgatgccgaaaagagtggatatatactgaacgccctgtccgcgctcggatactctgatgtcagaccggaatactatgaccgtgtgctcaagggcaaggttgcgagagacgatgaatctactgcaatgctcgacctcatcttcagctcggtgacagatgatttctcgcacttctattcctacagcttcggcaatcagggctcgccgtggatgcttatgcgtatgtccctcaaggagaataaggatatctcctcgatgtgggcaaagaacgagaatatgtataaaaagaagatgggagaactcatttcagctctcaaataaaaggaatcctcaatgcaaagcacaattctcatcctcatctccggcgtgctctgggggataatggggctgttcgtgaaacgtctcaccatcctcggattcacttcggtcgaggtgtcgtctctcagatggattttctccgcggtattactgcttctcattgtcggtgtcgccgaccgcgggaagctccgcgtcagaccgcgcgacctgccgaagttcgcggcttccggaatatttggtatgctcgcgctgtcgacgcttctctatatgagcatgaaccgcacgtcgatcgcggtcgcggacgtcctcatgtacacctcgccgatatgggtgctgatcgcctcggtgccgcttttcggcgaaaggcttgacaagcggaagatcatcgccgttctgctcgcttttctcgggtgcgcatttgtctgcggagtgttcggaggtgtcgggcgcgtcagtctgacaggtatactctgcgggctcggatcgggcgtcgcgtacgcgtcctacagcgttgtcggaaaattcatactgagggactatgacagcgtgacactgactctctggagctcggtcttcgcggggatcggcgcgcttttcatgatagatgtccccggagtcttcacgcggcttatcggctcacccgggtcgctcatccatgtgttcctcatcgccggtgtctgcactatagcgccgttcttcctctactcgctcggacttagaagctgcgcggcgtcgaaagcggcggtgctcgcctgcgcggaaccggtcacggcggcggtcataagtgtcgccttcgcgggagagcatttttcggcggctctcgccgtcgggataatccttgtgatatcggcaatcatactgcttcagaaaagaaccggtgaagactgaaaggcaaaccatcagatcaggatatcccatggttttcgctgtcctccggcattgttcacgccacgcaaaccaagtccggaatgcgaagaaaggaatagtcataagatgacacagaactattttgacgaaaaagacagaaagctccatgacctcatggaggagatacggctgctgccggacagaatgccggacgcggtcgcgagccccggcattgtgacccgtgaggttcattatccgacatctgaatacagatttcttcatgaggcggcgataatatccttcaagggagttctctacacgtcctggtacaactgtcacaccacagagcttcgtggcagaacacccatccgcggaagacgctcttccgacggcggcaggacatggtcggacgtcgaggtcatcgcggacgacaacaccgccgggatactctggtgcccgccggtctacggcatatacgacggcaggctgtggatgttcatgaacgagatgacatcggcggatcacatacacgcgcttgatctcttcgtcctcgacgaggagacggggaaattcacgctcgtatggtctcttccgattgcgttcaagctcaacacaaacgtcgtgacactgtctgacgggcggctgatgctccccggacgcgtcgctgatcacatcgacggatttcctgacattcccgccgtcatgatctccgactccggcagaattgacgccgaatggcggctcgtcaagttacaggaaaacaatctgctcccggacggaacaaggctcattcatccggagatctccccgatagtccgcgggagcgagattctgatgttctgccgcgacgacgacagaaacgtcccgctcgtctacgtttcacacaactcgggagagagctggagcggtccgtatgccgcggatatcccgttctcgtcgtcgaaaatctattccggcacgctctcagacggccgcgactatgtcatcgggaatgagttcccgggcagagaacggctcttcatgctcctgaccgaaccgggcggcggaaaattcacgaagcgcctcatactgcgcgacggctttgacgagaggttcggttacggaaagatgtggcactacccttcggcggcggaggcagacgggaatttatatgtcatttactcggcagacgctgagaatatcgggcgcggcgccgtcatgtcggtgatcccgctcaacaaaatatgattcagaaaggcaaactctatgtacaacttcaaaaccggaatcttcgtcaacgaatggaagaattacgaatcggaatccgcgcttataaaaggactcgagcgcgcggcgtccctcgacgtcgacggcgttcagctgtcggatatgtgtcggcttgataaggctgactcatcgttcagaaaaaacataaagtccgcgctcgactctctcgggctgaaagtgtccgccatctgcggagatatcggcatcaagtttcacaacacggaacggcgcgaagagctgtatgacaccctctggagagtctatgacatcgcgcttgagctcggcacgaatattgtcacaactcacgtgggagtagttcccgccgacaagactaacccacgctacagcgtcatgtttgagacattctctcacatagcggaacacgcggcgtcgcttggcgcttacctcgcgaacgagacgggaccggagaccgcgccggtgctgaaagccttcctcgacgacataaactcccccgcgtccgccgtcaacttcgacccggcgaacaccgcgatgtccacaggcgaaaaggcggaggaagccgcgagaaccctcggaaaatacattgtccacacccatgcgaaggacggaatcctcataaagcacgccgacctcgaagtcatgtacggcgtccgccgcgaccccgatttcaaggaatccgactactgccgcgaggttctgctcggagagggcgacgtcgactggaagaaatacctcgccgtgcttgacgaaatcggctacacgggctacctgacgattgagcgcgaaggcagctccactcacgacgcggacgtcgaaaaggaagtcccgttcctcaaagcgctcatcgctgaataatattttttgaaaggaaaacgaacatgaaaaaactcaaaatcgctgtcatcggagtcggcggaatctccgtctctcacataaacgcatacctcggaaaccccgacgttgaactctacgccttctgcgacattaacgaaaagcgtctgaaggaaaagggcgcaaagtacggaatcactcgtctatacaccgacgaggacgaaatgctgaaggctctcccggagctcgacgctgtgagcgtctgtgtctggaactgcaatcacgcctcctgcgcgataaaggcgctcgacgcgggaaagcacgtcctctgcgagaagccgctcgcgagaactgtcgaggaaggaaaagcgatgctcgaggcggcaaagcggaataaccggctgctgatggtcggcttctgctgccgtttcgagaacgccgcggatatcatccgtactcagcaggaaactgatttcttcggcgaaatctactacgcgaaggcttcctatctgcgccgcaacggcgctccgggcggatggttctgcaataccgcgatgtcgggcggcggacccatgatcgacctcggcgtgcacatcctcgacctcacgagatatctcatgggcaacccgaagccggtgtcggtgttcggcgcgaccttcaacaagctgggcgaccgtccgggcgttcacaagccgaccgacgcttatctctgcgcggacaacaacgatatctgcgacgttgaagacctcgcaacggctatgatacgctatgacaacggcgctgtgctgttcctcgaaagctcatactcgctcaatatcaaggacaccctctactctatggagctcttcggcaccaagggcggagtgaagatcgctcccgacttcgagatgtacaaggacataaacggctacatgatggacatgaccccggcggggatacgcatcgacgagtccgcgtgcttccccggtgagatcgggaatttcgtcgacaccattctcggaagaaccgagtgcagagctccggctgaggacggacttgacattctccgcatactcatggcggtttacgaatcggcgcgcaccggacacgaagtcctgctgtgatgagaatctcagcgaaaaagctctggtcggacggcgtgtggctgtccgaccggactatcgtgataaacggcggcatcataaccgatatcaccgaagacctgaccggggacataccgacagactacctgacgcctggacttatcgacaaccacattcacggcgggg

SEQ ID NO: 1293 - DNA, 3392 bp, Unknown
  16S sequences of unknown bacteria
tcatccgcagccggtcatcggcataccgtgtccgctcctctccgatcacccagtcaaacagacgctctttcatgatatccctcactttctcttctcataagccagacagaccgcatccggcgcgccgtccatgcgcagctcgcccttctcgatccagatcaccctgctgcagatgcgccgcagcaccgtcgtggaatgtgagacgatgagcaccgctgtcccgccgctgatcagctcgcggatgcgcttttcgctcttttcgcggaaaaagcggtctcctacgctgagcacctcatccaggatgagcaccccggacacctggccggcagacgcgatggcaaaagccaggcgcgacaccatgccggaggaataatgacgcaccttttcttccatgaacccttccagtccggcaaacgcgacgatctcttcataatgcgcgtcgagaaaggcgcggctgtacccgcacagcgcgccgttgagatacacattctcccggccgctgagctcatggtcgaagcctgcgcccagcgccagcagcgtgatctgccttcgatccgcgcgcaccgttccttcgctgggcgcatatgtcccgcagatgatgcgcagcagcgtgctcttgcctgagccgttggtgcccacgatgccgacgacctcgccccggcgcaccgtaaagctcaccgcgcacagcgccgtgaaccattcctgcctgcgctcatgcctcagcgtgcgcaccacacgctccttcaggctgagcggcgcatctctctccaacaagaagcgcatcgtgacatgatccgcttcgatcaccacatccgggtctgaagggaccgcgctctcctcatccggcggcgctgtccgaacggcatacagcgcccacagcgccagcaccagcgcgctgagcgcaagccacagcagcgtctctgcgtcgatgatcatcccgatccctcctttacagccgctgcatcagcgagccgtgcagccgcgcataacagatccgccccgcccccagcgacagcagacaccagaacagcatccgcgccaacagcggcgaaggcggcagcgcctgttccagcacgatgatgcggaacgcctcgatatagctgtacagcggattgaacgcgaccagcgtgcgggcgatgccctgcagctgcgtgatcggataaaagatcgccgaacaatacatccacagcgtcagcacgaccgtatacaggtgacgcacatccccgaagctgacataggcgcaggccagcaaatacgatatgcccagcgcaaaccccagcagcagcacgaagatcagcgggatcagcagcatccccgcatgaaacgggatggcaaagacgatgagcaccgccgcaaaggcgatcagggaaaacaacagattgacgaaggcggtcatcacccgggcgatcaaaaagagctccggggacagctgcgccttcagcagcagcgcccggttatccgcaaagacgctgatggacgccatcgtcgccgccgtgaacatctgccagatcagatagccgcacaggtaatagatcggataattttcgatggagcggcggaacatgcctgaaaagatgagcgagagcacggccatggacaacagcgggttgagcacgctccacaggatgcccagcgcgctgcgcgcatatttgcgccgcagctcacgcatcgtcagctcacggacgatgaacgcatgctgcttcatccctttgcctcccgcagccactgccacaaatgctggccgcgcaggcgtctgttgggatgacatcgacgcacgctgcctgcaggccatgcgctcatggcaagcggctgatgcgtcaccttctgcttgagccggccagacagcgcatacgcccgcagcgcatcatccggctgttctggcgccagctctccatcctgatgcagcgggtcatccccgaagcgaagagcgcccagccacgcggcttcctgcgccgtcggcctgaccatgagcagatacagcaggcggtgagccagcgcggcatttcgttcatcgctgatcgtgcgcagatcgcgcgtggcaagctgatccgcataagcgctgatctgcgcgcccagcgccttcgcccaccgtctggcccgctcatcctgcttcaggcagaccggcacccatctgcccgcctcctgacgatagccggcgcacatgccatgcggtgcgccatagacggcttcaaacagcgcaggcacgaagaacgcgcgccggcgcagatcagaagaaggagaaaagaaatacgcatgatatgcggcagggtctgcgccaggctgcagccgggacaggccgaaataaaacccttgcggctgaggcagccccatcgcttcgcacatggcgggcagcgtcatctgcagcgatccgatccagccgctgtccacgatggcataagcgccttcttccagcccttcctgcttcagatagccctgcagggcgtcatatgctgctttcgcctccgcgctcatccagcggacaaacgccggatctgagcacaggcgcttgcgcagctcatccccctgatcaggcgtcaacggcgcatccggcccgcaaggcagcgccagctgacgcaggcacgcttcctgctgctgggcaggaagcatcgtccgtgcgatcagcgagcgcggcgtcatctgcagcgatgggcgcagcagcagtcgcagcgctttttccatatcgatatgcgcatatgcccgatgaagcgagagccgggaacaatacagatagcggatctccatccgcacgcccagcgcgccgcacagccgctttgccgcctctgccatcatccagccatcgcgcgagagaaaatacagcgtgcggatgccgcggcgctgcgcttctttcagcacccagatgacaaacccgcacaacaccggcccgaataccgcataggcatactgatcgagccgtttcatcgaatccgtgcgcaccgccatcagcggcatcctggccatcacgcggcgaaagcgcatgatgtcatccgcatagcgcctctgcttgatgcgccagtgcagacgcggcggcgtcatggcgacgaacagcggcttgacgatatagggcagcgcagacagcgagggcaatccgagcgcggcaaaccctttgccgcgtgtgcgcgcctctcgaagcgcatgcgggaaagaccgccggtgataactgttccggtcttcccggtacagataaagatattcctgcacattggccccctgcagccctgccgcatgcaggcgcatgaacagctcatagtcttcgctgcggccgatgctgcgcgcttcacaatagccatctgccagcgcatgcgcgcgaaacatcaccgaggggtggatatatggagaatgcggcaggaaatcccgcgcgcaaggctcccggggcacccgcacatgcccccatg

SEQ ID NO: 1294 - DNA, 9989 bp, Unknown
  16S sequences of unknown bacteria
ttactgtgtaagccgggataagccaaaggcccttcgggcctttggcttatttactgaaagtttcggggttcggttgatgaatttgttaagtttttgacactttacagaccgcccgatttcctgtatcatggtatcaggcaggattcgccgtttttggcgggtctgcatggaatcaaaaggtttgccatgacagtgggtaagctgtcatgtccgttacgagtaaaaaaagaggtgtctgttttatgagaggcgttgagacccgtattcaggaaatacgccaccggatctttaccgaagtggcccgtatggcttatcataccgaatggtcggttgccaagcgcattgaggaactcccgtacaagattatccccggtgaagtgggtaacttccgcaacgatgtcttcctggagcgtgccatcgtaggtgaacgcctgcgtctggctatgggtctgcccaaccgcggcgccggtgaacatgcccccatttctgataacatcgaagctgcggatcgggacgaaacttattacacccctccgctgatcaatatcatcaagttcgcctgcaatggctgtgctgaaaagcgtgtcctggtgactgaaggctgtcagggctgtctggctcacccctgcgtagaggtctgccccaagggtgccatcaccctcgaccgctacaacggccgcagccatatcgaccccgaaaagtgcatcaagtgcggtcgctgcgctgaagtatgctcctatcatgccatcatcacccaggagcgtccctgtgccgctgcctgcggtatggacgctatccataccgacatcaacggcaaggctgaaatcgactacgacaagtgtgtatcctgcggtcagtgtctggtcaactgtcccttcggcgccatcgccgacaagagccagatcttccagaccatccgggcaatccagtcgggtgagcgtgtctatgccgctgtggctcccgctttcgtcggtcagttcggacccaaggtaacccccggcaagctccgtgctgccatgaagaagctcggctttgccgatgtctttgaggttgccatcggcgccgacctctgtgccacccaggaagcggaggacttcatcgccgaagttcccgaaaagctgcccttcatgggtacttcctgctgccccgcctggtcggtaatggctaagaagcgcttcccggagtatgccaactgcatctccatggccctcactcccatggtgctcaccgcccgtctgatcaagaaggaacaccccaacggcaaggttgtattcatcggcccctgcgctgccaagaagctggaagccatgcgccgcagtgtccgcagtgaagtggacttcgtcctcaccttcgaggagatgaccggtatcttcgccgccaaggaactggatctcgccaccattgaggaagatcccgacggcgtaaacgatgcctccgccgacggccgtgactttgcggtagccggcggcgttgccaaggctgtggtcaatgtcatcaaggagcgttaccccgaccgtgagatcaaggttgccaatgccgaaggtctccgggactgctataagatgctccgggacgctgtggctggcaagtatccgggctatctgctggaaggtatggcctgtcccggcggctgtgttgccggcgccggtaccatgcagtccatcaagaagagccaggctcaggttcacctgtacgccaagcaggccaagcacaagacctccaacgaaaccgaacacatcaaggaactggaaaagctggtggactaagtcccgccgcttcccttcagaaccggtttacagcagggaatctctccctgctgtttttttgtgcggagaaccgggtttcccctcttgcattccgccgggtttcatgttataacagagaaacagccgccgccccgggaaaaatttccctccccggcggaaggaaccgcattcattatgacggaaaggagaaaacccatgatttccatcaaaccgatccattatggttccccggcctacctggaaacgctggaactgcgcaaccgggtcatgcgtctgccgctgggactgaacattcacgacgaggacttcagctttgaacagaactgcgtgctgtatgccgcctttgatggggaacaggtgatcggcatgggttccatgtcccgggagggggacacctgcaaggtggaatacctctgtgtggacaccgcgatccagagccggggtctgggccgtcagctgctcgaagccctggaaggcgctgcccgggaacagggtgccgcccatatctgtctggatgcccgggtcacagcccagcacttctatgagcgggccgggtaccatactgtgggggaaatcttcctgctgagctatgccccggtggaacatatcctcatggaaaaagatctctgatgcattaaaaaaagccctctgctccggaatattccggaacagagggcttttttgcacacccggcaggggaaaattataccggacgttaagttttccacactttcaacggagttttccacggggtttggggaaaggctgggaaaacccggcgcgtttctccccaggacgagggaaaccctccgattcatgggatttcccgggacagcacctctgttttctgaacagatgctgggggaaaagtccctttgctgtcccggactgccggtgcaaaactccccgggacaacaaaaaaccggggcggaaacccgctccggctggtcagaaatatagcaaagcgtaatattttccccggtccgcccggagaaatgcttcccccggaatcctgcccaccgccgatggggcagagtctcccggagatggggagatccggttacttccggcacaggtgcagcttttcacctacgccccggcagcacagataccccagtcccaccagcaccccgatgccggtgagaagtttggcgatcagtttcattttctcatgcctcccgatcagaaatcacagaccacaaataccccgtcattttccgctgccagcggctccatgggatttgccatgggatagaaactgccggtatgggggcgtttgccgtcactgcgtttatagagatttccccggagctgccggcctggagtgagttcccccagcagatctgccgggagttctgccagccagccccagtatttgccctgaagatcttccccggtaaaggggtgcgcaagcagcgcttcgatgggtttgccgtccagtgtgatctccagcgcctgaggacctgcctcgatccgcagttcctgctgatcccgcaggacacagatgatccggctctccggttccggcggcgtttcaaacgcccacaaccggatatacagccgctgagggtccactgccaggagcccctgggcaaagggtttgtaatcccgcggctccaatggatactgggtgaccttcatcaccggcagagtatcgaactggggccgggtcttcagccggcaaatgggaaattctgtcatgcatacaccgcctttcagaccgaatcctgtcggtctgtaccgatttctatatagatacagtataacacaatcgcactatttcgtgcgccataaaatgtaaaaaattatgatgtttttttgtcataaaaatcagtataatgaaagtatgtccgtttatttttccagaaggaggttctgtgtatgaaagctgaccgttaccgctatgatgaccatgaccgtcccgatctccgggatctgcccacccatgccggagtggacaaggactgccgggaggaaatcgaggagaaaaccgccgaaaacatcgaaaccatgaaggaactccaggacgccctctatgccgatgggcgggaggggattgtgattgtgctccaggccatggacgccgccggtaaggacagcaccatcaagcatgtgatgagcgggctcaatccccagggtgtgatggtgcacagcttcaaacagccgggcgccgaagaactcgcccatgactacctctggcgggtggtacagcatctgccgccccggggcagcattgccatcttcaaccgcagccactatgaagatgtactggcagtgcagatcctggacctctggaagaactatcagatgcccgaccgggtcctccgggacagccgggaggaattcttccacaagcgctaccgtcagatccggcagttcgaggaatacctctatgaaaacggctaccgggtggtgaagatcttcctgcatgtatccaaggaggaacagggcaaacgcttcctggaacgcatcgaggagccggaaaagaactggaagttctcctcatcggatctggagacccgggaacggttcgaggaatataccgacctctatgaggaggtgatccgggagactgccagcgaccatgccccctggtatgtcctgcccgccgaccagaagtggtacacccgctacctggtcagcgagatcctggtggatctgctccggcagtgcgatccccggtatcccgagctctcggaaaccgaacgctcccgtctggctgaggcccgggaagttctcctccgggaacaggacaagaaagactgactctctcaggcgaagggtatccccaagcggggcccttcgcttttttgtgtctgtccccggagaacccacagtatttttatgaaaattgtccagtttcttcctatgtttcctgtgtattccgccaaagtgtgggatttttatttttttgctgcaacaaaacttcccgctgacgcatattacaggcgaaacccaaacacaaaagatctccggctcccccgccggttttactgaaacacaaggaggaaatgaccatgaccaagaccctgacccgtaccattaccgctgccctgctcatcgccgctctggcggttcccgctgccgctgccaccactgccgacatcggtgtcgaaaaggccaaggaagctgccctgaaccatgccggtgttgccgagagcgacactgtcttcctcattgccgaggcggactacgacgacggacgcaaggaatatgaggtggaattctacgccggcagcaccgaatatgactacaccattgacgccgcttcgggccgggtgctcaagttcgataccgagctggaatggtattcggcagacgatgacgccggatacggctggcagaatgtcatcggcaagcagaaggcccaggagatcgccctggcagatgccggtgttgccgccggggacgccctgcacctcattgtaaagcccgattgggacgatggcgtgcgcatctatgaggtggagttctacaccgccagccaggagtatgactatgagatccacgccgaaaccggtgacattctgagccgggacagagaggctgagtggaacggcaccgccgcttccggcagctccaatactggcagcacaagcagcactggcagcactggcactgcctccgcttccagcaccagcagcaccgcttccgccagcacaacagacatcggcgaagccaaggccaggagcgttgccctcagtcacgccggcatctccgagagcagcaccagctacatccatgccaagaaggactgggacgacgggcgctgggtctatgatgtggagttctgggcggacggcaaggagtacgactatgagatcctggcttcgaacggcaccattctcagctatgactatgacgccgagtaccagtggaatggctcgaccggcactggcagcacttccagcaccgcagacatcggcgaagccaaggcaaagagcgttgccctcagtcacgccggcatctccgagagcagcaccagctacatccatgccaagaaggactgggacgacgggcgctgggtctatgatgtggagttctgggcggacggcaaggagtacgactatgagatcctggcctcggacggcaccattctcagctatgactatgacgccgagtaccagtggaacggctcgtccagcacttcgggcgataccatcagcaccgagaaggtcaagagcatcgtcaccgaccgggcgggtgtcagcggcaccttccgggaactgaagctggagcgggacgacggacgcactgtctatgaaggtgagatgcgctccggacgcaccgactatgagttcaccatcgatgcctataccggcgctgtgctggaatgggataccgactgggacgactgagttatcccctcattaccccccaatataaaaaacagagcggaacagtttccgctctgtttttttgctgtgtgcgggtggattacggggtgtcggtccgcccggtgagatagtccagcgttaccccgtaataatccgccagctgcaccgcccggtccagcggcagcagccgttcgccccgctcatatttggaatagagggactggtcacagtgcaggtaggcggcaacctccttctgggtgaggtcccggtcctcccgcaggtcccggatgcgcagtttcatctttcatcaccagtgccactataacaaaggacagattgtcctattgacataatggactatttgtcctaaaataatccactggaggtgagaaaaatggaaagttaccaggagccggactacaaggaactgtatttttctctgttccgggccagtgaaaaggcaatccggattctaatccaggcacagcaggaatgtgaggagcaggttctctccgccggggagacggaaactgcccaggaataagacagtgcgcccaccctgccggaagccgctgccccggacccccttgtatttcccggtgaattgcggtacgctgaaaggggaagctctggtcccgcgccttaaaatcaccgaaagaagggaagattatgcagccttttgcagcgctgctctgcacccttgcggctctggtctctgccgctgccctgccccggcaggcggacactgccctgaccagcctccagcgccgggaatactatggcgatgtcttggaggaaggggcttacttcgacagcgcactcatcgactatgtgggaacagagtcctatgaacagtgggtgactgcccagctgcggcccggtgtgtatcagtttctccgggacttcggcatctcccgggaagaactggcagagattgtccaaccggacatctatgagcagtatatccggtactggcctgatgaggagcttctcagagggcgtcccggctggacccaatggctctggctgctggggaagggcgccaatgccgacctggcatcgctcctgcccccggaggaggacaccgccggactgatacaggctctgctggaggaaaaccgaatgatgctctatgctgccttctgccggtatcttggcagcgaggaggtggaggcctggattcagacccaggaaaacgcctgggacgcggtagcctggagcaatccctggagtgaggactgggtggtacctgacctgatcgaggacttcggcatcaccgaccaggaactgctggaattcatcataccctatgcccaggaggctgccacggaccccaattccttcctggcctggcgtgttcccagcgatcaggagatcattgagcacggcggctatgtggatatccggctgatcaactatatcggcggtgatgcctttgaagcctggctccggggagagaaccgctccggaggaaaaacagtctatgaccttctccgggacttcggcatctcccgggaggaactggcggagattgtccacccggacatctatgaacaatatatccggtactggccggaggaataaaaaaggaggctggaatccagcctccttttttattttgcgcggaatggggtcagaaggtgagatccatcagacctgccatcgccagaatatagatcttcagagcactcagcatgaactcggtgttcacgccctcgttggcaccgtgcatgctgcccacaaagtcgggcttctcggcatcgtcgtccgggccgaagctcaccgcattggcaaaatgacgggcataggtgccgccgcccatggtaaagggcttcttgtcactgccggtcacgctgcgataggcattcatcagcacatcaatcgccggggactcggggtggatatagaagggcttgttcacccggctgggaataaactccgcctcgccggtggctgccagagccttgctcttttcgatgagctcctctccggtgatgcaggtggggaaccgcacatcgatggtctggcgcaggacaccatcggtcatggaaatggtgccgccgatgcaggtcagcgggtcaaagacctcgtcctgacaggcaatgccaaaggacgaaccatcggtgcaggacagcagtgtgcgcagcatcgaaagataggtctcctcctccggcgtgcagaggtgattgtccagcagatagtttaccaccaggccgatggcattcacggtgccctgaggcttggaggcatgtccgccgatgccataaccggtgatgcgtacacagtcaccctcggcagcgatcttcacattctcggtttcctgaagagcggcgatgtctgccttcaccagcgccgaagcacggtcgggcaccacattgccggctacaccgcccgcaaagtcccggagattgcccgagagcttccggctcacaaaggcaccgccaaaaccgcccttttcaccatagcccaccgggaagtcggcatcgggtgtgaaacagaaggccggcatggggttccgctccagatagtaatccacatcggtcatgccggtttcctcactgcagcccagcaggacccgcagggtatagggaagggtctcaccggtctggtcgcagtactccttgaagaactttgccatatacaaagtcagcagagccgggcccttatcatcactgacgccccgtccgatcagccagccgtccttttcaatcatgccaaagggatcgctgttccagccattgcccgcaggcactacatccagatgcgcaatggtggcaagctgggtttcgctcacacccttcacatcggcataacccatatatccatcgcattctccggcttcaagccccaggttccgggcaatctccagagcggcatccagtgccttgcgcacacccggaccatagggggcattgggctctgccggcgcctccacgctgtcaatgtcaatgactgtcttgagatcccggatcaatgcctcccggttgtcggcaataaaagcatccacatgctcttcgatccatctgtgattcatcatattctgtccctccttgaaggattgtttcttaccttccattatagggggattttcccggggaatcaactgcctccactcaaaatacagaaaaccgcccaaattttcggtctgcgccccggcggttctgccgaaaaatccccggtacgcttgtaaatcccttccagacgtgccatactgaaactgtactactgtcaggaggtgctgttttatgaaactctgccgtctgatgcttggtctggcgctctgcctgaccctctgtgcctgtgccccggaaccgggtcccgctgccggagatcccgaccccaaatccgctgtgggtcaggaacagccggaagaacccccggtgcagcctgtttccccggaaaagcccatgccggaggaggagggaaccaagcccgctgaacccaccggtcctgtgccggaaaagccctctgagccggaggagccggaactcccggcggaacctgcggaggacggggaggagatcctgtactaccgcagcacaggcaaaaccccgccggacaaaggaggaaactgccatggaatttccggaactctgtgaacagatcaaagcacatgagggacaggtcttttacacggtgcggggcaaggaactgcgctacacagtgcaggggaataccataatccccagccgtacccgctaccagctctcccgggccgattttgaaaaggcctttcaacagatgccgttgtccggcccaggacagatcagcagcctggtccgggggtcgtcctatatctatgcgattctctcggcgctctgccggaactgacccccaaatccctatacagaacgcaataaaaatcccccggcggagccgggggtat
